(19) United States
(12) Patent Application Publication
(10) Pub. No.: US 2022/0339270 A1
(43) Pub. Date: Oct. 27, 2022

(54) COMPOSITIONS AND METHODS FOR THE TREATMENT OF TAUOPATHY

(71) Applicant: Voyager Therapeutics, Inc., Cambridge, MA (US)

(72) Inventors: Wencheng Liu, Cambridge, MA (US); Todd Carter, Cambridge, MA (US); Jinzhao Hou, Cambridge, MA (US); Yanqun Shu, Cambridge, MA (US); Giridhar Murlidharan, Malden, MA (US); Martin Goulet, Weston, MA (US); Dinah Wen-Yee Sah, Hopkinton, MA (US); Steven Paul, Cambridge, MA (US); Xiao-Qin Ren, Cambridge, MA (US); Xin Wang, Arlington, MA (US); Hiu Yan Chung, Cambridge, MA (US)

(73) Assignee: Voyager Therapeutics, Inc., Cambridge, MA (US)

(21) Appl. No.: 17/607,141

(22) PCT Filed: Apr. 29, 2020
(86) PCT No.: PCT/US2020/030357

§ 371 Date: Oct. 28, 2021

Related U.S. Application Data
(60) Provisional application No. 63/002,011, filed on Mar. 30, 2020.
(60) Provisional application No. 62/839,891, filed on Apr. 29, 2019.

(51) Int. Cl. A61K 39/00; A61P 25/28; C12N 7/00; C12N 15/86

(52) U.S. Cl. CPC A61K 39/0007; A61P 25/28; C12N 7/00; C12N 15/86; A61K 2039/5256; C12N 2830/008; C12N 2750/14142; C12N 2750/14145; C12N 2750/14123; C12N 2750/14134

(57) ABSTRACT

The disclosure provides compositions and methods for the preparation, manufacture and therapeutic use of viral vectors, such as adeno-associated virus (AAV) particles having viral genomes encoding one or more antibodies or antibody fragments or antibody-like polypeptides, for the prevention and/or treatment of diseases and/or disorders.

### REFERENCE TO RELEVANT APPLICATIONS

[0001] This application claims the benefit of U.S. Provisional Patent Application No. 62/839,891, entitled “Compositions and Methods for the Treatment of Tauopathy”, filed Apr. 29, 2019 and U.S. Provisional Patent Application No. 63/002,011, entitled “Compositions and Methods for the Treatment of Tauopathy” filed Mar. 30, 2020; the contents of each of which are herein incorporated by reference in their entirety.

### REFERENCE TO THE SEQUENCE LISTING

[0002] The present application is being filed along with a Sequence Listing in electronic format. The Sequence Listing file, entitled 20571304PCT.txt, was created on Apr. 29, 2020, and is 18,423,475 bytes in size. The information in electronic format of the Sequence Listing is incorporated herein by reference in its entirety.

### FIELD OF THE DISCLOSURE

[0003] The disclosure relates to compositions and methods for vectored antibody delivery (VAD), wherein the antibody may be an anti-tau antibody.

### BACKGROUND

[0004] Tauopathies are a group of neurodegenerative diseases characterized by the dysfunction and/or aggregation of the microtubule associated protein tau. Tau is normally a very soluble protein known to associate with microtubules based on the extent of its phosphorylation. Tau is considered a critical component of intracellular trafficking processes, particularly in neuronal cells, given their unique and extended structure. Hyperphosphorylation of tau depresses its binding to microtubules and microtubule assembly activity. Further, hyperphosphorylation of tau renders it prone to misfolding and aggregation. In tauopathies, the tau becomes hyperphosphorylated, misfolds and aggregates as neurofibrillary tangles (NFT) of paired helical filaments (PHF), twisted ribbons or straight filaments. These NFT are largely considered indicative of impending neuronal cell death and thought to contribute to widespread neuronal cell loss, leading to a variety of behavioral and cognitive deficits.

[0005] The first genetically defined tauopathy was described when mutations in the tau gene were shown to lead to an autosomal dominantly inherited tauopathy known as frontotemporal dementia and parkinsonism linked to chromosome 17 (FTDP-17). This was the first causal evidence that changes in tau could lead to neurodegenerative changes in the brain. These molecules are considered to be more amyloidogenic, meaning they are more likely to become hyperphosphorylated and more likely to aggregate into NFT (Hutton, M. et al., 1998. Nature 393(6686):702-5).

[0006] Other known tauopathies include, but are not limited to, Alzheimer's disease (AD), Frontotemporal lobar degeneration (FTLD), Frontotemporal dementia, chronic traumatic encephalopathy (CTE), Progressive Supranuclear Palsy (PSP), Down's syndrome, Pick's disease, Corticobasal degeneration (CBD), Corticobasal syndrome, Amyotrophic lateral sclerosis (ALS), Prion diseases, Creutzfeldt-Jakob disease (CJD), Multiple system atrophy, Tangle-only dementia, and Progressive subcortical gliosis.

[0007] Several approaches have been proposed for therapeutically interfering with progression of tau pathology and preventing the subsequent molecular and cellular consequences. Given that NFT are composed of hyperphosphorylated, misfolded and aggregated forms of tau, interference at each of these stages has yielded a set of avidly pursued targets. Introducing agents that limit phosphorylation, block misfolding or prevent aggregation have all generated promising results. Passive and active immunization with late stage anti-phospho-tau antibodies in mouse models have led to dramatic decreases in tau aggregation and improvements in cognitive parameters. It has also been suggested that introduction of anti-tau antibodies can prevent the trans-neuronal spread of tau pathology.

[0008] Antibodies have relatively short half-lives, and this presents an ongoing and long-felt challenge for antibody-based therapies. In order to achieve a sufficiently high concentration of an antibody for long lasting therapeutic effects, antibody therapies are traditionally delivered by repeated administration, e.g. by multiple injections. This dosing regimen results in an inconsistent level of antibody throughout the treatment period, limited efficiency per administration, high cost of administration and consumption of the antibody. Hence, there remains a need in the art for delivery of antibodies and antibody-based therapeutics through alternative routes or modalities of administration.

[0009] One such alternative route of administration is by expression vectors (e.g. plasmid or viral vector), including but not limited to, adeno-associated viral vectors (AAVs). Adeno-associated viral vectors are widely used in gene therapy approaches due to a number of advantageous features. As dependoparvoviruses, AAV are non-replicating in infected cells and therefore not associated with any known disease. Further, AAVs may be introduced to a wide variety of host cells, do not integrate into the genome of the host cell, and are capable of infecting both quiescent and dividing cells. AAVs transduce non-replicating and long-lived cells in vivo, resulting in long term expression of the protein of interest. Further, AAVs can be manipulated with cellular and molecular biology techniques to produce non-toxic particles carrying a payload encoded in the AAV viral genome that can be delivered to a target tissue or set of cells with limited or no side-effects. Given the foregoing, the use of AAVs for vectored antibody delivery (VAD) of anti-tau antibodies would allow for longer lasting efficacy, fewer dose treatments, and more consistent levels of the antibody throughout the treatment period.

[0010] In vectored antibody delivery (VAD) of anti-tau antibodies, an AAV is used as the delivery modality for a nucleic acid sequence encoding the anti-tau antibody, or a fragment thereof, which results in in vivo expression of the encoded payload, e.g., functional anti-tau antibody, or a fragment thereof.

[0011] The mechanism underlying VAD is thought to proceed through the following steps. First, the AAV vector enters the cell via endocytosis, then escapes from the endosomal compartment and is transported to the nucleus wherein the viral genome is released and converted into a double-stranded episomal molecule of DNA by the host. The transcriptionally active episome results in the expression of encoded anti-tau antibodies that may then be secreted from the cell into the circulation. VAD may therefore enable continuous, sustained and long-term delivery of anti-tau antibodies administered by a single injection of AAV particles.

[0012] Previous studies of an AAV-mediated antibody technique known as vectored immunoprophylaxis (VIP) have focused on neutralization of human immunodeficiency virus (HIV) (see, e.g. Johnson et al., 2009, Nature Med., 15, 901-906, Saunders et al., 2015, J. Virol., 89(16), 8334-8345, Balasz et al., 2012, Nature 481, 81-84, the contents of which are incorporated herein by reference in their entirety). Balasz et al. reported a long-term, even lifelong, expression of monoclonal antibody at high concentration from a single intramuscular administration in mice that resulted in full protection against HIV infection. AAV-mediated VIP has also been demonstrated against influenza strains (see, e.g. Balasz, et al. Nat. Biotechnol., 2013, 31(7):647-52) and Plasmodium Falciparum, a sporozoite causing malaria infection (see, e.g. Deal at al., 2014, PNAS, 111 (34), 12528-12532), as well as cancer, RSV and drug addiction (see, e.g. review by Schnepp and Johnson, Microbiol. Spectrum 2(4), 2014). Though promising, these studies emphasize efforts to prevent disease. There still remains a need for improved methods of prevention, and new antibody-mediated therapies for research, diagnosis, and treatment of disease.

[0013] The present disclosure addresses this need by providing novel AAV particles having viral genomes engineered to encode anti-tau antibodies and antibody-based compositions and methods of using these constructs (e.g., VAD) for the treatment, prevention, diagnosis and research of diseases, disorders and/or conditions associated with tau pathology. The present disclosure further embraces optimized AAV particles for delivery of nucleic acids (e.g., viral genomes) encoding anti-tau antibodies and antibody-based compositions to a subject in need thereof.

### SUMMARY

[0014] The present disclosure describes AAV particles for delivery of anti-tau antibodies to a target tissue. AAV particles of the present disclosure may comprise an AAV capsid and a viral genome.

[0015] Viral genomes of the present disclosure may comprise a 5′ ITR with a sequence selected from SEQ ID NO: 2076 or 2077, one or more promoter regions with a sequence selected from SEQ ID NO: 2080-2089 and 2238-2239, an antibody polynucleotide with a sequence selected from SEQ ID NO: 1740-1989, 2241-2243 and 2169-2170, or encoding a sequence selected from SEQ ID NO: 1740-1989, 2241-2243 and 2169-2170, a polyadenylation signal sequence with a sequence selected from SEQ ID NO: 2122-2124, and a Y ITR with a sequence selected from SEQ ID NO: 2078-2079. In some embodiments, viral genomes described herein may comprise one or more exon sequences with a sequence selected from SEQ ID NO: 2090-2094. In some embodiments, viral genomes described herein may comprise one or more intron sequences with a sequence selected from SEQ ID NO: 2095-2105, 2240 and 2256-2258. In some embodiments, viral genomes described herein may comprise one or signal sequence regions with a sequence selected from SEQ ID NO: 1740, 1741, 1861, 2106-2117 and 2241. In some embodiments, the signal sequence region is derived from an antibody sequence. In some embodiments, viral genomes described herein may comprise one or more tag sequence regions with a sequence selected from SEQ ID NO: 2118-2121 and 2255. In some embodiments, the viral genomes described herein may comprise a filler sequence region with a sequence selected from SEQ ID NO: 2125-2126. Viral genomes described herein may comprise a sequence selected from SEQ ID NO: 1990-2075, 2137-2168, 2171-2237 and 2260-2321.

[0016] Viral genomes described herein may comprise more than one antibody polynucleotide. When more than one antibody polynucleotide exists in a viral genome, these antibody polynucleotides may be separated by a linker sequence, with a sequence selected from SEQ ID NO: 1724-1739, 2244-2254 and 2259. In some embodiments, viral genomes described herein comprise a first antibody polynucleotide sequence and a second antibody polynucleotide sequence, wherein each may encode an antibody heavy or light chain or a fragment thereof. In some embodiments, the viral genome comprises more than two antibody polynucleotides.

[0017] In some embodiments, a viral genome, when read 5′ to 3′, may encode an antibody heavy chain, at least one linker, and an antibody light chain. This viral genome may be described as comprising a heavy-linker-light configuration.

[0018] In some embodiments, a viral genome, when read 5′ to 3′, may encode an antibody light chain, at least one linker, and an antibody heavy chain. This viral genome may be described as comprising a light-linker-heavy configuration.

[0019] The viral genomes described herein may be packaged into an AAV particle comprising any AAV serotype known in the art, or selected from VOY101, VOY201, AAVPHP.B (PHP.B), AAVPHP.A (PHP.A), AAVG2B-26, AAVG2B-13, AAVTH1.1-32, AAVTH1.1-35, AAVPHP.B2 (PHP.B2), AAVPHP.B3 (PHP.B3), AAVPHP.N/PHP.B-DGT, AAVPHP.B-EST, AAVPHP.B-GGT, AAVPHP.B-ATP, AAVPHP.B-ATT-T, AAVPHP.B-DGT-T, AAVPHP.B-GGT-T, AAVPHP.B-SGS, AAVPHP.B-AQP, AAVPHP.B-QQP, AAVPHP.B-SNP(3), AAVPHP.B-SNP, AAVPHP.B-QGT, AAVPHP.B-NQT, AAVPHP.B-EGS, AAVPHP.B-SGN, AAVPHP.B-EGT, AAVPHP.B-DST, AAVPHP.B-DST, AAVPHP.B-STP, AAVPHP.B-PQP, AAVPHP.B-SQP, AAVPHP.B-QLP, AAVPHP.B-TMP, AAVPHP.B-TTP, AAVPHP.S/G2A12, AAVG2A15/G2A3 (G2A3), AAVG2B4 (G2B4), AAVG2B5 (G2B5), PHP.S, AAV1, AAV2, AAV2 variants, AAV2G9, AAV3, AAV2/3 variants AAV3a, AAV3b, AAV3-3, AAV4, AAV4-4, AAV5, AAV6, AAV6.1, AAV6.2, AAV6.1.2, AAV7, AAV7.2, AAV8, AAV9, AAV9K449R, AAV9.11, AAV9.13, AAV9.16, AAV9.24, AAV9.45, AAV9.47, AAV9.61, AAV9.68, AAV9.84, AAV9.9, AAV10, AAV11, AAV12, AAV16.3, AAV24.1, AAV27.3, AAV42.12, AAV42-1b, AAV42-2, AAV42-3a, AAV42-3b, AAV42-4, AAV42-5a, AAV42-5b, AAV42-6b, AAV42-8, AAV42-10, AAV42-11, AAV42-12, AAV42-13, AAV42-15, AAV42-aa, AAV43-1, AAV43-12, AAV43-20, AAV43-21, AAV43-23, AAV43-25, AAV43-5, AAV44.1, AAV44.2, AAV44.5, AAV223.1, AAV223.2, AAV223.4, AAV223.5, AAV223.6, AAV223.7, AAV1-7/rh.48, AAV1-8/rh.49, AAV2-15/rh.62, AAV2-3/rh.61, AAV2-4/rh.50, AAV2-5/rh.51, AAV3.1/hu.6, AAV3.1/hu.9, AAV3-9/rh.52, AAV3-11/rh.53, AAV4-8/r11.64, AAV4-9/rh.54, AAV4-19/rh.55, AAV5-3/rh.57, AAV5-22/rh.58, AAV7.3/hu.7, AAV16.8/hu.10, AAV16.12/hu.11, AAV29.3/bb.1, AAV29.5/bb.2, AAV106.1/hu.37, AAV114.3/hu.40, AAV127.2/hu.41, AAV127.5/hu.42, AAV128.3/hu.44, AAV130.4/hu.48, AAV145.1/hu.53, AAV145.5/hu.54, AAV145.6/hu.55, AAV161.10/hu.60, AAV161.6/hu.61, AAV33.12/hu.17, AAV33.4/hu.15, AAV33.8/hu.16, AAV52/hu.19, AAV52.1/hu.20, AAV58.2/hu.25, AAVA3.3, AAVA3.4, AAVA3.5, AAVA3.7, AAVC1, AAVC2, AAVC5, AAV-DJ, AAV-DJ8, AAVF3, AAVF5, AAVH2, AAVrh.72, AAVhu.8, AAVrh.68, AAVrh.70, AAVpi.1, AAVpi.3, AAVpi.2, AAVrh.60, AAVrh.44, AAVrh.65, AAVrh.55, AAVrh.47, AAVrh.69, AAVrh.45, AAVrh.59, AAVhu.12, AAVH6, AAVLK03, AAVH-1/hu.1, AAVH-5/hu.3, AAVLG-10/rh.40, AAVLG-4/rh.38, AAVLG-9/hu.39, AAVN721-8/rh.43, AAVCh.5, AAVCh.5R1, AAVcy.2, AAVcy.3, AAVcy.4, AAVcy.5, AAVCy.5R1, AAVCy.5R2, AAVCy.5R3, AAVCy.5R4, AAVcy.6, AAVhu.1, AAVhu.2, AAVhu.3, AAVhu.4, AAVhu.5, AAVhu.6, AAVhu.7, AAVhu.9, AAVhu.10, AAVhu.11, AAVhu.13, AAVhu.15, AAVhu.16, AAVhu.17, AAVhu.18, AAVhu.20, AAVhu.21, AAVhu.22, AAVhu.23.2, AAVhu.24, AAVhu.25, AAVhu.27, AAVhu.28, AAVhu.29, AAVhu.29R, AAVhu.31, AAVhu.32, AAVhu.34, AAVhu.35, AAVhu.37, AAVhu.39, AAVhu.40, AAVhu.41, AAVhu.42, AAVhu.43, AAVhu.44, AAVhu.44R1, AAVhu.44R2, AAVhu.44R3, AAVhu.45, AAVhu.46, AAVhu.47, AAVhu.48, AAVhu.48R1, AAVhu.48R2, AAVhu.48R3, AAVhu.49, AAVhu.51, AAVhu.52, AAVhu.54, AAVhu.55, AAVhu.56, AAVhu.57, AAVhu.58, AAVhu.60, AAVhu.61, AAVhu.63, AAVhu.64, AAVhu.66, AAVhu.67, AAVhu.14/9, AAVhu.t 19, AAVrh.2, AAVrh.2R, AAVrh.8, AAVrh.8R, AAVrh.10, AAVrh.12, AAVrh.13, AAVrh.13R, AAVrh.14, AAVrh.17, AAVrh.18, AAVrh.19, AAVrh.20, AAVrh.21, AAVrh.22, AAVrh.23, AAVrh.24, AAVrh.25, AAVrh.31, AAVrh.32, AAVrh.33, AAVrh.34, AAVrh.35, AAVrh.36, AAVrh.37, AAVrh.37R2, AAVrh.38, AAVrh.39, AAVrh.40, AAVrh.46, AAVrh.48, AAVrh.48.1, AAVrh.48.1.2, AAVrh.48.2, AAVrh.49, AAVrh.51, AAVrh.52, AAVrh.53, AAVrh.54, AAVrh.56, AAVrh.57, AAVrh.58, AAVrh.61, AAVrh.64, AAVrh.64R1, AAVrh.64R2, AAVrh.67, AAVrh.73, AAVrh.74, AAVrh8R, AAVrh8R A586R mutant, AAVrh8R R533A mutant, AAAV, BAAV, caprine AAV, bovine AAV, AAVhE1.1, AAVhEr1.5, AAVhER1.14, AAVhEr1.8, AAVhEr1.16, AAVhEr1.18, AAVhEr1.35, AAVhEr1.7, AAVhEr1.36, AAVhEr2.29, AAVhEr2.4, AAVhEr2.16, AAVhEr2.30, AAVhEr2.31, AAVhEr2.36, AAVhER1.23, AAVhEr3.1, AAV2.5T, AAV-PAEC, AAV-LK01, AAV-LK02, AAV-LK03, AAV-LK04, AAV-LK05, AAV-LK06, AAV-LK07, AAV-LK08, AAV-LK09, AAV-LK10, AAV-LK11, AAV-LK12, AAV-LK13, AAV-LK14, AAV-LK15, AAV-LK16, AAV-LK17, AAV-LK18, AAV-LK19, AAV-PAEC2, AAV-PAEC4, AAV-PAEC6, AAV-PAEC7, AAV-PAEC8, AAV-PAEC11, AAV-PAEC12, AAV-2-pre-miRNA-101, AAV-8h, AAV-8b, AAV-h, AAV-b, AAV SM 10-2, AAV Shuffle 100-1, AAV Shuffle 100-3, AAV Shuffle 100-7, AAV Shuffle 10-2, AAV Shuffle 10-6, AAV Shuffle 10-8, AAV Shuffle 100-2, AAV SM 10-1, AAV SM 10-8, AAV SM 100-3, AAV SM 100-10, BNP61 AAV, BNP62 AAV, BNP63 AAV, AAVrh.50, AAVrh.43, AAVrh.62, AAVrh.48, AAVhu.19, AAVhu.11, AAVhu.53, AAV4-8/rh.64, AAVLG-9/hu.39, AAV54.5/hu.23, AAV54.2/hu.22, AAV54.7/hu.24, AAV54.1/hu.21, AAV54.4R/hu.27, AAV46.2/hu.28, AAV46.6/hu.29, AAV128.1/hu.43, true type AAV (ttAAV), UPENN AAV 10, Japanese AAV 10 serotypes, AAV CBr-7.1, AAV CBr-7.10, AAV CBr-7.2, AAV CBr-7.3, AAV CBr-7.4, AAV CBr-7.5, AAV CBr-7.7, AAV CBr-7.8, AAV CBr-B7.3, AAV CBr-B7.4, AAV CBr-E1, AAV CBr-E2, AAV CBr-E3, AAV CBr-E4, AAV CBr-E5, AAV CBr-e5, AAV CBr-E6, AAV CBr-E7, AAV CBr-E8, AAV CHt-1, AAV CHt-2, AAV CHt-3, AAV CHt-6.1, AAV CHt-6.10, AAV CHt-6.5, AAV CHt-6.6, AAV CHt-6.7, AAV CHt-6.8, AAV CHt-P1, AAV CHt-P2, AAV CHt-P5, AAV CHt-P6, AAV CHt-P8, AAV CHt-P9, AAV CKd-1, AAV CKd-10, AAV CKd-2, AAV CKd-3, AAV CKd-4, AAV CKd-6, AAV CKd-7, AAV CKd-8, AAV CKd-B1, AAV CKd-B2, AAV CKd-B3, AAV CKd-B4, AAV CKd-B5, AAV CKd-B6, AAV CKd-B7, AAV CKd-B8, AAV CKd-H1, AAV CKd-H2, AAV CKd-H3, AAV CKd-H4, AAV CKd-H5, AAV CKd-H6, AAV CKd-N3, AAV CKd-N4, AAV CKd-N9, AAV CLg-F1, AAV CLg-F2, AAV CLg-F3, AAV CLg-F4, AAV CLg-F5, AAV CLg-F6, AAV CLg-F7, AAV CLg-F8, AAV CLv-1, AAV CLv1-1, AAV Clv1-10, AAV CLv1-2, AAV CLv-12, AAV CLv1-3, AAV CLv-13, AAV CLv1-4, AAV Clv1-7, AAV Clv1-8, AAV Clv1-9, AAV CLv-2, AAV CLv-3, AAV CLv-4, AAV CLv-6, AAV CLv-8, AAV CLv-D1, AAV CLv-D2, AAV CLv-D3, AAV CLv-D4, AAV CLv-D5, AAV CLv-D6, AAV CLv-D7, AAV CLv-D8, AAV CLv-E1, AAV CLv-K1, AAV CLv-K3, AAV CLv-K6, AAV CLv-L4, AAV CLv-L5, AAV CLv-L6, AAV CLv-M1, AAV CLv-M11, AAV CLv-M2, AAV CLv-M5, AAV CLv-M6, AAV CLv-M7, AAV CLv-M8, AAV CLv-M9, AAV CLv-R1, AAV CLv-R2, AAV CLv-R3, AAV CLv-R4, AAV CLv-R5, AAV CLv-R6, AAV CLv-R7, AAV CLv-R8, AAV CLv-R9, AAV CSp-1, AAV CSp-10, AAV CSp-11, AAV CSp-2, AAV CSp-3, AAV CSp-4, AAV CSp-6, AAV CSp-7, AAV CSp-8, AAV CSp-8.10, AAV CSp-8.2, AAV CSp-8.4, AAV CSp-8.5, AAV CSp-8.6, AAV CSp-8.7, AAV CSp-8.8, AAV CSp-8.9, AAV CSp-9, AAV.hu.48R3, AAV.VR-355, AAV3B, AAV4, AAV5, AAVF1/HSC1, AAVF11/HSC11, AAVF12/HSC12, AAVF13/HSC13, AAVF14/HSC14, AAVF15/HSC15, AAVF16/HSC16, AAVF17/HSC17, AAVF2/HSC2, AAVF3/HSC3, AAVF4/HSC4, AAVF5/HSC5, AAVF6/HSC6, AAVF7/HSC7, AAVF8/HSC8, and/or AAVF9/HSC9 and variants thereof.

[0020] In some embodiments, the capsid of the AAV particle is one of VOY101, PHP.B, AAV9, AAV9K449, AAV1, AAV2, VOY201, AAV2 variant or AAV2/3 variant.

[0021] AAV particles described herein may be prepared as a pharmaceutical composition. In some embodiments, the pharmaceutical composition may be administered to a subject. In some embodiments, a method of producing a functional antibody in a subject may comprise administration of a pharmaceutical composition described herein to the subject. In some embodiments, the functional antibody may be encoded by one or more antibody polynucleotides of a viral genome described herein, packaged into an AAV particle. In some embodiments, the functional antibody may be encoded by two different viral genomes, packaged into separate AAV particles. The functional antibody may be expressed in a target cell or tissue in a range from 0.001 μg/mL to 100 mg/mL.

[0022] Pharmaceutical compositions described herein may be used in a method of treating tauopathy, wherein a therapeutically effective amount of a pharmaceutical composition described herein is administered to a subject in need. The tauopathy may be any one of Alzheimer's disease (AD), frontotemporal dementia and parkinsonism linked to chromosome 17 (FTDP-17), Frontotemporal lobar degeneration (FTLD), Frontotemporal dementia, chronic traumatic encephalopathy (CTE), Progressive Supranuclear Palsy (PSP), Down's syndrome, Pick's disease, Corticobasal degeneration (CBD), Corticobasal syndrome, Amyotrophic lateral sclerosis (ALS), Prion diseases, Creutzfeldt-Jakob disease (CJD), Multiple system atrophy, Tangle-only dementia, and Progressive subcortical gliosis or other tau associated disease.

[0023] Pharmaceutical compositions described herein may be used in a method of preventing tauopathy, wherein a therapeutically effective amount of a pharmaceutical composition described herein is administered to a subject in need. The tauopathy may be any one of Alzheimer's disease (AD), frontotemporal dementia and parkinsonism linked to chromosome 17 (FTDP-17), Frontotemporal lobar degeneration (FTLD). Frontotemporal dementia, chronic traumatic encephalopathy (CTE), Progressive Supranuclear Palsy (PSP), Down's syndrome, Pick's disease. Corticobasal degeneration (CBD), Corticobasal syndrome. Amyotrophic lateral sclerosis (ALS), Prion diseases, Creutzfeldt-Jakob disease (CJD), Multiple system atrophy, Tangle-only dementia, and Progressive subcortical gliosis or other tau associated disease.

[0024] The method of delivery of the pharmaceutical composition described herein to a subject in need may comprise any delivery route known in the art, including, intravenous (into a vein), intramuscular (into a muscle), intraparenchymal (into the substance of a tissue, e.g., brain), enteral (into the intestine), gastroenteral, epidural (into the dura mater), oral (by way of the mouth), transdermal, intracerebral (into the cerebrum), intracerebroventricular (into the cerebral ventricles), epicutaneous (application onto the skin), intradermal, (into the skin itself), subcutaneous (under the skin), nasal administration (through the nose), intravenous bolus, intravenous drip, intra-arterial (into an artery), intracardiac (into the heart), intraosseous infusion (into the bone marrow), intrathecal (into the spinal canal), intraperitoneal, (infusion or injection into the peritoneum), intravesical infusion, intravitreal, (through the eye), intracavernous injection (into a pathologic cavity) intracavitary (into the base of the penis), intravaginal administration, intrauterine, extra-amniotic administration, transdermal (diffusion through the intact skin for systemic distribution), transmucosal (diffusion through a mucous membrane), transvaginal, insufflation (snorting), sublingual, sublabial, enema, eye drops (onto the conjunctiva), or in ear drops, auricular (in or by way of the ear), buccal (directed toward the cheek), conjunctival, cutaneous, dental (to a tooth or teeth), electro-osmosis, endocervical, endosinusial, endotracheal, extracorporeal, hemodialysis, infiltration, interstitial, intra-abdominal, intra-amniotic, intra-articular, intrabiliary, intrabronchial, intrabursal, intracartilaginous (within a cartilage), intracaudal (within the cauda equine), intracisternal (within the cisterna magna cerebellomedularis), intracorneal (within the cornea), dental intracoronal, intracoronary (within the coronary arteries), intracorporus cavernosum (within the dilatable spaces of the corporus cavernosa of the penis), intradiscal (within a disc), intraductal (within a duct of a gland), intraduodenal (within the duodenum), intradural (within or beneath the dura), intraepidermal (to the epidermis), intraesophageal (to the esophagus), intragastric (within the stomach), intragingival (within the gingivae), intraileal (within the distal portion of the small intestine), intralesional (within or introduced directly to a localized lesion), intraluminal (within a lumen of a tube), intralymphatic (within the lymph), intramedullary (within the marrow cavity of a bone), intrameningeal (within the meninges), intramyocardial (within the myocardium), intraocular (within the eye), intraovarian (within the ovary), intrapericardial (within the pericardium), intrapleural (within the pleura), intraprostatic (within the prostate gland), intrapulmonary (within the lungs or its bronchi), intrasinal (within the nasal or periorbital sinuses), intraspinal (within the vertebral column), intrasynovial (within the synovial cavity of a joint), intratendinous (within a tendon), intratesticular (within the testicle), intrathecal (within the cerebrospinal fluid at any level of the cerebrospinal axis), intrathoracic (within the thorax), intratubular (within the tubules of an organ), intratumor (within a tumor), intratympanic (within the aurus media), intravascular (within a vessel or vessels), intraventricular (within a ventricle), iontophoresis (by means of electric current where ions of soluble salts migrate into the tissues of the body), irrigation (to bathe or flush open wounds or body cavities), laryngeal (directly upon the larynx), nasogastric (through the nose and into the stomach), occlusive dressing technique (topical route administration which is then covered by a dressing which occludes the area), ophthalmic (to the external eye), oropharyngeal (directly to the mouth and pharynx), parenteral, percutaneous, periarticular, peridural, perineural, periodontal, rectal, respiratory (within the respiratory tract by inhaling orally or nasally for local or systemic effect), retrobulbar (behind the pons or behind the eyeball), soft tissue, subarachnoid, subconjunctival, submucosal, topical, transplacental (through or across the placenta), transtracheal (through the wall of the trachea), transtympanic (across or through the tympanic cavity), ureteral (to the ureter), urethral (to the urethra), vaginal, caudal block, diagnostic, nerve block, biliary perfusion, cardiac perfusion, photopheresis and spinal.

[0025] In some embodiments AAV particles or pharmaceutical compositions described herein are delivered by intramuscular administration. In some embodiments AAV particles or pharmaceutical compositions described herein are delivered by intravascular administration. In some embodiments AAV particles or pharmaceutical compositions described herein are delivered by intravenous administration. In some embodiments AAV particles or pharmaceutical compositions described herein are delivered by intracerebroventricular administration. In some embodiments AAV particles or pharmaceutical compositions described herein are delivered by intraparenchymal administration. In some embodiments AAV particles or pharmaceutical compositions described herein are delivered by intrathecal administration.

### DETAILED DESCRIPTION

### I. Compositions

[0026] According to the present disclosure, compositions for delivering functional anti-tau antibodies and/or antibody-based compositions by adeno-associated viruses (AAVs) are provided. AAV particles may be provided via any of several routes of administration, to a cell, tissue, organ, or organism, in vivo, ex vivo, or in vitro.

[0027] As used herein, an “AAV particle” is a virus which comprises a viral genome with at least one payload region and at least one inverted terminal repeat (ITR) region.

[0028] As used herein, “viral genome” or “vector genome” refers to the nucleic acid sequence(s) encapsulated in an AAV particle. Viral genomes comprise at least one payload region encoding polypeptides, e.g., antibodies, antibody-based compositions or fragments thereof.

[0029] As used herein, a “payload” or “payload region” is any nucleic acid molecule which encodes one or more polypeptides. At a minimum, a payload region comprises nucleic acid sequences that encode an antibody, an antibody-based composition, or a fragment thereof, but may also optionally comprise one or more functional or regulatory elements to facilitate transcriptional expression and/or polypeptide translation.

[0030] As used herein, “VL” and “VH” refer to components of a light chain or heavy chain of an antibody, respectively, or a fragment thereof. In some embodiments, “VL” and “VH” refer to the variable regions of the light or heavy chain of an antibody, respectively, or a fragment thereof. In another embodiment, “VL” and “VH” may also embrace a constant region of a light or heavy chain of an antibody, or a fragment thereof. In another embodiment, “VL” and “VH” may embrace the entirety of an antibody light chain or heavy chain, respectively.

[0031] In some embodiments, AAV particles, viral genomes and/or payloads, and the methods of their use may be as described in WO2017189963, the contents of which are herein incorporated by reference in their entirety.

[0032] The nucleic acid sequences and polypeptides disclosed herein may be engineered to contain modular elements and/or sequence motifs assembled to enable expression of the antibodies or antibody-based compositions. In some embodiments, the nucleic acid sequence comprising the payload region may comprise one or more of a promoter region, an intron, a Kozak sequence, an enhancer, or a polyadenylation sequence. Payload regions typically encode antibodies or antibody-based compositions, which may include an antibody heavy chain domain, an antibody light chain domain, both antibody heavy and light chain domains, or fragments of the foregoing in combination with each other or in combination with other polypeptide moieties. In some cases, payload regions may also encode one or more linkers or joining regions between antibody heavy and light chain domains or fragments. The order of expression, structural position, or concatemer count (heavy chain, light chain, or linker) may be different within or among different payload regions. The identity, position and number of linkers expressed by payload regions may also vary.

[0033] The payload regions may be delivered to one or more target cells, tissues, organs, or organisms within the viral genome of an AAV particle.

### Adeno-Associated Viruses (AAVs) and AAV Particles

[0034] Adeno-associated viruses (AAV) are small non-enveloped icosahedral capsid viruses of the Parvoviridae family characterized by a single stranded DNA viral genome. Parvoviridae family viruses consist of two subfamilies: Parvovirinae, which infect vertebrates, and Densovirinae, which infect invertebrates. The Parvoviridae family comprises the Dependovirus genus which includes AAV, capable of replication in vertebrate hosts including, but not limited to, human, primate, bovine, canine, equine, and ovine species.

[0035] The parvoviruses and other members of the Parvoviridae family are generally described in Kenneth I. Berns, “Parvoviridae: The Viruses and Their Replication,” Chapter 69 in FIELDS VIROLOGY (3d Ed. 1996), the contents of which are incorporated by reference in their entirety.

[0036] AAV have proven to be useful as a biological tool due to their relatively simple structure, their ability to infect a wide range of cells (including quiescent and dividing cells) without integration into the host genome and without replicating, and their relatively benign immunogenic profile. The genome of the virus may be manipulated to contain a minimum of components for the assembly of a functional recombinant virus, or viral particle, which is loaded with or engineered to target a particular tissue and express or deliver a desired payload.

[0037] The wild-type AAV vector genome is a linear, single-stranded DNA (ssDNA) molecule approximately 5,000 nucleotides (nt) in length. Inverted terminal repeats (ITRs) traditionally cap the viral genome at both the 5′ and the 3′ end, providing origins of replication for the viral genome. While not wishing to be bound by theory, an AAV viral genome typically comprises two ITR sequences. These ITRs have a characteristic T-shaped hairpin structure defined by a self-complementary region (145 nt in wild-type AAV) at the 5′ and 3′ ends of the ssDNA which form an energetically stable double stranded region. The double stranded hairpin structures comprise multiple functions including, but not limited to, acting as an origin for DNA replication by functioning as primers for the endogenous DNA polymerase complex of the host viral replication cell.

[0038] The wild-type AAV viral genome further comprises nucleotide sequences for two open reading frames, one for the four non-structural Rep proteins (Rep78, Rep68, Rep52, Rep40, encoded by Rep genes) and one for the three capsid, or structural, proteins (VP1, VP2, VP3, encoded by capsid genes or Cap genes). The Rep proteins are important for replication and packaging, while the capsid proteins are assembled to create the protein shell of the AAV, or AAV capsid. Alternative splicing and alternate initiation codons and promoters result in the generation of four different Rep proteins from a single open reading frame and the generation of three capsid proteins from a single open reading frame. Though it varies by AAV serotype, as a non-limiting example, for AAV9/hu.14 (SEQ ID NO: 123 of U.S. Pat. No. 7,906,111, the contents of which are herein incorporated by reference in their entirety) VP1 refers to amino acids 1-736, VP2 refers to amino acids 138-736, and VP3 refers to amino acids 203-736. In other words, VP1 is the full-length capsid sequence, while VP2 and VP3 are shorter components of the whole. As a result, changes in the sequence in the VP3 region, are also changes to VP1 and VP2, however, the percent difference as compared to the parent sequence will be greatest for VP3 since it is the shortest sequence of the three. Though described here in relation to the amino acid sequence, the nucleic acid sequence encoding these proteins can be similarly described. Together, the three capsid proteins assemble to create the AAV capsid protein. While not wishing to be bound by theory, the AAV capsid protein typically comprises a molar ratio of 1:1:10 of VP1:VP2:VP3. As used herein, an “AAV serotype” is defined primarily by the AAV capsid. In some instances, the ITRs are also specifically described by the AAV serotype (e.g., AAV2/9).

[0039] For use as a biological tool, the wild-type AAV viral genome can be modified to replace the rep/cap sequences with a nucleic acid sequence comprising a payload region with at least one ITR region. Typically, in recombinant AAV viral genomes there are two ITR regions. The rep/cap sequences can be provided in trans during production to generate AAV particles.

[0040] In addition to the encoded heterologous payload, AAV vectors may comprise the viral genome, in whole or in part, of any naturally occurring and/or recombinant AAV serotype nucleotide sequence or variant. AAV variants may have sequences of significant homology at the nucleic acid (genome or capsid) and amino acid levels (capsids), to produce constructs which are generally physical and functional equivalents, replicate by similar mechanisms, and assemble by similar mechanisms. Chiorini et al., J. Vir. 71: 6823-33(1997); Srivastava et al., J. Vir. 45:555-64 (1983); Chiorini et al., J. Vir. 73:1309-1319 (1999); Rutledge et al., J. Vir. 72:309-319 (1998); and Wu et al., J. Vir. 74: 8635-47 (2000), the contents of each of which are incorporated herein by reference in their entirety.

[0041] In some embodiments, AAV particles of the present disclosure are recombinant AAV viral vectors which are replication defective and lacking sequences encoding functional Rep and Cap proteins within their viral genome. These defective AAV vectors may lack most or all parental coding sequences and essentially carry only one or two AAV ITR sequences and the nucleic acid of interest for delivery to a cell, a tissue, an organ, or an organism.

[0042] In some embodiments, the viral genome of the AAV particles of the present disclosure comprise at least one control element which provides for the replication, transcription, and translation of a coding sequence encoded therein. Not all of the control elements need always be present as long as the coding sequence is capable of being replicated, transcribed, and/or translated in an appropriate host cell. Non-limiting examples of expression control elements include sequences for transcription initiation and/or termination, promoter and/or enhancer sequences, efficient RNA processing signals such as splicing and polyadenylation signals, sequences that stabilize cytoplasmic mRNA, sequences that enhance translation efficacy (e.g., Kozak consensus sequence), sequences that enhance protein stability, and/or sequences that enhance protein processing and/or secretion.

[0043] According to the present disclosure, AAV particles for use in therapeutics and/or diagnostics comprise a virus that has been distilled or reduced to the minimum components necessary for transduction of a nucleic acid payload or cargo of interest. In this manner, AAV particles are engineered as vehicles for specific delivery while lacking the deleterious replication and/or integration features found in wild-type viruses.

[0044] AAV vectors of the present disclosure may be produced recombinantly and may be based on adeno-associated virus (AAV) parent or reference sequences. As used herein, a “vector” is any molecule or moiety which transports, transduces, or otherwise acts as a carrier of a heterologous molecule such as the nucleic acids described herein.

[0045] In addition to single stranded AAV viral genomes (e.g., ssAAVs), the present disclosure also provides for self-complementary AAV (scAAVs) viral genomes, scAAV vector genomes contain DNA strands which anneal together to form double stranded DNA. By skipping second strand synthesis, scAAVs allow for rapid expression in the transduced cell.

[0046] In some embodiments, the AAV particle of the present disclosure is an scAAV.

[0047] In some embodiments, the AAV particle of the present disclosure is an ssAAV.

[0048] Methods for producing and/or modifying AAV particles are disclosed in the art such as pseudotyped AAV vectors (PCT Patent Publication Nos. WO200028004; WO200123001; WO2004112727; WO2005005610; and WO2005072364, the content of each of which is incorporated herein by reference in its entirety).

[0049] AAV particles may be modified to enhance the efficiency of delivery. Such modified AAV particles can be packaged efficiently and be used to successfully infect the target cells at high frequency and with minimal toxicity. In some embodiments, the capsids of the AAV particles are engineered according to the methods described in US Publication Number US20130195801, the contents of which are incorporated herein by reference in their entirety.

[0050] In some embodiments, the AAV particles comprising a payload region encoding the polypeptides may be introduced into mammalian cells.

### AAV Serotypes

[0051] AAV particles of the present disclosure may comprise or be derived from any natural or recombinant AAV serotype. According to the present disclosure, the AAV particles may utilize or be based on a serotype or include a peptide selected from any of the following VOY101, VOY201, AAVPHP.B (PHP.B), AAVPHP.A (PHP.A), AAVG2B-26, AAVG2B-13, AAVTH1.1-32, AAVTH1.1-35, AAVPHP.B2 (PHP.B2), AAVPHP.B3 (PHP.B3), AAVPHP.N/PHP.B-DGT, AAVPHP.B-EST, AAVPHP.B-GGT, AAVPHP.B-ATP, AAVPHP.B-ATT-T, AAVPHP.B-DGT-T, AAVPHP.B-GGT-T, AAVPHP.B-SGS, AAVPHP.B-AQP, AAVPHP.B-QQP, AAVPHP.B-SNP(3), AAVPHP.B-SNP, AAVPHP.B-QGT, AAVPHP.B-NQT, AAVPHP.B-EGS, AAVPHP.B-SGN, AAVPHP.B-EGT, AAVPHP.B-DST, AAVPHP.B-DST, AAVPHP.B-STP, AAVPHP.B-PQP, AAVPHP.B-SQP, AAVPHP.B-QLP, AAVPHP.B-TMP, AAVPHP.B-TTP, AAVPHP.S/G2A12, AAVG2A15/G2A3 (G2A3), AAVG2B4 (G2B4), AAVG2B5 (G2B5), PHP.S, AAV1, AAV2, AAV2G9, AAV3, AAV3a, AAV3b, AAV3-3, AAV4, AAV4-4, AAV5, AAV6, AAV6.1, AAV6.2, AAV6.1.2, AAV7, AAV7.2, AAV8, AAV9, AAV9K449R, AAV9.11, AAV9.13, AAV9.16, AAV9.24, AAV9.45, AAV9.47, AAV9.61, AAV9.68, AAV9.84, AAV9.9, AAV10, AAV11, AAV12, AAV16.3, AAV24.1, AAV27.3, AAV42.12, AAV42-1b, AAV42-2, AAV42-3a, AAV42-3b, AAV42-4, AAV42-5a, AAV42-5b, AAV42-6b, AAV42-8, AAV42-10, AAV42-11, AAV42-12, AAV42-13, AAV42-15, AAV42-aa, AAV43-1, AAV43-12, AAV43-20, AAV43-21, AAV43-23, AAV43-25, AAV43-5, AAV44.1, AAV44.2, AAV44.5, AAV223.1, AAV223.2, AAV223.4, AAV223.5, AAV223.6, AAV223.7, AAV1-7/rh.48, AAV1-8/rh.49, AAV2-15/rh.62, AAV2-3/rh.61, AAV2-4/rh.50, AAV2-5/rh.51, AAV3.1/hu.6, AAV3.1/hu.9, AAV3-9/rh.52, AAV3-11/rh.53, AAV4-8/r11.64, AAV4-9/rh.54, AAV4-19/rh.55, AAV5-3/rh.57, AAV5-22/rh.58, AAV7.3/hu.7, AAV16.8/hu.10, AAV16.12/hu.11, AAV29.3/bb.1, AAV29.5/bb.2, AAV106.1/hu.37, AAV114.3/hu.40, AAV127.2/hu.41, AAV127.5/hu.42, AAV128.3/hu.44, AAV130.4/hu.48, AAV145.1/hu.53, AAV145.5/hu.54, AAV145.6/hu.55, AAV161.10/hu.60, AAV161.6/hu.61, AAV33.12/hu.17, AAV33.4/hu.15, AAV33.8/hu.16, AAV52/hu.19, AAV52.1/hu.20, AAV58.2/hu.25, AAVA3.3, AAVA3.4, AAVA3.5, AAVA3.7, AAVC1, AAVC2, AAVC5, AAV-DJ, AAV-DJ8, AAVF3, AAVF5, AAVH2, AAVrh.72, AAVhu.8, AAVrh.68, AAVrh.70, AAVpi.1, AAVpi.3, AAVpi.2, AAVrh.60, AAVrh.44, AAVrh.65, AAVrh.55, AAVrh.47, AAVrh.69, AAVrh.45, AAVrh.59, AAVhu.12, AAVH6, AAVLK03, AAVH-1/hu.1, AAVH-5/hu.3, AAVLG-10/rh.40, AAVLG-4/rh.38, AAVLG-9/hu.39, AAVN721-8/rh.43, AAVCh.5, AAVCh.5R1, AAVcy.2, AAVcy.3, AAVcy.4, AAVcy.5, AAVCy.5R1, AAVCy.5R2, AAVCy.5R3, AAVCy.5R4, AAVcy.6, AAVhu.1, AAVhu.2, AAVhu.3, AAVhu.4, AAVhu.5, AAVhu.6, AAVhu.7, AAVhu.9, AAVhu.10, AAVhu.11, AAVhu.13, AAVhu.15, AAVhu.16, AAVhu.17, AAVhu.18, AAVhu.20, AAVhu.21, AAVhu.22, AAVhu.23.2, AAVhu.24, AAVhu.25, AAVhu.27, AAVhu.28, AAVhu.29, AAVhu.29R, AAVhu.31, AAVhu.32, AAVhu.34, AAVhu.35, AAVhu.37, AAVhu.39, AAVhu.40, AAVhu.41, AAVhu.42, AAVhu.43, AAVhu.44, AAVhu.44R1, AAVhu.44R2, AAVhu.44R3, AAVhu.45, AAVhu.46, AAVhu.47, AAVhu.48, AAVhu.48R1, AAVhu.48R2, AAVhu.48R3, AAVhu.49, AAVhu.51, AAVhu.52, AAVhu.54, AAVhu.55, AAVhu.56, AAVhu.57, AAVhu.58, AAVhu.60, AAVhu.61, AAVhu.63, AAVhu.64, AAVhu.66, AAVhu.67, AAVhu.14/9, AAVhu.t 19, AAVrh.2, AAVrh.2R, AAVrh.8, AAVrh.8R, AAVrh.10, AAVrh.12, AAVrh.13, AAVrh.13R, AAVrh.14, AAVrh.17, AAVrh.18, AAVrh.19, AAVrh.20, AAVrh.21, AAVrh.22, AAVrh.23, AAVrh.24, AAVrh.25, AAVrh.31, AAVrh.32, AAVrh.33, AAVrh.34, AAVrh.35, AAVrh.36, AAVrh.37, AAVrh.37R2, AAVrh.38, AAVrh.39, AAVrh.40, AAVrh.46, AAVrh.48, AAVrh.48.1, AAVrh.48.1.2, AAVrh.48.2, AAVrh.49, AAVrh.51, AAVrh.52, AAVrh.53, AAVrh.54, AAVrh.56, AAVrh.57, AAVrh.58, AAVrh.61, AAVrh.64, AAVrh.64R1, AAVrh.64R2, AAVrh.67, AAVrh.73, AAVrh.74, AAVrh8R, AAVrh8R A586R mutant, AAVrh8R R533A mutant, AAAV, BAAV, caprine AAV, bovine AAV, AAVhE1.1, AAVhEr1.5, AAVhER1.14, AAVhEr1.8, AAVhEr1.16, AAVhEr1.18, AAVhEr1.35, AAVhEr1.7, AAVhEr1.36, AAVhEr2.29, AAVhEr2.4, AAVhEr2.16, AAVhEr2.30, AAVhEr2.31, AAVhEr2.36, AAVhER1.23, AAVhEr3.1, AAV2.5T, AAV-PAEC, AAV-LK01, AAV-LK02, AAV-LK03, AAV-LK04, AAV-LK05, AAV-LK06, AAV-LK07, AAV-LK08, AAV-LK09, AAV-LK10, AAV-LK11, AAV-LK12, AAV-LK13, AAV-LK14, AAV-LK15, AAV-LK16, AAV-LK17, AAV-LK18, AAV-LK19, AAV-PAEC2, AAV-PAEC4, AAV-PAEC6, AAV-PAEC7, AAV-PAEC8, AAV-PAEC11, AAV-PAEC12, AAV-2-pre-miRNA-101, AAV-8h, AAV-8b, AAV-h, AAV-b, AAV SM 10-2, AAV Shuffle 100-1, AAV Shuffle 100-3, AAV Shuffle 100-7, AAV Shuffle 10-2, AAV Shuffle 10-6, AAV Shuffle 10-8, AAV Shuffle 100-2, AAV SM 10-1, AAV SM 10-8, AAV SM 100-3, AAV SM 100-10, BNP61 AAV, BNP62 AAV, BNP63 AAV, AAVrh.50, AAVrh.43, AAVrh.62, AAVrh.48, AAVhu.19, AAVhu.11, AAVhu.53, AAV4-8/rh.64, AAVLG-9/hu.39, AAV54.5/hu.23, AAV54.2/hu.22, AAV54.7/hu.24, AAV54.1/hu.21, AAV54.4R/hu.27, AAV46.2/hu.28, AAV46.6/hu.29, AAV128.1/hu.43, true type AAV (ttAAV), UPENN AAV 10, Japanese AAV 10 serotypes, AAV CBr-7.1, AAV CBr-7.10, AAV CBr-7.2, AAV CBr-7.3, AAV CBr-7.4, AAV CBr-7.5, AAV CBr-7.7, AAV CBr-7.8, AAV CBr-B7.3, AAV CBr-B7.4, AAV CBr-E1, AAV CBr-E2, AAV CBr-E3, AAV CBr-E4, AAV CBr-E5, AAV CBr-e5, AAV CBr-E6, AAV CBr-E7, AAV CBr-E8, AAV CHt-1, AAV CHt-2, AAV CHt-3, AAV CHt-6.1, AAV CHt-6.10, AAV CHt-6.5, AAV CHt-6.6, AAV CHt-6.7, AAV CHt-6.8, AAV CHt-P1, AAV CHt-P2, AAV CHt-P5, AAV CHt-P6, AAV CHt-P8, AAV CHt-P9, AAV CKd-1, AAV CKd-10, AAV CKd-2, AAV CKd-3, AAV CKd-4, AAV CKd-6, AAV CKd-7, AAV CKd-8, AAV CKd-B1, AAV CKd-B2, AAV CKd-B3, AAV CKd-B4, AAV CKd-B5, AAV CKd-B6, AAV CKd-B7, AAV CKd-B8, AAV CKd-H1, AAV CKd-H2, AAV CKd-H3, AAV CKd-H4, AAV CKd-H5, AAV CKd-H6, AAV CKd-N3, AAV CKd-N4, AAV CKd-N9, AAV CLg-F1, AAV CLg-F2, AAV CLg-F3, AAV CLg-F4, AAV CLg-F5, AAV CLg-F6, AAV CLg-F7, AAV CLg-F8, AAV CLv-1, AAV CLv-1, AAV Clv1-10, AAV CLv1-2, AAV CLv-12, AAV CLv1-3, AAV CLv-13, AAV CLv1-4, AAV Clv1-7, AAV Clv1-8, AAV Clv1-9, AAV CLv-2, AAV CLv-3, AAV CLv-4, AAV CLv-6, AAV CLv-8, AAV CLv-D1, AAV CLv-D2, AAV CLv-D3, AAV CLv-D4, AAV CLv-D5, AAV CLv-D6, AAV CLv-D7, AAV CLv-D8, AAV CLv-E1, AAV CLv-K1, AAV CLv-K3, AAV CLv-K6, AAV CLv-L4, AAV CLv-L5, AAV CLv-L6, AAV CLv-M1, AAV CLv-M11, AAV CLv-M2, AAV CLv-M5, AAV CLv-M6, AAV CLv-M7, AAV CLv-M8, AAV CLv-M9, AAV CLv-R1, AAV CLv-R2, AAV CLv-R3, AAV CLv-R4, AAV CLv-R5, AAV CLv-R6, AAV CLv-R7, AAV CLv-R8, AAV CLv-R9, AAV CSp-1, AAV CSp-10, AAV CSp-11, AAV CSp-2, AAV CSp-3, AAV CSp-4, AAV CSp-6, AAV CSp-7, AAV CSp-8, AAV CSp-8.10, AAV CSp-8.2, AAV CSp-8.4, AAV CSp-8.5, AAV CSp-8.6, AAV CSp-8.7, AAV CSp-8.8, AAV CSp-8.9, AAV CSp-9, AAV.hu.48R3, AAV.VR-355, AAV3B, AAV4, AAV5, AAVF1/HSC1, AAVF11/HSC11, AAVF12/HSC12, AAVF13/HSC13, AAVF14/HSC14, AAVF15/HSC15, AAVF16/HSC16, AAVF17/HSC17, AAVF2/HSC2, AAVF3/HSC3, AAVF4/HSC4, AAVF5/HSC5, AAVF6/HSC6, AAVF7/HSC7, AAVF8/HSC8, and/or AAVF9/HSC9 and variants thereof.

[0052] In some embodiments, the AAV serotype may be, or have, a sequence as described in United States Publication No. US20030138772, the contents of which are herein incorporated by reference in their entirety, such as, but not limited to: AAV1 (SEQ ID NO: 6 and 64 of US20030138772), AAV2 (SEQ ID NO: 7 and 70 of US20030138772), AAV3 (SEQ ID NO: 8 and 71 of US20030138772), AAV4 (SEQ ID NO: 63 of US20030138772), AAV5 (SEQ ID NO: 114 of US20030138772), AAV6 (SEQ ID NO: 65 of US20030138772), AAV7 (SEQ ID NO: 1-3 of US20030138772), AAV8 (SEQ ID NO: 4 and 95 of US20030138772), AAV9 (SEQ ID NO: 5 and 100 of US20030138772), AAV10 (SEQ ID NO: 117 of US20030138772), AAV11 (SEQ ID NO: 118 of US20030138772), AAV12 (SEQ ID NO: 119 of US20030138772), AAVrh10 (amino acids 1 to 738 of SEQ ID NO: 81 of US20030138772), AAV16.3 (US20030138772 SEQ ID NO: 10), AAV29.3/bb.1 (US20030138772 SEQ ID NO: 11), AAV29.4 (US20030138772 SEQ ID NO: 12), AAV29.5/bb.2 (US20030138772 SEQ ID NO: 13), AAV1.3 (US20030138772 SEQ ID NO: 14), AAV13.3 (US20030138772 SEQ ID NO: 15), AAV24.1 (US20030138772 SEQ ID NO: 16), AAV27.3 (US20030138772 SEQ ID NO: 17), AAV7.2 (US20030138772 SEQ ID NO: 18), AAVC1 (US20030138772 SEQ ID NO: 19), AAVC3 (US20030138772 SEQ ID NO: 20), AAVC5 (US20030138772 SEQ ID NO: 21), AAVF1 (US20030138772 SEQ ID NO: 22), AAVF3 (US20030138772 SEQ ID NO: 23), AAVF5 (US20030138772 SEQ ID NO: 24), AAVH6 (US20030138772 SEQ ID NO: 25), AAVH2 (US20030138772 SEQ ID NO: 26), AAV42-8 (US20030138772 SEQ ID NO: 27), AAV42-15 (US20030138772 SEQ ID NO: 28), AAV42-5b (US20030138772 SEQ ID NO: 29), AAV42-1b (US20030138772 SEQ ID NO: 30), AAV42-13 (US20030138772 SEQ ID NO: 31), AAV42-3a (US20030138772 SEQ ID NO: 32), AAV42-4 (US20030138772 SEQ ID NO: 33), AAV42-5a (US20030138772 SEQ ID NO: 34), AAV42-10 (US20030138772 SEQ ID NO: 35), AAV42-3b (US20030138772 SEQ ID NO: 36), AAV42-11 (US20030138772 SEQ ID NO: 37), AAV42-6b (US20030138772 SEQ ID NO: 38), AAV43-1 (US20030138772 SEQ ID NO: 39), AAV43-5 (US20030138772 SEQ ID NO: 40), AAV43-12 (US20030138772 SEQ ID NO: 41), AAV43-20 (US20030138772 SEQ ID NO: 42), AAV43-21 (US20030138772 SEQ ID NO: 43), AAV43-23 (US20030138772 SEQ ID NO: 44), AAV43-25 (US20030138772 SEQ ID NO: 45), AAV44.1 (US20030138772 SEQ ID NO: 46), AAV44.5 (US20030138772 SEQ ID NO: 47), AAV223.1 (US20030138772 SEQ ID NO: 48), AAV223.2 (US20030138772 SEQ ID NO: 49), AAV223.4 (US20030138772 SEQ ID NO: 50), AAV223.5 (US20030138772 SEQ ID NO: 51), AAV223.6 (US20030138772 SEQ ID NO: 52), AAV223.7 (US20030138772 SEQ ID NO: 53), AAVA3.4 (US20030138772 SEQ ID NO: 54), AAVA3.5 (US20030138772 SEQ ID NO: 55), AAVA3.7 (US20030138772 SEQ ID NO: 56), AAVA3.3 (US20030138772 SEQ ID NO: 57), AAV42.12 (US20030138772 SEQ ID NO: 58), AAV44.2 (US20030138772 SEQ ID NO: 59), AAV42-2 (US20030138772 SEQ ID NO: 9), or variants thereof.

[0053] In some embodiments, the AAV serotype may be, or have, a sequence as described in United States Publication No. US20150159173, the contents of which are herein incorporated by reference in their entirety, such as, but not limited to, AAV2 (SEQ ID NO: 7 and 23 of US20150159173), rh20 (SEQ ID NO: 1 of US20150159173), rh32/33 (SEQ ID NO: 2 of US20150159173), rh39 (SEQ ID NO: 3, 20 and 36 of US20150159173), rh46 (SEQ ID NO: 4 and 22 of US20150159173), rh73 (SEQ ID NO: 5 of US20150159173), rh74 (SEQ ID NO: 6 of US20150159173), AAV6.1 (SEQ ID NO: 29 of US20150159173), rh.8 (SEQ ID NO: 41 of US20150159173), rh.48.1 (SEQ ID NO: 44 of US20150159173), hu.44 (SEQ ID NO: 45 of US20150159173), hu.29 (SEQ ID NO: 42 of US20150159173), hu.48 (SEQ ID NO: 38 of US20150159173), rh54 (SEQ ID NO: 49 of US20150159173), AAV2 (SEQ ID NO: 7 of US20150159173), cy.5 (SEQ ID NO: 8 and 24 of US20150159173), rh.10 (SEQ ID NO: 9 and 25 of US20150159173), rh.13 (SEQ ID NO: 10 and 26 of US20150159173), AAV1 (SEQ ID NO: 11 and 27 of US20150159173), AAV3 (SEQ ID NO: 12 and 28 of US20150159173), AAV6 (SEQ ID NO: 13 and 29 of US20150159173), AAV7 (SEQ ID NO: 14 and 30 of US20150159173), AAV8 (SEQ ID NO: 15 and 31 of US20150159173), hu.13 (SEQ ID NO: 16 and 32 of US20150159173), hu.26 (SEQ ID NO: 17 and 33 of US20150159173), hu.37 (SEQ ID NO: 18 and 34 of US20150159173), hu.53 (SEQ ID NO: 19 and 35 of US20150159173), rh.43 (SEQ ID NO: 21 and 37 of US20150159173), rh2 (SEQ ID NO: 39 of US20150159173), rh.37 (SEQ ID NO: 40 of US20150159173), rh.64 (SEQ ID NO: 43 of US20150159173), rh.48 (SEQ ID NO: 44 of US20150159173), ch.5 (SEQ ID NO 46 of US20150159173), rh.67 (SEQ ID NO: 47 of US20150159173), rh.58 (SEQ ID NO: 48 of US20150159173), or variants thereof including, but not limited to CySR1, CySR2, CySR3, Cy5R4, rh.13R, rh.37R2, rh.2R, rh.8R, rh.48.1, rh.48.2, rh.48.1.2, hu.44R1, hu.44R2, hu.44R3, hu.29R, ch.5R1, rh64R1, rh64R2, AAV6.2, AAV6.1, AAV6.12, hu.48R1, hu.48R2, and hu.48R3.

[0054] In some embodiments, the AAV serotype may be, or have, a sequence as described in U.S. Pat. No. 7,198,951, the contents of which are herein incorporated by reference in their entirety, such as, but not limited to, AAV9 (SEQ ID NO: 1-3 of U.S. Pat. No. 7,198,951), AAV2 (SEQ ID NO: 4 of U.S. Pat. No. 7,198,951), AAV1 (SEQ ID NO: 5 of U.S. Pat. No. 7,198,951), AAV3 (SEQ ID NO: 6 of U.S. Pat. No. 7,198,951), and AAV8 (SEQ ID NO: 7 of U.S. Pat. No. 7,198,951).

[0055] In some embodiments, the AAV serotype may be, or have, a mutation in the AAV9 sequence as described by N Pulicherla et al. (Molecular Therapy 19(6):1070-1078 (2011), herein incorporated by reference in its entirety), such as but not limited to, AAV9.9, AAV9.11, AAV9.13, AAV9.16, AAV9.24, AAV9.45, AAV9.47, AAV9.61, AAV9.68, AAV9.84.

[0056] In some embodiments, the AAV serotype may be, or have, a sequence as described in U.S. Pat. No. 6,156,303, the contents of which are herein incorporated by reference in their entirety, such as, but not limited to, AAV3B (SEQ ID NO: 1 and 10 of U.S. Pat. No. 6,156,303), AAV6 (SEQ ID NO: 2, 7 and 11 of U.S. Pat. No. 6,156,303), AAV2 (SEQ ID NO: 3 and 8 of U.S. Pat. No. 6,156,303), AAV3A (SEQ ID NO: 4 and 9, of U.S. Pat. No. 6,156,303), or derivatives thereof.

[0057] In some embodiments, the AAV serotype may be, or have, a sequence as described in United States Publication No. US20140359799, the contents of which are herein incorporated by reference in their entirety, such as, but not limited to, AAV8 (SEQ ID NO: 1 of US20140359799), AAVDJ (SEQ ID NO: 2 and 3 of US20140359799), or variants thereof.

[0058] In some embodiments, the serotype may be AAVDJ or a variant thereof, such as AAVDJ8 (or AAV-DJ8), as described by Grimm et al. (Journal of Virology 82(12): 5887-5911 (2008), herein incorporated by reference in its entirety). The amino acid sequence of AAVDJ8 may comprise two or more mutations in order to remove the heparin binding domain (HBD). As a non-limiting example, the AAV-DJ sequence described as SEQ ID NO: 1 in U.S. Pat. No. 7,588,772, the contents of which are herein incorporated by reference in their entirety, may comprise two mutations: (1) R587Q where arginine (R; Arg) at amino acid 587 is changed to glutamine (Q; Gln) and (2) R590T where arginine (R; Arg) at amino acid 590 is changed to threonine (T; Thr). As another non-limiting example, may comprise three mutations: (1) K406R where lysine (K; Lys) at amino acid 406 is changed to arginine (R; Arg), (2) R587Q where arginine (R; Arg) at amino acid 587 is changed to glutamine (Q; Gin) and (3) R590T where arginine (R; Arg) at amino acid 590 is changed to threonine (T; Thr).

[0059] In some embodiments, the AAV serotype may be, or have, a sequence of AAV4 as described in International Publication No. WO1998011244, the contents of which are herein incorporated by reference in their entirety, such as, but not limited to AAV4 (SEQ ID NO: 1-20 of WO1998011244).

[0060] In some embodiments, the AAV serotype may be, or have, a mutation in the AAV2 sequence to generate AAV2G9 as described in International Publication No. WO2014144229 and herein incorporated by reference in its entirety.

[0061] In some embodiments, the AAV serotype may be, or have, a sequence as described in International Publication No. WO2005033321, the contents of which are herein incorporated by reference in their entirety, such as, but not limited to AAV3-3 (SEQ ID NO: 217 of WO2005033321), AAV1 (SEQ ID NO: 219 and 202 of WO2005033321), AAV106.1/hu.37 (SEQ ID No: 10 of WO2005033321), AAV114.3/hu.40 (SEQ ID No: 11 of WO2005033321), AAV127.2/hu.41 (SEQ ID NO:6 and 8 of WO2005033321), AAV128.3/hu.44 (SEQ ID No: 81 of WO2005033321), AAV130.4/hu.48 (SEQ ID NO: 78 of WO2005033321), AAV145.1/hu.53 (SEQ ID No: 176 and 177 of WO2005033321), AAV145.6/hu.56 (SEQ ID NO: 168 and 192 of WO2005033321), AAV16.12/hu.11 (SEQ ID NO: 153 and 57 of WO2005033321), AAV16.8/hu.10 (SEQ ID NO: 156 and 56 of WO2005033321), AAV161.10/hu.60 (SEQ ID No: 170 of WO2005033321), AAV161.6/hu.61 (SEQ ID No: 174 of WO2005033321), AAV1-7/rh.48 (SEQ ID NO: 32 of WO2005033321), AAV1-8/rh.49 (SEQ ID NOs: 103 and 25 of WO2005033321), AAV2 (SEQ ID NO: 211 and 221 of WO2005033321), AAV2-15/rh.62 (SEQ ID No: 33 and 114 of WO2005033321), AAV2-3/rh.61 (SEQ ID NO: 21 of WO2005033321), AAV2-4/rh.50 (SEQ ID No: 23 and 108 of WO2005033321), AAV2-5/rh.51 (SEQ ID NO: 104 and 22 of WO2005033321), AAV3.1/hu.6 (SEQ ID NO: 5 and 84 of WO2005033321), AAV3.1/hu.9 (SEQ ID NO: 155 and 58 of WO2005033321), AAV3-11/rh.53 (SEQ ID NO: 186 and 176 of WO2005033321), AAV3-3 (SEQ ID NO: 200 of WO2005033321), AAV33.12/hu.17 (SEQ ID NO:4 of WO2005033321), AAV33.4/hu.15 (SEQ ID No: 50 of WO2005033321), AAV33.8/hu.16 (SEQ ID No: 51 of WO2005033321), AAV3-9/rh.52 (SEQ ID NO: 96 and 18 of WO2005033321), AAV4-19/rh.55 (SEQ ID NO: 117 of WO2005033321), AAV4-4 (SEQ ID NO: 201 and 218 of WO2005033321), AAV4-9/rh.54 (SEQ ID NO: 116 of WO2005033321), AAV5 (SEQ ID NO: 199 and 216 of WO2005033321), AAV52.1/hu.20 (SEQ ID NO: 63 of WO2005033321), AAV52/hu.19 (SEQ ID NO: 133 of WO2005033321), AAVS-22/rh.58 (SEQ ID No: 27 of WO2005033321), AAV5-3/rh.57 (SEQ ID NO: 105 of WO2005033321), AAV5-3/rh.57 (SEQ ID No: 26 of WO2005033321), AAV58.2/hu.25 (SEQ ID No: 49 of WO2005033321), AAV6 (SEQ ID NO: 203 and 220 of WO2005033321), AAV7 (SEQ ID NO: 222 and 213 of WO2005033321), AAV7.3/hu.7 (SEQ ID No: 55 of WO2005033321), AAV8 (SEQ ID NO: 223 and 214 of WO2005033321), AAVH-1/hu.1 (SEQ ID No: 46 of WO2005033321), AAVH-5/hu.3 (SEQ ID No: 44 of WO2005033321), AAVhu.1 (SEQ ID NO: 144 of WO2005033321), AAVhu.10 (SEQ ID NO: 156 of WO2005033321), AAVhu.11 (SEQ ID NO: 153 of WO2005033321), AAVhu.12 (WO2005033321 SEQ ID NO: 59), AAVhu.13 (SEQ ID NO: 129 of WO2005033321), AAVhu.14/AAV9 (SEQ ID NO: 123 and 3 of WO2005033321), AAVhu.15 (SEQ ID NO: 147 of WO2005033321), AAVhu.16 (SEQ ID NO: 148 of WO2005033321), AAVhu.17 (SEQ ID NO: 83 of WO2005033321), AAVhu.18 (SEQ ID NO: 149 of WO2005033321), AAVhu.19 (SEQ ID NO: 133 of WO2005033321), AAVhu.2 (SEQ ID NO: 143 of WO2005033321), AAVhu.20 (SEQ ID NO: 134 of WO2005033321), AAVhu.21 (SEQ ID NO: 135 of WO2005033321), AAVhu.22 (SEQ ID NO: 138 of WO2005033321), AAVhu.23.2 (SEQ ID NO: 137 of WO2005033321), AAVhu.24 (SEQ ID NO: 136 of WO2005033321), AAVhu.25 (SEQ ID NO: 146 of WO2005033321), AAVhu.27 (SEQ ID NO: 140 of WO2005033321), AAVhu.29 (SEQ ID NO: 132 of WO2005033321), AAVhu.3 (SEQ ID NO: 145 of WO2005033321), AAVhu.31 (SEQ ID NO: 121 of WO2005033321), AAVhu.32 (SEQ ID NO: 122 of WO2005033321), AAVhu.34 (SEQ ID NO: 125 of WO2005033321), AAVhu.35 (SEQ ID NO: 164 of WO2005033321), AAVhu.37 (SEQ ID NO: 88 of WO2005033321), AAVhu.39 (SEQ ID NO: 102 of WO2005033321), AAVhu.4 (SEQ ID NO: 141 of WO2005033321), AAVhu.40 (SEQ ID NO: 87 of WO2005033321), AAVhu.41 (SEQ ID NO: 91 of WO2005033321), AAVhu.42 (SEQ ID NO: 85 of WO2005033321), AAVhu.43 (SEQ ID NO: 160 of WO2005033321), AAVhu.44 (SEQ ID NO: 144 of WO2005033321), AAVhu.45 (SEQ ID NO: 127 of WO2005033321), AAVhu.46 (SEQ ID NO: 159 of WO2005033321), AAVhu.47 (SEQ ID NO: 128 of WO2005033321), AAVhu.48 (SEQ ID NO: 157 of WO2005033321), AAVhu.49 (SEQ ID NO: 189 of WO2005033321), AAVhu.5 (SEQ ID NO: 190 of WO2005033321), AAVhu.52 (SEQ ID NO: 191 of WO2005033321), AAVhu.53 (SEQ ID NO: 186 of WO2005033321), AAVhu.54 (SEQ ID NO: 188 of WO2005033321), AAVhu.55 (SEQ ID NO: 187 of WO2005033321), AAVhu.56 (SEQ ID NO: 192 of WO2005033321), AAVhu.57 (SEQ ID NO: 193 of WO2005033321), AAVhu.58 (SEQ ID NO: 194 of WO2005033321), AAVhu.6 (SEQ ID NO: 84 of WO2005033321), AAVhu.60 (SEQ ID NO: 184 of WO2005033321), AAVhu.61 (SEQ ID NO: 185 of WO2005033321), AAVhu.63 (SEQ ID NO: 195 of WO2005033321), AAVhu.64 (SEQ ID NO: 196 of WO2005033321), AAVhu.66 (SEQ ID NO: 197 of WO2005033321), AAVhu.67 (SEQ ID NO: 198 of WO2005033321), AAVhu.7 (SEQ ID NO: 150 of WO2005033321), AAVhu.8 (WO2005033321 SEQ ID NO: 12), AAVhu.9 (SEQ ID NO: 155 of WO2005033321), AAVLG-10/rh.40 (SEQ ID No: 14 of WO2005033321), AAVLG-4/rh.38 (SEQ ID NO: 86 of WO2005033321), AAVLG-4/rh.38 (SEQ ID No: 7 of WO2005033321), AAVN721-8/rh.43 (SEQ ID NO: 163 of WO2005033321), AAVN721-8/rh.43 (SEQ ID No: 43 of WO2005033321), AAVpi.1 (WO2005033321 SEQ ID NO: 28), AAVpi.2 (WO2005033321 SEQ ID NO: 30), AAVpi.3 (WO2005033321 SEQ ID NO: 29), AAVrh.38 (SEQ ID NO: 86 of WO2005033321), AAVrh.40 (SEQ ID NO: 92 of WO2005033321), AAVrh.43 (SEQ ID NO: 163 of WO2005033321), AAVrh.44 (WO2005033321 SEQ ID NO: 34), AAVrh.45 (WO2005033321 SEQ ID NO: 41), AAVrh.47 (WO2005033321 SEQ ID NO: 38), AAVrh.48 (SEQ ID NO: 115 of WO2005033321), AAVrh.49 (SEQ ID NO: 103 of WO2005033321), AAVrh.50 (SEQ ID NO: 108 of WO2005033321), AAVrh.51 (SEQ ID NO: 104 of WO2005033321), AAVrh.52 (SEQ ID NO: 96 of WO2005033321), AAVrh.53 (SEQ ID NO: 97 of WO2005033321), AAVrh.55 (WO2005033321 SEQ ID NO: 37), AAVrh.56 (SEQ ID NO: 152 of WO2005033321), AAVrh.57 (SEQ ID NO: 105 of WO2005033321), AAVrh.58 (SEQ ID NO: 106 of WO2005033321), AAVrh.59 (WO2005033321 SEQ ID NO: 42), AAVrh.60 (WO2005033321 SEQ ID NO: 31), AAVrh.61 (SEQ ID NO: 107 of WO2005033321), AAVrh.62 (SEQ ID NO: 114 of WO2005033321), AAVrh.64 (SEQ ID NO: 99 of WO2005033321), AAVrh.65 (WO2005033321 SEQ ID NO: 35), AAVrh.68 (WO2005033321 SEQ ID NO: 16), AAVrh.69 (WO2005033321 SEQ ID NO: 39), AAVrh.70 (WO2005033321 SEQ ID NO: 20), AAVrh.72 (WO2005033321 SEQ ID NO: 9), or variants thereof including, but not limited to, AAVcy.2, AAVcy.3, AAVcy.4, AAVcy.5, AAVcy.6, AAVrh.12, AAVrh.17, AAVrh.18, AAVrh.19, AAVrh.21, AAVrh.22, AAVrh.23, AAVrh.24, AAVrh.25, AAVrh.25/42 15, AAVrh.31, AAVrh.32, AAVrh.33, AAVrh.34, AAVrh.35, AAVrh.36, AAVrh.37, AAVrh14. Non limiting examples of variants include SEQ ID NO: 13, 15, 17, 19, 24, 36, 40, 45, 47, 48, 51-54, 60-62, 64-77, 79, 80, 82, 89, 90, 93-95, 98, 100, 101, 109-113, 118-120, 124, 126, 131, 139, 142, 151,154, 158, 161, 162, 165-183, 202, 204-212, 215, 219, 224-236, of WO2005033321, the contents of which are herein incorporated by reference in their entirety.

[0062] In some embodiments, the AAV serotype may be, or have, a sequence as described in International Publication No. WO2015168666, the contents of which are herein incorporated by reference in their entirety, such as, but not limited to, AAVrh8R (SEQ ID NO: 9 of WO2015168666), AAVrh8R A586R mutant (SEQ ID NO: 10 of WO2015168666), AAVrh8R R533A mutant (SEQ ID NO: 11 of WO2015168666), or variants thereof.

[0063] In some embodiments, the AAV serotype may be, or have, a sequence as described in U.S. Pat. No. 9,233,131, the contents of which are herein incorporated by reference in their entirety, such as, but not limited to, AAVhE1.1 (SEQ ID NO:44 of U.S. Pat. No. 9,233,131), AAVhEr1.5 (SEQ ID NO:45 of U.S. Pat. No. 9,233,131), AAVhER1.14 (SEQ ID NO:46 of U.S. Pat. No. 9,233,131), AAVhEr1.8 (SEQ ID NO:47 of U.S. Pat. No. 9,233,131), AAVhEr1.16 (SEQ ID NO:48 of U.S. Pat. No. 9,233,131), AAVhEr1.18 (SEQ ID NO:49 of U.S. Pat. No. 9,233,131), AAVhEr1.35 (SEQ ID NO:50 of U.S. Pat. No. 9,233,131), AAVhEr1.7 (SEQ ID NO:51 of U.S. Pat. No. 9,233,131), AAVhEr1.36 (SEQ ID NO:52 of U.S. Pat. No. 9,233,131), AAVhEr2.29 (SEQ ID NO:53 of U.S. Pat. No. 9,233,131), AAVhEr2.4 (SEQ ID NO:54 of U.S. Pat. No. 9,233,131), AAVhEr2.16 (SEQ ID NO:55 of U.S. Pat. No. 9,233,131), AAVhEr2.30 (SEQ ID NO:56 of U.S. Pat. No. 9,233,131), AAVhEr2.31 (SEQ ID NO:58 of U.S. Pat. No. 9,233,131), AAVhEr2.36 (SEQ ID NO:57 of U.S. Pat. No. 9,233,131), AAVhER1.23 (SEQ ID NO:53 of U.S. Pat. No. 9,233,131), AAVhEr3.1 (SEQ ID NO:59 of U.S. Pat. No. 9,233,131), AAV2.5T (SEQ ID NO:42 of U.S. Pat. No. 9,233,131), or variants thereof.

[0064] In some embodiments, the AAV serotype may be, or have, a sequence as described in United States Patent Publication No. US20150376607, the contents of which are herein incorporated by reference in their entirety, such as, but not limited to, AAV-PAEC (SEQ ID NO:1 of US20150376607), AAV-LK01 (SEQ ID NO:2 of US20150376607), AAV-LK02 (SEQ ID NO:3 of US20150376607), AAV-LK03 (SEQ ID NO:4 of US20150376607), AAV-LK04 (SEQ ID NO:5 of US20150376607), AAV-LK05 (SEQ ID NO:6 of US20150376607), AAV-LK06 (SEQ ID NO:7 of US20150376607), AAV-LK07 (SEQ ID NO:8 of US20150376607), AAV-LK08 (SEQ ID NO:9 of US20150376607), AAV-LK09 (SEQ ID NO:10 of US20150376607), AAV-LK10 (SEQ ID NO:11 of US20150376607), AAV-LK11 (SEQ ID NO:12 of US20150376607), AAV-LK12 (SEQ ID NO:13 of US20150376607), AAV-LK13 (SEQ ID NO:14 of US20150376607), AAV-LK14 (SEQ ID NO:15 of US20150376607), AAV-LK15 (SEQ ID NO:16 of US20150376607), AAV-LK16 (SEQ ID NO:17 of US20150376607), AAV-LK17 (SEQ ID NO:18 of US20150376607), AAV-LK18 (SEQ ID NO:19 of US20150376607), AAV-LK19 (SEQ ID NO:20 of US20150376607), AAV-PAEC2 (SEQ ID NO:21 of US20150376607), AAV-PAEC4 (SEQ ID NO:22 of US20150376607), AAV-PAEC6 (SEQ ID NO:23 of US20150376607), AAV-PAEC7 (SEQ ID NO:24 of US20150376607), AAV-PAEC8 (SEQ ID NO:25 of US20150376607), AAV-PAEC11 (SEQ ID NO:26 of US20150376607), AAV-PAEC12 (SEQ ID NO:27, of US20150376607), or variants thereof.

[0065] In some embodiments, the AAV serotype may be, or have, a sequence as described in U.S. Pat. No. 9,163,261, the contents of which are herein incorporated by reference in their entirety, such as, but not limited to, AAV-2-pre-miRNA-101 (SEQ ID NO: 1 U.S. Pat. No. 9,163,261), or variants thereof.

[0066] In some embodiments, the AAV serotype may be, or have, a sequence as described in United States Patent Publication No. US20150376240, the contents of which are herein incorporated by reference in their entirety, such as, but not limited to, AAV-8h (SEQ ID NO: 6 of US20150376240), AAV-8b (SEQ ID NO: 5 of US20150376240), AAV-h (SEQ ID NO: 2 of US20150376240), AAV-b (SEQ ID NO: 1 of US20150376240), or variants thereof.

[0067] In some embodiments, the AAV serotype may be, or have, a sequence as described in United States Patent Publication No. US20160017295, the contents of which are herein incorporated by reference in their entirety, such as, but not limited to, AAV SM 10-2 (SEQ ID NO: 22 of US20160017295), AAV Shuffle 100-1 (SEQ ID NO: 23 of US20160017295), AAV Shuffle 100-3 (SEQ ID NO: 24 of US20160017295), AAV Shuffle 100-7 (SEQ ID NO: 25 of US20160017295), AAV Shuffle 10-2 (SEQ ID NO: 34 of US20160017295), AAV Shuffle 10-6 (SEQ ID NO: 35 of US20160017295), AAV Shuffle 10-8 (SEQ ID NO: 36 of US20160017295), AAV Shuffle 100-2 (SEQ ID NO: 37 of US20160017295), AAV SM 10-1 (SEQ ID NO: 38 of US20160017295), AAV SM 10-8 (SEQ ID NO: 39 of US20160017295), AAV SM 100-3 (SEQ ID NO: 40 of US20160017295), AAV SM 100-10 (SEQ ID NO: 41 of US20160017295), or variants thereof.

[0068] In some embodiments, the AAV serotype may be, or have, a sequence as described in United States Patent Publication No. US20150238550, the contents of which are herein incorporated by reference in their entirety, such as, but not limited to, BNP61 AAV (SEQ ID NO: 1 of US20150238550), BNP62 AAV (SEQ ID NO: 3 of US20150238550), BNP63 AAV (SEQ ID NO: 4 of US20150238550), or variants thereof.

[0069] In some embodiments, the AAV serotype may be or may have a sequence as described in United States Patent Publication No. US20150315612, the contents of which are herein incorporated by reference in their entirety, such as, but not limited to, AAVrh.50 (SEQ ID NO: 108 of US20150315612), AAVrh.43 (SEQ ID NO: 163 of US20150315612), AAVrh.62 (SEQ ID NO: 114 of US20150315612), AAVrh.48 (SEQ ID NO: 115 of US20150315612), AAVhu.19 (SEQ ID NO: 133 of US20150315612), AAVhu.11 (SEQ ID NO: 153 of US20150315612), AAVhu.53 (SEQ ID NO: 186 of US20150315612), AAV4-8/rh.64 (SEQ ID No: 15 of US20150315612), AAVLG-9/hu.39 (SEQ ID No: 24 of US20150315612), AAV54.5/hu.23 (SEQ ID No: 60 of US20150315612), AAV54.2/hu.22 (SEQ ID No: 67 of US20150315612), AAV54.7/hu.24 (SEQ ID No: 66 of US20150315612), AAV54.1/hu.21 (SEQ ID No: 65 of US20150315612), AAV54.4R/hu.27 (SEQ ID No: 64 of US20150315612), AAV46.2/hu.28 (SEQ ID No: 68 of US20150315612), AAV46.6/hu.29 (SEQ ID No: 69 of US20150315612), AAV128.1/hu.43 (SEQ ID No: 80 of US20150315612), or variants thereof.

[0070] In some embodiments, the AAV serotype may be, or have, a sequence as described in International Publication No. WO2015121501, the contents of which are herein incorporated by reference in their entirety, such as, but not limited to, true type AAV (ttAAV) (SEQ ID NO: 2 of WO2015121501), “UPenn AAV10” (SEQ ID NO: 8 of WO2015121501), “Japanese AAV10” (SEQ ID NO: 9 of WO2015121501), or variants thereof.

[0071] According to the present disclosure, AAV capsid serotype selection or use may be from a variety of species. In some embodiments, the AAV may be an avian AAV (AAAV). The AAAV serotype may be, or have, a sequence as described in U.S. Pat. No. 9,238,800, the contents of which are herein incorporated by reference in their entirety, such as, but not limited to, AAAV (SEQ ID NO: 1, 2, 4, 6, 8, 10, 12, and 14 of U.S. Pat. No. 9,238,800), or variants thereof.

[0072] In some embodiments, the AAV may be a bovine AAV (BAAV). The BAAV serotype may be, or have, a sequence as described in U.S. Pat. No. 9,193,769, the contents of which are herein incorporated by reference in their entirety, such as, but not limited to, BAAV (SEQ ID NO: 1 and 6 of U.S. Pat. No. 9,193,769), or variants thereof. The BAAV serotype may be or have a sequence as described in U.S. Pat. No. 7,427,396, the contents of which are herein incorporated by reference in their entirety, such as, but not limited to, BAAV (SEQ ID NO: 5 and 6 of U.S. Pat. No. 7,427,396), or variants thereof.

[0073] In some embodiments, the AAV may be a caprine AAV. The caprine AAV serotype may be, or have, a sequence as described in U.S. Pat. No. 7,427,396, the contents of which are herein incorporated by reference in their entirety, such as, but not limited to, caprine AAV (SEQ ID NO: 3 of U.S. Pat. No. 7,427,396), or variants thereof.

[0074] In other embodiments the AAV may be engineered as a hybrid AAV from two or more parental serotypes. In some embodiments, the AAV may be AAV2G9 which comprises sequences from AAV2 and AAV9. The AAV2G9 AAV serotype may be, or have, a sequence as described in United States Patent Publication No. US20160017005, the contents of which are herein incorporated by reference in its entirety.

[0075] In some embodiments, the AAV may be a serotype generated by the AAV9 capsid library with mutations in amino acids 390-627 (VP1 numbering) as described by Pulicherla et al. (Molecular Therapy 19(6):1070-1078 (2011), the contents of which are herein incorporated by reference in their entirety. The serotype and corresponding nucleotide and amino acid substitutions may be, but is not limited to, AAV9.1 (G1594C; D532H), AAV6.2 (T1418A and T1436X; V473D and 1479K), AAV9.3 (T1238A; F413Y), AAV9.4 (T1250C and A1617T; F417S), AAV9.5 (A1235G, A1314T, A1642G, C1760T; Q412R, T548A, A587V), AAV9.6 (T1231A; F4111), AAV9.9 (G1203A. G1785T; W595C), AAV9.10 (A1500G, T1676C; M559T), AAV9.11 (A1425T, A1702C, A1769T; T568P, Q590L), AAV9.13 (A1369C, A1720T; N457H, T574S), AAV9.14 (T1340A, T1362C, T1560C, G1713A; L447H), AAV9.16 (A1775T; Q592L), AAV9.24 (T1507C, T1521G; W503R), AAV9.26 (A1337G, A1769C; Y446C, Q590P), AAV9.33 (A1667C; D556A), AAV9.34 (A1534G, C1794T; N512D), AAV9.35 (A1289T, T1450A, C1494T, A1515T, C1794A, G1816A; Q430L, Y484N, N98K, V6061), AAV9.40 (A1694T, E565V), AAV9.41 (A1348T, T1362C; T450S), AAV9.44 (A1684C, A1701T, A1737G; N562H, K567N), AAV9.45 (A1492T, C1804T; N498Y, L602F), AAV9.46 (G1441C, T1525C, T1549G; G481R, W509R, L517V), 9.47 (G1241A, G1358A, A1669G, C1745T; S414N, G453D, K557E, T5821), AAV9.48 (C1445T, A1736T; P482L, Q579L), AAV9.50 (A1638T, C1683T, T1805A; Q546H, L602H), AAV9.53 (G1301A, A1405C, C1664T, G1811T; R134Q, S469R, A555V, G604V), AAV9.54 (C1531A, T1609A; L5111, L537M), AAV9.55 (T1605A; F535L), AAV9.58 (C1475T, C1579A; T4921, H527N), AAV.59 (T1336C; Y446H), AAV9.61 (A1493T; N4981), AAV9.64 (C1531A, A1617T; L5111), AAV9.65 (C1335T, T1530C, C1568A; A523D), AAV9.68 (C1510A; P504T), AAV9.80 (G1441A, G481R), AAV9.83 (C1402A. A1500T; P468T, E500D), AAV9.87 (T1464C, T1468C; S490P), AAV9.90 (A1196T; Y399F), AAV9.91 (T1316G, A1583T, C1782G, T1806C; L439R, K5281), AAV9.93 (A1273G, A1421G, A1638C, C1712T, G1732A, A1744T, A1832T; S425G, Q474R, Q546H, P571L, G578R, T582S, D611V), AAV9.94 (A1675T; M559L) and AAV9.95 (T1605A; F535L).

[0076] In some embodiments, the AAV serotype may be, or have, a sequence as described in International Publication No. WO2016049230, the contents of which are herein incorporated by reference in their entirety, such as, but not limited to AAVF1/HSC1 (SEQ ID NO; 2 and 20 of WO2016049230), AAVF2/HSC2 (SEQ ID NO; 3 and 21 of WO2016049230), AAVF3/HSC3 (SEQ ID NO; 5 and 22 of WO2016049230), AAVF4/HSC4 (SEQ ID NO; 6 and 23 of WO2016049230), AAVF5/HSC5 (SEQ ID NO; 11 and 25 of WO2016049230), AAVF6/HSC6 (SEQ ID NO; 7 and 24 of WO2016049230), AAVF7/HSC7 (SEQ ID NO; 8 and 27 of WO2016049230), AAVF8/HSC8 (SEQ ID NO: 9 and 28 of WO2016049230), AAVF9/HSC9 (SEQ ID NO: 10 and 29 of WO2016049230), AAVF11/HSC11 (SEQ ID NO: 4 and 26 of WO2016049230), AAVF12/HSC12 (SEQ ID NO: 12 and 30 of WO2016049230), AAVF13/HSC13 (SEQ ID NO: 14 and 31 of WO2016049230), AAVF14/HSC14 (SEQ ID NO: 15 and 32 of WO2016049230), AAVF15/HSC15 (SEQ ID NO: 16 and 33 of WO2016049230), AAVF16/HSC16 (SEQ ID NO: 17 and 34 of WO2016049230), AAVF17/HSC17 (SEQ ID NO: 13 and 35 of WO2016049230), or variants or derivatives thereof.

[0077] In some embodiments, the AAV serotype may be, or have, a sequence as described in U.S. Pat. No. 8,734,809, the contents of which are herein incorporated by reference in their entirety, such as, but not limited to, AAV CBr-E1 (SEQ ID NO: 13 and 87 of U.S. Pat. No. 8,734,809), AAV CBr-E2 (SEQ ID NO: 14 and 88 of U.S. Pat. No. 8,734,809), AAV CBr-E3 (SEQ ID NO: 15 and 89 of U.S. Pat. No. 8,734,809), AAV CBr-E4 (SEQ ID NO: 16 and 90 of U.S. Pat. No. 8,734,809), AAV CBr-E5 (SEQ ID NO: 17 and 91 of U.S. Pat. No. 8,734,809), AAV CBr-e5 (SEQ ID NO: 18 and 92 of U.S. Pat. No. 8,734,809), AAV CBr-E6 (SEQ ID NO: 19 and 93 of U.S. Pat. No. 8,734,809), AAV CBr-E7 (SEQ ID NO: 20 and 94 of U.S. Pat. No. 8,734,809), AAV CBr-E8 (SEQ ID NO: 21 and 95 of U.S. Pat. No. 8,734,809), AAV CLv-D1 (SEQ ID NO: 22 and 96 of U.S. Pat. No. 8,734,809), AAV CLv-D2 (SEQ ID NO: 23 and 97 of U.S. Pat. No. 8,734,809), AAV CLv-D3 (SEQ ID NO: 24 and 98 of U.S. Pat. No. 8,734,809), AAV CLv-D4 (SEQ ID NO: 25 and 99 of U.S. Pat. No. 8,734,809), AAV CLv-D5 (SEQ ID NO: 26 and 100 of U.S. Pat. No. 8,734,809), AAV CLv-D6 (SEQ ID NO: 27 and 101 of U.S. Pat. No. 8,734,809), AAV CLv-D7 (SEQ ID NO: 28 and 102 of U.S. Pat. No. 8,734,809), AAV CLv-D8 (SEQ ID NO: 29 and 103 of U.S. Pat. No. 8,734,809), AAV CLv-E1 (SEQ ID NO: 13 and 87 of U.S. Pat. No. 8,734,809), AAV CLv-R1 (SEQ ID NO: 30 and 104 of U.S. Pat. No. 8,734,809), AAV CLv-R2 (SEQ ID NO: 31 and 105 of U.S. Pat. No. 8,734,809), AAV CLv-R3 (SEQ ID NO: 32 and 106 of U.S. Pat. No. 8,734,809), AAV CLv-R4 (SEQ ID NO: 33 and 107 of U.S. Pat. No. 8,734,809), AAV CLv-R5 (SEQ ID NO: 34 and 108 of U.S. Pat. No. 8,734,809), AAV CLv-R6 (SEQ ID NO: 35 and 109 of U.S. Pat. No. 8,734,809), AAV CLv-R7 (SEQ ID NO: 36 and 110 of U.S. Pat. No. 8,734,809), AAV CLv-R8 (SEQ ID NO: X and X of U.S. Pat. No. 8,734,809), AAV CLv-R9 (SEQ ID NO: X and X of U.S. Pat. No. 8,734,809), AAV CLg-F1 (SEQ ID NO: 39 and 113 of U.S. Pat. No. 8,734,809), AAV CLg-F2 (SEQ ID NO: 40 and 114 of U.S. Pat. No. 8,734,809), AAV CLg-F3 (SEQ ID NO: 41 and 115 of U.S. Pat. No. 8,734,809), AAV CLg-F4 (SEQ ID NO: 42 and 116 of U.S. Pat. No. 8,734,809), AAV CLg-F5 (SEQ ID NO: 43 and 117 of U.S. Pat. No. 8,734,809), AAV CLg-F6 (SEQ ID NO: 43 and 117 of U.S. Pat. No. 8,734,809), AAV CLg-F7 (SEQ ID NO: 44 and 118 of U.S. Pat. No. 8,734,809), AAV CLg-F8 (SEQ ID NO: 43 and 117 of U.S. Pat. No. 8,734,809), AAV CSp-1 (SEQ ID NO: 45 and 119 of U.S. Pat. No. 8,734,809), AAV CSp-10 (SEQ ID NO: 46 and 120 of U.S. Pat. No. 8,734,809), AAV CSp-11 (SEQ ID NO: 47 and 121 of U.S. Pat. No. 8,734,809), AAV CSp-2 (SEQ ID NO: 48 and 122 of U.S. Pat. No. 8,734,809), AAV CSp-3 (SEQ ID NO: 49 and 123 of U.S. Pat. No. 8,734,809), AAV CSp-4 (SEQ ID NO: 50 and 124 of U.S. Pat. No. 8,734,809), AAV CSp-6 (SEQ ID NO: 51 and 125 of U.S. Pat. No. 8,734,809), AAV CSp-7 (SEQ ID NO: 52 and 126 of U.S. Pat. No. 8,734,809), AAV CSp-8 (SEQ ID NO: 53 and 127 of U.S. Pat. No. 8,734,809), AAV CSp-9 (SEQ ID NO: 54 and 128 of U.S. Pat. No. 8,734,809), AAV CHt-2 (SEQ ID NO: 55 and 129 of U.S. Pat. No. 8,734,809), AAV CHt-3 (SEQ ID NO: 56 and 130 of U.S. Pat. No. 8,734,809), AAV CKd-1 (SEQ ID NO: 57 and 131 of U.S. Pat. No. 8,734,809), AAV CKd-10 (SEQ ID NO: 58 and 132 of U.S. Pat. No. 8,734,809), AAV CKd-2 (SEQ ID NO: 59 and 133 of U.S. Pat. No. 8,734,809), AAV CKd-3 (SEQ ID NO: 60 and 134 of U.S. Pat. No. 8,734,809), AAV CKd-4 (SEQ ID NO: 61 and 135 of U.S. Pat. No. 8,734,809), AAV CKd-6 (SEQ ID NO: 62 and 136 of U.S. Pat. No. 8,734,809), AAV CKd-7 (SEQ ID NO: 63 and 137 of U.S. Pat. No. 8,734,809), AAV CKd-8 (SEQ ID NO: 64 and 138 of U.S. Pat. No. 8,734,809), AAV CLv-1 (SEQ ID NO: 35 and 139 of U.S. Pat. No. 8,734,809), AAV CLv-12 (SEQ ID NO: 66 and 140 of U.S. Pat. No. 8,734,809), AAV CLv-13 (SEQ ID NO: 67 and 141 of U.S. Pat. No. 8,734,809), AAV CLv-2 (SEQ ID NO: 68 and 142 of U.S. Pat. No. 8,734,809), AAV CLv-3 (SEQ ID NO: 69 and 143 of U.S. Pat. No. 8,734,809), AAV CLv-4 (SEQ ID NO: 70 and 144 of U.S. Pat. No. 8,734,809), AAV CLv-6 (SEQ ID NO: 71 and 145 of U.S. Pat. No. 8,734,809), AAV CLv-8 (SEQ ID NO: 72 and 146 of U.S. Pat. No. 8,734,809), AAV CKd-B1 (SEQ ID NO: 73 and 147 of U.S. Pat. No. 8,734,809), AAV CKd-B2 (SEQ ID NO: 74 and 148 of U.S. Pat. No. 8,734,809), AAV CKd-B3 (SEQ ID NO: 75 and 149 of U.S. Pat. No. 8,734,809), AAV CKd-B4 (SEQ ID NO: 76 and 150 of U.S. Pat. No. 8,734,809), AAV CKd-B5 (SEQ ID NO: 77 and 151 of U.S. Pat. No. 8,734,809), AAV CKd-B6 (SEQ ID NO: 78 and 152 of U.S. Pat. No. 8,734,809), AAV CKd-B7 (SEQ ID NO: 79 and 153 of U.S. Pat. No. 8,734,809), AAV CKd-B8 (SEQ ID NO: 80 and 154 of U.S. Pat. No. 8,734,809), AAV CKd-H1 (SEQ ID NO: 81 and 155 of U.S. Pat. No. 8,734,809), AAV CKd-H2 (SEQ ID NO: 82 and 156 of U.S. Pat. No. 8,734,809), AAV CKd-H3 (SEQ ID NO: 83 and 157 of U.S. Pat. No. 8,734,809), AAV CKd-H4 (SEQ ID NO: 84 and 158 of U.S. Pat. No. 8,734,809), AAV CKd-H5 (SEQ ID NO: 85 and 159 of U.S. Pat. No. 8,734,809), AAV CKd-H6 (SEQ ID NO: 77 and 151 of U.S. Pat. No. 8,734,809), AAV CHt-1 (SEQ ID NO: 86 and 160 of U.S. Pat. No. 8,734,809), AAV CLv1-1 (SEQ ID NO: 171 of U.S. Pat. No. 8,734,809), AAV CLv1-2 (SEQ ID NO: 172 of U.S. Pat. No. 8,734,809), AAV CLv1-3 (SEQ ID NO: 173 of U.S. Pat. No. 8,734,809), AAV CLv1-4 (SEQ ID NO: 174 of U.S. Pat. No. 8,734,809), AAV Clv1-7 (SEQ ID NO: 175 of U.S. Pat. No. 8,734,809), AAV Clv1-8 (SEQ ID NO: 176 of U.S. Pat. No. 8,734,809), AAV Clv1-9 (SEQ ID NO: 177 of U.S. Pat. No. 8,734,809), AAV Clv1-10 (SEQ ID NO: 178 of U.S. Pat. No. 8,734,809), AAV.VR-355 (SEQ ID NO: 181 of U.S. Pat. No. 8,734,809), AAV.hu.48R3 (SEQ ID NO: 183 of U.S. Pat. No. 8,734,809), or variants or derivatives thereof.

[0078] In some embodiments, the AAV serotype may be, or have, a sequence as described in International Publication No. WO2016065001, the contents of which are herein incorporated by reference in their entirety, such as, but not limited to AAV CHt-P2 (SEQ ID NO: 1 and 51 of WO2016065001), AAV CHt-P5 (SEQ ID NO: 2 and 52 of WO2016065001), AAV CHt-P9 (SEQ ID NO: 3 and 53 of WO2016065001), AAV CBr-7.1 (SEQ ID NO: 4 and 54 of WO2016065001), AAV CBr-7.2 (SEQ ID NO: 5 and 55 of WO2016065001), AAV CBr-7.3 (SEQ ID NO: 6 and 56 of WO2016065001), AAV CBr-7.4 (SEQ ID NO: 7 and 57 of WO2016065001), AAV CBr-7.5 (SEQ ID NO: 8 and 58 of WO2016065001), AAV CBr-7.7 (SEQ ID NO: 9 and 59 of WO2016065001), AAV CBr-7.8 (SEQ ID NO: 10 and 60 of WO2016065001), AAV CBr-7.10 (SEQ ID NO: 11 and 61 of WO2016065001), AAV CKd-N3 (SEQ ID NO: 12 and 62 of WO2016065001), AAV CKd-N4 (SEQ ID NO: 13 and 63 of WO2016065001), AAV CKd-N9 (SEQ ID NO: 14 and 64 of WO2016065001), AAV CLv-L4 (SEQ ID NO: 15 and 65 of WO2016065001), AAV CLv-L5 (SEQ ID NO: 16 and 66 of WO2016065001), AAV CLv-L6 (SEQ ID NO: 17 and 67 of WO2016065001), AAV CLv-K1 (SEQ ID NO: 18 and 68 of WO2016065001), AAV CLv-K3 (SEQ ID NO: 19 and 69 of WO2016065001), AAV CLv-K6 (SEQ ID NO: 20 and 70 of WO2016065001), AAV CLv-M1 (SEQ ID NO: 21 and 71 of WO2016065001), AAV CLv-M11 (SEQ ID NO: 22 and 72 of WO2016065001), AAV CLv-M2 (SEQ ID NO: 23 and 73 of WO2016065001), AAV CLv-M5 (SEQ ID NO: 24 and 74 of WO2016065001), AAV CLv-M6 (SEQ ID NO: 25 and 75 of WO2016065001), AAV CLv-M7 (SEQ ID NO: 26 and 76 of WO2016065001), AAV CLv-M8 (SEQ ID NO: 27 and 77 of WO2016065001), AAV CLv-M9 (SEQ ID NO: 28 and 78 of WO2016065001), AAV CHt-P1 (SEQ ID NO: 29 and 79 of WO2016065001), AAV CHt-P6 (SEQ ID NO: 30 and 80 of WO2016065001), AAV CHt-P8 (SEQ ID NO: 31 and 81 of WO2016065001), AAV CHt-6.1 (SEQ ID NO: 32 and 82 of WO2016065001), AAV CHt-6.10 (SEQ ID NO: 33 and 83 of WO2016065001), AAV CHt-6.5 (SEQ ID NO: 34 and 84 of WO2016065001), AAV CHt-6.6 (SEQ ID NO: 35 and 85 of WO2016065001), AAV CHt-6.7 (SEQ ID NO: 36 and 86 of WO2016065001), AAV CHt-6.8 (SEQ ID NO: 37 and 87 of WO2016065001), AAV CSp-8.10 (SEQ ID NO: 38 and 88 of WO2016065001), AAV CSp-8.2 (SEQ ID NO: 39 and 89 of WO2016065001), AAV CSp-8.4 (SEQ ID NO: 40 and 90 of WO2016065001), AAV CSp-8.5 (SEQ ID NO: 41 and 91 of WO2016065001), AAV CSp-8.6 (SEQ ID NO: 42 and 92 of WO2016065001), AAV CSp-8.7 (SEQ ID NO: 43 and 93 of WO2016065001), AAV CSp-8.8 (SEQ ID NO: 44 and 94 of WO2016065001), AAV CSp-8.9 (SEQ ID NO: 45 and 95 of WO2016065001), AAV CBr-B7.3 (SEQ ID NO: 46 and 96 of WO2016065001), AAV CBr-B7.4 (SEQ ID NO: 47 and 97 of WO2016065001), AAV3B (SEQ ID NO: 48 and 98 of WO2016065001), AAV4 (SEQ ID NO: 49 and 99 of WO2016065001), AAV5 (SEQ ID NO: 50 and 100 of WO2016065001), or variants or derivatives thereof.

[0079] In some embodiments, the AAV particle may have, or may be a serotype selected from any of those found in Table 1.

[0080] In some embodiments, the AAV capsid may comprise a sequence, fragment or variant thereof, of any of the sequences in Table 1.

[0081] In some embodiments, the AAV capsid may be encoded by a sequence, fragment or variant as described in Table 1.

[0082] In any of the DNA and RNA sequences referenced and/or described herein, the single letter symbol has the following description: A for adenine; C for cytosine; G for guanine; T for thymine; U for Uracil; W for weak bases such as adenine or thymine; S for strong nucleotides such as cytosine and guanine; M for amino nucleotides such as adenine and cytosine; K for keto nucleotides such as guanine and thymine; R for purines adenine and guanine; Y for pyrimidine cytosine and thymine; B for any base that is not A (e.g., cytosine, guanine, and thymine); D for any base that is not C (e.g., adenine, guanine, and thymine); H for any base that is not G (e.g., adenine, cytosine, and thymine); V for any base that is not T (e.g., adenine, cytosine, and guanine). N for any nucleotide (which is not a gap); and Z is for zero.

[0083] In any of the amino acid sequences referenced and/or described herein, the single letter symbol has the following description: G (Gly) for Glycine; A (Ala) for Alanine; L (Leu) for Leucine; M (Met) for Methionine; F (Phe) for Phenylalanine; W (Trp) for Tryptophan; K (Lys) for Lysine; Q (Gin) for Glutamine; E (Glu) for Glutamic Acid; S (Ser) for Serine; P (Pro) for Proline; V (Val) for Valine; I (Ile) for Isoleucine; C (Cys) for Cysteine; Y (Tyr) for Tyrosine; H (His) for Histidine; R (Arg) for Arginine; N (Asn) for Asparagine; D (Asp) for Aspartic Acid; T (Thr) for Threonine; B (Asx) for Aspartic acid or Asparagine; J (Xle) for Leucine or Isoleucine; O (Pyl) for Pyrrolysine. U (Sec) for Selenocysteine, X (Xaa) for any amino acid; and Z (Glx) for Glutamine or Glutamic acid.

TABLE 1
AAV Serotypes

| | SEQ | |
|---|---|---|
| Serotype | ID NO: | Reference Information |
| VOY101 | 1 | — |
| VOY101 | 2 | — |
| VOY201 | 3 | — |
| VOY201 | 4534 | — |
| PHP.N/PHP.B-DGT | 4 | WO2017100671 SEQ ID NO: 46 |
| AAVPHP.B or G2B-26 | 5 | WO2015038958 SEQ ID NO: 8 and 13 |
| AAVPHP.B | 6 | WO2015038958 SEQ ID NO: 9 |
| AAVG2B-13 | 7 | WO2015038958 SEQ ID NO: 12 |
| AAVTH1.1-32 | 8 | WO2015038958 SEQ ID NO: 14 |
| AAVTH1.1-35 | 9 | WO2015038958 SEQ ID NO: 15 |
| PHP.S/G2A12 | 10 | WO2017100671 SEQ ID NO: 47 |
| AAV9/hu.14 K449R | 11 | WO2017100671 SEQ ID NO: 45 |
| AAV1 | 12 | US20150159173 SEQ ID NO: 11, US20150315612 SEQ ID NO: 202 |
| AAV1 | 13 | US20160017295 SEQ ID NO: 1, US20030138772 SEQ ID NO: 64, |
| | | US20150159173 SEQ ID NO: 27, US20150315612 SEQ ID NO: 219, |
| | | U.S. Pat. No. 7,198,951 SEQ ID NO: 5 |
| AAV1 | 14 | US20030138772 SEQ ID NO: 6 |
| AAV1.3 | 15 | US20030138772 SEQ ID NO: 14 |
| AAV10 | 16 | US20030138772 SEQ ID NO: 117 |
| AAV10 | 17 | WO2015121501 SEQ ID NO: 9 |
| AAV10 | 18 | WO2015121501 SEQ ID NO: 8 |
| AAV11 | 19 | US20030138772 SEQ ID NO: 118 |
| AAV12 | 20 | US20030138772 SEQ ID NO: 119 |
| AAV2 | 21 | US20150159173 SEQ ID NO: 7, US20150315612 SEQ ID NO: 211 |
| AAV2 | 22 | US20030138772 SEQ ID NO: 70, US20150159173 SEQ ID NO: 23, |
| | | US20150315612 SEQ ID NO: 221, US20160017295 SEQ ID NO: 2, |
| | | U.S. Pat. No. 6,156,303 SEQ ID NO: 4, U.S. Pat. No. 7,198,951 SEQ ID NO: 4, |
| | | WO2015121501 SEQ ID NO: 1 |
| AAV2 | 23 | U.S. Pat. No. 6,156,303 SEQ ID NO: 8 |
| AAV2 | 24 | US20030138772 SEQ ID NO: 7 |
| AAV2 | 25 | U.S. Pat. No. 6,156,303 SEQ ID NO: 3 |
| AAV2.5T | 26 | U.S. Pat. No. 9,233,131 SEQ ID NO: 42 |
| AAV223.10 | 27 | US20030138772 SEQ ID NO: 75 |
| AAV223.2 | 28 | US20030138772 SEQ ID NO: 49 |
| AAV223.2 | 29 | US20030138772 SEQ ID NO: 76 |
| AAV223.4 | 30 | US20030138772 SEQ ID NO: 50 |
| AAV223.4 | 31 | US20030138772 SEQ ID NO: 73 |
| AAV223.5 | 32 | US20030138772 SEQ ID NO: 51 |
| AAV223.5 | 33 | US20030138772 SEQ ID NO: 74 |
| AAV223.6 | 34 | US20030138772 SEQ ID NO: 52 |
| AAV223.6 | 35 | US20030138772 SEQ ID NO: 78 |
| AAV223.7 | 36 | US20030138772 SEQ ID NO: 53 |
| AAV223.7 | 37 | US20030138772 SEQ ID NO: 77 |
| AAV29.3 | 38 | US20030138772 SEQ ID NO: 82 |
| AAV29.4 | 39 | US20030138772 SEQ ID NO: 12 |
| AAV29.5 | 40 | US20030138772 SEQ ID NO: 83 |
| AAV29.5 (AAVbb.2) | 41 | US20030138772 SEQ ID NO: 13 |
| AAV3 | 42 | US20150159173 SEQ ID NO: 12 |
| AAV3 | 43 | US20030138772 SEQ ID NO: 71, US20150159173 SEQ ID NO: 28, |
| | | US20160017295 SEQ ID NO: 3, U.S. Pat. No. 7,198,951 SEQ ID NO: 6 |
| AAV3 | 44 | US20030138772 SEQ ID NO: 8 |
| AAV3.3b | 45 | US20030138772 SEQ ID NO: 72 |
| AAV3-3 | 46 | US20150315612 SEQ ID NO: 200 |
| AAV3-3 | 47 | US20150315612 SEQ ID NO: 217 |
| AAV3a | 48 | U.S. Pat. No. 6,156,303 SEQ ID NO: 5 |
| AAV3a | 49 | U.S. Pat. No. 6,156,303 SEQ ID NO: 9 |
| AAV3b | 50 | U.S. Pat. No. 6,156,303 SEQ ID NO: 6 |
| AAV3b | 51 | U.S. Pat. No. 6,156,303 SEQ ID NO: 10 |
| AAV3b | 52 | U.S. Pat. No. 6,156,303 SEQ ID NO: 1 |
| AAV4 | 53 | US20140348794 SEQ ID NO: 17 |
| AAV4 | 54 | US20140348794 SEQ ID NO: 5 |
| AAV4 | 55 | US20140348794 SEQ ID NO: 3 |
| AAV4 | 56 | US20140348794 SEQ ID NO: 14 |
| AAV4 | 57 | US20140348794 SEQ ID NO: 15 |
| AAV4 | 58 | US20140348794 SEQ ID NO: 19 |
| AAV4 | 59 | US20140348794 SEQ ID NO: 12 |
| AAV4 | 60 | US20140348794 SEQ ID NO: 13 |
| AAV4 | 61 | US20140348794 SEQ ID NO: 7 |
| AAV4 | 62 | US20140348794 SEQ ID NO: 8 |
| AAV4 | 63 | US20140348794 SEQ ID NO: 9 |
| AAV4 | 64 | US20140348794 SEQ ID NO: 2 |
| AAV4 | 65 | US20140348794 SEQ ID NO: 10 |
| AAV4 | 66 | US20140348794 SEQ ID NO: 11 |
| AAV4 | 67 | US20140348794 SEQ ID NO: 18 |
| AAV4 | 68 | US20030138772 SEQ ID NO: 63, US20160017295 SEQ ID NO: 4, |
| | | US20140348794 SEQ ID NO: 4 |
| AAV4 | 69 | US20140348794 SEQ ID NO: 16 |
| AAV4 | 70 | US20140348794 SEQ ID NO: 20 |
| AAV4 | 71 | US20140348794 SEQ ID NO: 6 |
| AAV4 | 72 | US20140348794 SEQ ID NO: 1 |
| AAV42.2 | 73 | US20030138772 SEQ ID NO: 9 |
| AAV42.2 | 74 | US20030138772 SEQ ID NO: 102 |
| AAV42.3b | 75 | US20030138772 SEQ ID NO: 36 |
| AAV42.3B | 76 | US20030138772 SEQ ID NO: 107 |
| AAV42.4 | 77 | US20030138772 SEQ ID NO: 33 |
| AAV42.4 | 78 | US20030138772 SEQ ID NO: 88 |
| AAV42.8 | 79 | US20030138772 SEQ ID NO: 27 |
| AAV42.8 | 80 | US20030138772 SEQ ID NO: 85 |
| AAV43.1 | 81 | US20030138772 SEQ ID NO: 39 |
| AAV43.1 | 82 | US20030138772 SEQ ID NO: 92 |
| AAV43.12 | 83 | US20030138772 SEQ ID NO: 41 |
| AAV43.12 | 84 | US20030138772 SEQ ID NO: 93 |
| AAV43.20 | 85 | US20030138772 SEQ ID NO: 42 |
| AAV43.20 | 86 | US20030138772 SEQ ID NO: 99 |
| AAV43.21 | 87 | US20030138772 SEQ ID NO: 43 |
| AAV43.21 | 88 | US20030138772 SEQ ID NO: 96 |
| AAV43.23 | 89 | US20030138772 SEQ ID NO: 44 |
| AAV43.23 | 90 | US20030138772 SEQ ID NO: 98 |
| AAV43.25 | 91 | US20030138772 SEQ ID NO: 45 |
| AAV43.25 | 92 | US20030138772 SEQ ID NO: 97 |
| AAV43.5 | 93 | US20030138772 SEQ ID NO: 40 |
| AAV43.5 | 94 | US20030138772 SEQ ID NO: 94 |
| AAV4-4 | 95 | US20150315612 SEQ ID NO: 201 |
| AAV4-4 | 96 | US20150315612 SEQ ID NO: 218 |
| AAV44.1 | 97 | US20030138772 SEQ ID NO: 46 |
| AAV44.1 | 98 | US20030138772 SEQ ID NO: 79 |
| AAV44.5 | 99 | US20030138772 SEQ ID NO: 47 |
| AAV44.5 | 100 | US20030138772 SEQ ID NO: 80 |
| AAV4407 | 101 | US20150315612 SEQ ID NO: 90 |
| AAV5 | 102 | U.S. Pat. No. 7,427,396 SEQ ID NO: 1 |
| AAV5 | 103 | US20030138772 SEQ ID NO: 114 |
| AAV5 | 104 | US20160017295 SEQ ID NO: 5, U.S. Pat. No. 7,427,396 SEQ ID NO: 2, |
| | | US20150315612 SEQ ID NO: 216 |
| AAV5 | 105 | US20150315612 SEQ ID NO: 199 |
| AAV6 | 106 | US20150159173 SEQ ID NO: 13 |
| AAV6 | 107 | US20030138772 SEQ ID NO: 65, US20150159173 SEQ ID NO: 29, |
| | | US20160017295 SEQ ID NO: 6, U.S. Pat. No. 6,156,303 SEQ ID NO: 7 |
| AAV6 | 108 | U.S. Pat. No. 6,156,303 SEQ ID NO: 11 |
| AAV6 | 109 | U.S. Pat. No. 6,156,303 SEQ ID NO: 2 |
| AAV6 | 110 | US20150315612 SEQ ID NO: 203 |
| AAV6 | 111 | US20150315612 SEQ ID NO: 220 |
| AAV6.1 | 112 | US20150159173 |
| AAV6.12 | 113 | US20150159173 |
| AAV6.2 | 114 | US20150159173 |
| AAV7 | 115 | US20150159173 SEQ ID NO: 14 |
| AAV7 | 116 | US20150315612 SEQ ID NO: 183 |
| AAV7 | 117 | US20030138772 SEQ ID NO: 2, US20150159173 SEQ ID NO: 30, |
| | | US20150315612 SEQ ID NO: 181, US20160017295 SEQ ID NO: 7 |
| AAV7 | 118 | US20030138772 SEQ ID NO: 3 |
| AAV7 | 119 | US20030138772 SEQ ID NO: 1, US20150315612 SEQ ID NO: 180 |
| AAV7 | 120 | US20150315612 SEQ ID NO: 213 |
| AAV7 | 121 | US20150315612 SEQ ID NO: 222 |
| AAV8 | 122 | US20150159173 SEQ ID NO: 15 |
| AAV8 | 123 | US20150376240 SEQ ID NO: 7 |
| AAV8 | 124 | US20030138772 SEQ ID NO: 4, US20150315612 SEQ ID NO: 182 |
| AAV8 | 125 | US20030138772 SEQ ID NO: 95, US20140359799 SEQ ID NO: 1, |
| | | US20150159173 SEQ ID NO: 31, US20160017295 SEQ ID NO: 8, |
| | | U.S. Pat. No. 7,198,951 SEQ ID NO: 7, US20150315612 SEQ ID NO: 223 |
| AAV8 | 126 | US20150376240 SEQ ID NO: 8 |
| AAV8 | 127 | US20150315612 SEQ ID NO: 214 |
| AAV-8b | 128 | US20150376240 SEQ ID NO: 5 |
| AAV-8b | 129 | US20150376240 SEQ ID NO: 3 |
| AAV-8h | 130 | US20150376240 SEQ ID NO: 6 |
| AAV-8h | 131 | US20150376240 SEQ ID NO: 4 |
| AAV9 | 132 | US20030138772 SEQ ID NO: 5 |
| AAV9 | 133 | U.S. Pat. No. 7,198,951 SEQ ID NO: 1 |
| AAV9 | 134 | US20160017295 SEQ ID NO: 9 |
| AAV9 | 135 | US20030138772 SEQ ID NO: 100, U.S. Pat. No. 7,198,951 SEQ ID NO: 2 |
| AAV9 | 136 | U.S. Pat. No. 7,198,951 SEQ ID NO: 3 |
| AAV9 (AAVhu.14) | 137 | U.S. Pat. No. 7,906,111 SEQ ID NO: 3; WO2015038958 SEQ ID NO: 11 |
| AAV9 (AAVhu.14) | 138 | U.S. Pat. No. 7,906,111 SEQ ID NO: 123; WO2015038958 SEQ ID NO: 2 |
| AAVA3.1 | 139 | US20030138772 SEQ ID NO: 120 |
| AAVA3.3 | 140 | US20030138772 SEQ ID NO: 57 |
| AAVA3.3 | 141 | US20030138772 SEQ ID NO: 66 |
| AAVA3.4 | 142 | US20030138772 SEQ ID NO: 54 |
| AAVA3.4 | 143 | US20030138772 SEQ ID NO: 68 |
| AAVA3.5 | 144 | US20030138772 SEQ ID NO: 55 |
| AAVA3.5 | 145 | US20030138772 SEQ ID NO: 69 |
| AAVA3.7 | 146 | US20030138772 SEQ ID NO: 56 |
| AAVA3.7 | 147 | US20030138772 SEQ ID NO: 67 |
| AAV29.3 (AAVbb.1) | 148 | US20030138772 SEQ ID NO: 11 |
| AAVC2 | 149 | US20030138772 SEQ ID NO: 61 |
| AAVCh.5 | 150 | US20150159173 SEQ ID NO: 46, US20150315612 SEQ ID NO: 234 |
| AAVcy.2 (AAV13.3) | 151 | US20030138772 SEQ ID NO: 15 |
| AAV24.1 | 152 | US20030138772 SEQ ID NO: 101 |
| AAVcy.3 (AAV24.1) | 153 | US20030138772 SEQ ID NO: 16 |
| AAV27.3 | 154 | US20030138772 SEQ ID NO: 104 |
| AAVcy.4 (AAV27.3) | 155 | US20030138772 SEQ ID NO: 17 |
| AAVcy.5 | 156 | US20150315612 SEQ ID NO: 227 |
| AAV7.2 | 157 | US20030138772 SEQ ID NO: 103 |
| AAVcy.5 (AAV7.2.) | 158 | US20030138772 SEQ ID NO: 18 |
| AAV16.3 | 159 | US20030138772 SEQ ID NO: 105 |
| AAVcy.6 (AAV16.3) | 160 | US20030138772 SEQ ID NO: 10 |
| AAVcy.5 | 161 | US20150159173 SEQ ID NO: 8 |
| AAVcy.5 | 162 | US20150159173 SEQ ID NO: 24 |
| AAVCy.5R1 | 163 | US20150159173 |
| AAVCy.5R2 | 164 | US20150159173 |
| AAVCy.5R3 | 165 | US20150159173 |
| AAVCy.5R4 | 166 | US20150159173 |
| AAVDJ | 167 | US20140359799 SEQ ID NO: 3, U.S. Pat. No. 7,588,772 SEQ ID NO: 2 |
| AAVDJ | 168 | US20140359799 SEQ ID NO: 2, U.S. Pat. No. 7,588,772 SEQ ID NO: 1 |
| AAVDJ-8 | 169 | U.S. Pat. No. 7,588,772; Grimm et al 2008 |
| AAVDJ-8 | 170 | U.S. Pat. No. 7,588,772; Grimm et al 2008 |
| AAVF5 | 171 | US20030138772 SEQ ID NO: 110 |
| AAVH2 | 172 | US20030138772 SEQ ID NO: 26 |
| AAVH6 | 173 | US20030138772 SEQ ID NO: 25 |
| AAVhE1.1 | 174 | U.S. Pat. No. 9,233,131 SEQ ID NO: 44 |
| AAVhEr1.14 | 175 | U.S. Pat. No. 9,233,131 SEQ ID NO: 46 |
| AAVhEr1.16 | 176 | U.S. Pat. No. 9,233,131 SEQ ID NO: 48 |
| AAVhEr1.18 | 177 | U.S. Pat. No. 9,233,131 SEQ ID NO: 49 |
| AAVhEr1.23 (AAVhEr2.29) | 178 | U.S. Pat. No. 9,233,131 SEQ ID NO: 53 |
| AAVhEr1.35 | 179 | U.S. Pat. No. 9,233,131 SEQ ID NO: 50 |
| AAVhEr1.36 | 180 | U.S. Pat. No. 9,233,131 SEQ ID NO: 52 |
| AAVhEr1.5 | 181 | U.S. Pat. No. 9,233,131 SEQ ID NO: 45 |
| AAVhEr1.7 | 182 | U.S. Pat. No. 9,233,131 SEQ ID NO: 51 |
| AAVhEr1.8 | 183 | U.S. Pat. No. 9,233,131 SEQ ID NO: 47 |
| AAVhEr2.16 | 184 | U.S. Pat. No. 9,233,131 SEQ ID NO: 55 |
| AAVhEr2.30 | 185 | U.S. Pat. No. 9,233,131 SEQ ID NO: 56 |
| AAVhEr2.31 | 186 | U.S. Pat. No. 9,233,131 SEQ ID NO: 58 |
| AAVhEr2.36 | 187 | U.S. Pat. No. 9,233,131 SEQ ID NO: 57 |
| AAVhEr2.4 | 188 | U.S. Pat. No. 9,233,131 SEQ ID NO: 54 |
| AAVhEr3.1 | 189 | U.S. Pat. No. 9,233,131 SEQ ID NO: 59 |
| AAVhu.1 | 190 | US20150315612 SEQ ID NO: 46 |
| AAVhu.1 | 191 | US20150315612 SEQ ID NO: 144 |
| AAVhu.10 (AAV16.8) | 192 | US20150315612 SEQ ID NO: 56 |
| AAVhu.10 (AAV16.8) | 193 | US20150315612 SEQ ID NO: 156 |
| AAVhu.11 (AAV16.12) | 194 | US20150315612 SEQ ID NO: 57 |
| AAVhu.11 (AAV16.12) | 195 | US20150315612 SEQ ID NO: 153 |
| AAVhu.12 | 196 | US20150315612 SEQ ID NO: 59 |
| AAVhu.12 | 197 | US20150315612 SEQ ID NO: 154 |
| AAVhu.13 | 198 | US20150159173 SEQ ID NO: 16, US20150315612 SEQ ID NO: 71 |
| AAVhu.13 | 199 | US20150159173 SEQ ID NO: 32, US20150315612 SEQ ID NO: 129 |
| AAVhu.136.1 | 200 | US20150315612 SEQ ID NO: 165 |
| AAVhu.140.1 | 201 | US20150315612 SEQ ID NO: 166 |
| AAVhu.140.2 | 202 | US20150315612 SEQ ID NO: 167 |
| AAVhu.145.6 | 203 | US20150315612 SEQ ID No: 178 |
| AAVhu.15 | 204 | US20150315612 SEQ ID NO: 147 |
| AAVhu.15 (AAV33.4) | 205 | US20150315612 SEQ ID NO: 50 |
| AAVhu.156.1 | 206 | US20150315612 SEQ ID No: 179 |
| AAVhu.16 | 207 | US20150315612 SEQ ID NO: 148 |
| AAVhu.16 (AAV33.8) | 208 | US20150315612 SEQ ID NO: 51 |
| AAVhu.17 | 209 | US20150315612 SEQ ID NO: 83 |
| AAVhu.17 (AAV33.12) | 210 | US20150315612 SEQ ID NO: 4 |
| AAVhu.172.1 | 211 | US20150315612 SEQ ID NO: 171 |
| AAVhu.172.2 | 212 | US20150315612 SEQ ID NO: 172 |
| AAVhu.173.4 | 213 | US20150315612 SEQ ID NO: 173 |
| AAVhu.173.8 | 214 | US20150315612 SEQ ID NO: 175 |
| AAVhu.18 | 215 | US20150315612 SEQ ID NO: 52 |
| AAVhu.18 | 216 | US20150315612 SEQ ID NO: 149 |
| AAVhu.19 | 217 | US20150315612 SEQ ID NO: 62 |
| AAVhu.19 | 218 | US20150315612 SEQ ID NO: 133 |
| AAVhu.2 | 219 | US20150315612 SEQ ID NO: 48 |
| AAVhu.2 | 220 | US20150315612 SEQ ID NO: 143 |
| AAVhu.20 | 221 | US20150315612 SEQ ID NO: 63 |
| AAVhu.20 | 222 | US20150315612 SEQ ID NO: 134 |
| AAVhu.21 | 223 | US20150315612 SEQ ID NO: 65 |
| AAVhu.21 | 224 | US20150315612 SEQ ID NO: 135 |
| AAVhu.22 | 225 | US20150315612 SEQ ID NO: 67 |
| AAVhu.22 | 226 | US20150315612 SEQ ID NO: 138 |
| AAVhu.23 | 227 | US20150315612 SEQ ID NO: 60 |
| AAVhu.23.2 | 228 | US20150315612 SEQ ID NO: 137 |
| AAVhu.24 | 229 | US20150315612 SEQ ID NO: 66 |
| AAVhu.24 | 230 | US20150315612 SEQ ID NO: 136 |
| AAVhu.25 | 231 | US20150315612 SEQ ID NO: 49 |
| AAVhu.25 | 232 | US20150315612 SEQ ID NO: 146 |
| AAVhu.26 | 233 | US20150159173 SEQ ID NO: 17, US20150315612 SEQ ID NO: 61 |
| AAVhu.26 | 234 | US20150159173 SEQ ID NO: 33, US20150315612 SEQ ID NO: 139 |
| AAVhu.27 | 235 | US20150315612 SEQ ID NO: 64 |
| AAVhu.27 | 236 | US20150315612 SEQ ID NO: 140 |
| AAVhu.28 | 237 | US20150315612 SEQ ID NO: 68 |
| AAVhu.28 | 238 | US20150315612 SEQ ID NO: 130 |
| AAVhu.29 | 239 | US20150315612 SEQ ID NO: 69 |
| AAVhu.29 | 240 | US20150159173 SEQ ID NO: 42, US20150315612 SEQ ID NO: 132 |
| AAVhu.29 | 241 | US20150315612 SEQ ID NO: 225 |
| AAVhu.29R | 242 | US20150159173 |
| AAVhu.3 | 243 | US20150315612 SEQ ID NO: 44 |
| AAVhu.3 | 244 | US20150315612 SEQ ID NO: 145 |
| AAVhu.30 | 245 | US20150315612 SEQ ID NO: 70 |
| AAVhu.30 | 246 | US20150315612 SEQ ID NO: 131 |
| AAVhu.31 | 247 | US20150315612 SEQ ID NO: 1 |
| AAVhu.31 | 248 | US20150315612 SEQ ID NO: 121 |
| AAVhu.32 | 249 | US20150315612 SEQ ID NO: 2 |
| AAVhu.32 | 250 | US20150315612 SEQ ID NO: 122 |
| AAVhu.33 | 251 | US20150315612 SEQ ID NO: 75 |
| AAVhu.33 | 252 | US20150315612 SEQ ID NO: 124 |
| AAVhu.34 | 253 | US20150315612 SEQ ID NO: 72 |
| AAVhu.34 | 254 | US20150315612 SEQ ID NO: 125 |
| AAVhu.35 | 255 | US20150315612 SEQ ID NO: 73 |
| AAVhu.35 | 256 | US20150315612 SEQ ID NO: 164 |
| AAVhu.36 | 257 | US20150315612 SEQ ID NO: 74 |
| AAVhu.36 | 258 | US20150315612 SEQ ID NO: 126 |
| AAVhu.37 | 259 | US20150159173 SEQ ID NO: 34, US20150315612 SEQ ID NO: 88 |
| AAVhu.37 (AAV106.1) | 260 | US20150315612 SEQ ID NO: 10, US20150159173 SEQ ID NO: 18 |
| AAVhu.38 | 261 | US20150315612 SEQ ID NO: 161 |
| AAVhu.39 | 262 | US20150315612 SEQ ID NO: 102 |
| AAVhu.39 (AAVLG-9) | 263 | US20150315612 SEQ ID NO: 24 |
| AAVhu.4 | 264 | US20150315612 SEQ ID NO: 47 |
| AAVhu.4 | 265 | US20150315612 SEQ ID NO: 141 |
| AAVhu.40 | 266 | US20150315612 SEQ ID NO: 87 |
| AAVhu.40 (AAV114.3) | 267 | US20150315612 SEQ ID No. 11 |
| AAVhu.41 | 268 | US20150315612 SEQ ID NO: 91 |
| AAVhu.41 (AAV127.2) | 269 | US20150315612 SEQ ID NO: 6 |
| AAVhu.42 | 270 | US20150315612 SEQ ID NO: 85 |
| AAVhu.42 (AAV127.5) | 271 | US20150315612 SEQ ID NO: 8 |
| AAVhu.43 | 272 | US20150315612 SEQ ID NO: 160 |
| AAVhu.43 | 273 | US20150315612 SEQ ID NO: 236 |
| AAVhu.43 (AAV128.1) | 274 | US20150315612 SEQ ID NO: 80 |
| AAVhu.44 | 275 | US20150159173 SEQ ID NO: 45, US20150315612 SEQ ID NO: 158 |
| AAVhu.44 (AAV128.3) | 276 | US20150315612 SEQ ID NO: 81 |
| AAVhu.44R1 | 277 | US20150159173 |
| AAVhu.44R2 | 278 | US20150159173 |
| AAVhu.44R3 | 279 | US20150159173 |
| AAVhu.45 | 280 | US20150315612 SEQ ID NO: 76 |
| AAVhu.45 | 281 | US20150315612 SEQ ID NO: 127 |
| AAVhu.46 | 282 | US20150315612 SEQ ID NO: 82 |
| AAVhu.46 | 283 | US20150315612 SEQ ID NO: 159 |
| AAVhu.46 | 284 | US20150315612 SEQ ID NO: 224 |
| AAVhu.47 | 285 | US20150315612 SEQ ID NO: 77 |
| AAVhu.47 | 286 | US20150315612 SEQ ID NO: 128 |
| AAVhu.48 | 287 | US20150159173 SEQ ID NO: 38 |
| AAVhu.48 | 288 | US20150315612 SEQ ID NO: 157 |
| AAVhu.48 (AAV130.4) | 289 | US20150315612 SEQ ID NO: 78 |
| AAVhu.48R1 | 290 | US20150159173 |
| AAVhu.48R2 | 291 | US20150159173 |
| AAVhu.48R3 | 292 | US20150159173 |
| AAVhu.49 | 293 | US20150315612 SEQ ID NO: 209 |
| AAVhu.49 | 294 | US20150315612 SEQ ID NO: 189 |
| AAVhu.5 | 295 | US20150315612 SEQ ID NO: 45 |
| AAVhu.5 | 296 | US20150315612 SEQ ID NO: 142 |
| AAVhu.51 | 297 | US20150315612 SEQ ID NO: 208 |
| AAVhu.51 | 298 | US20150315612 SEQ ID NO: 190 |
| AAVhu.52 | 299 | US20150315612 SEQ ID NO: 210 |
| AAVhu.52 | 300 | US20150315612 SEQ ID NO: 191 |
| AAVhu.53 | 301 | US20150159173 SEQ ID NO: 19 |
| AAVhu.53 | 302 | US20150159173 SEQ ID NO: 35 |
| AAVhu.53 (AAV145.1) | 303 | US20150315612 SEQ ID NO: 176 |
| AAVhu.54 | 304 | US20150315612 SEQ ID NO: 188 |
| AAVhu.54 (AAV145.5) | 305 | US20150315612 SEQ ID No: 177 |
| AAVhu.55 | 306 | US20150315612 SEQ ID NO: 187 |
| AAVhu.56 | 307 | US20150315612 SEQ ID NO: 205 |
| AAVhu.56 (AAV145.6) | 308 | US20150315612 SEQ ID NO: 168 |
| AAVhu.56 (AAV145.6) | 309 | US20150315612 SEQ ID NO: 192 |
| AAVhu.57 | 310 | US20150315612 SEQ ID NO: 206 |
| AAVhu.57 | 311 | US20150315612 SEQ ID NO: 169 |
| AAVhu.57 | 312 | US20150315612 SEQ ID NO: 193 |
| AAVhu.58 | 313 | US20150315612 SEQ ID NO: 207 |
| AAVhu.58 | 314 | US20150315612 SEQ ID NO: 194 |
| AAVhu.6 (AAV3.1) | 315 | US20150315612 SEQ ID NO: 5 |
| AAVhu.6 (AAV3.1) | 316 | US20150315612 SEQ ID NO: 84 |
| AAVhu.60 | 317 | US20150315612 SEQ ID NO: 184 |
| AAVhu.60 (AAV161.10) | 318 | US20150315612 SEQ ID NO: 170 |
| AAVhu.61 | 319 | US20150315612 SEQ ID NO: 185 |
| AAVhu.61 (AAV161.6) | 320 | US20150315612 SEQ ID NO: 174 |
| AAVhu.63 | 321 | US20150315612 SEQ ID NO: 204 |
| AAVhu.63 | 322 | US20150315612 SEQ ID NO: 195 |
| AAVhu.64 | 323 | US20150315612 SEQ ID NO: 212 |
| AAVhu.64 | 324 | US20150315612 SEQ ID NO: 196 |
| AAVhu.66 | 325 | US20150315612 SEQ ID NO: 197 |
| AAVhu.67 | 326 | US20150315612 SEQ ID NO: 215 |
| AAVhu.67 | 327 | US20150315612 SEQ ID NO: 198 |
| AAVhu.7 | 328 | US20150315612 SEQ ID NO: 226 |
| AAVhu.7 | 329 | US20150315612 SEQ ID NO: 150 |
| AAVhu.7 (AAV7.3) | 330 | US20150315612 SEQ ID NO: 55 |
| AAVhu.71 | 331 | US20150315612 SEQ ID NO: 79 |
| AAVhu.8 | 332 | US20150315612 SEQ ID NO: 53 |
| AAVhu.8 | 333 | US20150315612 SEQ ID NO: 12 |
| AAVhu.8 | 334 | US20150315612 SEQ ID NO: 151 |
| AAVhu.9 (AAV3.1) | 335 | US20150315612 SEQ ID NO: 58 |
| AAVhu.9 (AAV3.1) | 336 | US20150315612 SEQ ID NO: 155 |
| AAV-LK01 | 337 | US20150376607 SEQ ID NO: 2 |
| AAV-LK01 | 338 | US20150376607 SEQ ID NO: 29 |
| AAV-LK02 | 339 | US20150376607 SEQ ID NO: 3 |
| AAV-LK02 | 340 | US20150376607 SEQ ID NO: 30 |
| AAV-LK03 | 341 | US20150376607 SEQ ID NO: 4 |
| AAV-LK03 | 342 | WO2015121501 SEQ ID NO: 12, US20150376607 SEQ ID NO: 31 |
| AAV-LK04 | 343 | US20150376607 SEQ ID NO: 5 |
| AAV-LK04 | 344 | US20150376607 SEQ ID NO: 32 |
| AAV-LK05 | 345 | US20150376607 SEQ ID NO: 6 |
| AAV-LK05 | 346 | US20150376607 SEQ ID NO: 33 |
| AAV-LK06 | 347 | US20150376607 SEQ ID NO: 7 |
| AAV-LK06 | 348 | US20150376607 SEQ ID NO: 34 |
| AAV-LK07 | 349 | US20150376607 SEQ ID NO: 8 |
| AAV-LK07 | 350 | US20150376607 SEQ ID NO: 35 |
| AAV-LK08 | 351 | US20150376607 SEQ ID NO: 9 |
| AAV-LK08 | 352 | US20150376607 SEQ ID NO: 36 |
| AAV-LK09 | 353 | US20150376607 SEQ ID NO: 10 |
| AAV-LK09 | 354 | US20150376607 SEQ ID NO: 37 |
| AAV-LK10 | 355 | US20150376607 SEQ ID NO: 11 |
| AAV-LK10 | 356 | US20150376607 SEQ ID NO: 38 |
| AAV-LK11 | 357 | US20150376607 SEQ ID NO: 12 |
| AAV-LK11 | 358 | US20150376607 SEQ ID NO: 39 |
| AAV-LK12 | 359 | US20150376607 SEQ ID NO: 13 |
| AAV-LK12 | 360 | US20150376607 SEQ ID NO: 40 |
| AAV-LK13 | 361 | US20150376607 SEQ ID NO: 14 |
| AAV-LK13 | 362 | US20150376607 SEQ ID NO: 41 |
| AAV-LK14 | 363 | US20150376607 SEQ ID NO: 15 |
| AAV-LK14 | 364 | US20150376607 SEQ ID NO: 42 |
| AAV-LK15 | 365 | US20150376607 SEQ ID NO: 16 |
| AAV-LK15 | 366 | US20150376607 SEQ ID NO: 43 |
| AAV-LK16 | 367 | US20150376607 SEQ ID NO: 17 |
| AAV-LK16 | 368 | US20150376607 SEQ ID NO: 44 |
| AAV-LK17 | 369 | US20150376607 SEQ ID NO: 18 |
| AAV-LK17 | 370 | US20150376607 SEQ ID NO: 45 |
| AAV-LK18 | 371 | US20150376607 SEQ ID NO: 19 |
| AAV-LK18 | 372 | US20150376607 SEQ ID NO: 46 |
| AAV-LK19 | 373 | US20150376607 SEQ ID NO: 20 |
| AAV-LK19 | 374 | US20150376607 SEQ ID NO: 47 |
| AAV-PAEC | 375 | US20150376607 SEQ ID NO: 1 |
| AAV-PAEC | 376 | US20150376607 SEQ ID NO: 48 |
| AAV-PAEC11 | 377 | US20150376607 SEQ ID NO: 26 |
| AAV-PAEC11 | 378 | US20150376607 SEQ ID NO: 54 |
| AAV-PAEC12 | 379 | US20150376607 SEQ ID NO: 27 |
| AAV-PAEC12 | 380 | US20150376607 SEQ ID NO: 51 |
| AAV-PAEC13 | 381 | US20150376607 SEQ ID NO: 28 |
| AAV-PAEC13 | 382 | US20150376607 SEQ ID NO: 49 |
| AAV-PAEC2 | 383 | US20150376607 SEQ ID NO: 21 |
| AAV-PAEC2 | 384 | US20150376607 SEQ ID NO: 56 |
| AAV-PAEC4 | 385 | US20150376607 SEQ ID NO: 22 |
| AAV-PAEC4 | 386 | US20150376607 SEQ ID NO: 55 |
| AAV-PAEC6 | 387 | US20150376607 SEQ ID NO: 23 |
| AAV-PAEC6 | 388 | US20150376607 SEQ ID NO: 52 |
| AAV-PAEC7 | 389 | US20150376607 SEQ ID NO: 24 |
| AAV-PAEC7 | 390 | US20150376607 SEQ ID NO: 53 |
| AAV-PAEC8 | 391 | US20150376607 SEQ ID NO: 25 |
| AAV-PAEC8 | 392 | US20150376607 SEQ ID NO: 50 |
| AAVpi.1 | 393 | US20150315612 SEQ ID NO: 28 |
| AAVpi.1 | 394 | US20150315612 SEQ ID NO: 93 |
| AAVpi.2 | 395 | US20150315612 SEQ ID NO: 30 |
| AAVpi.2 | 396 | US20150315612 SEQ ID NO: 95 |
| AAVpi.3 | 397 | US20150315612 SEQ ID NO: 29 |
| AAVpi.3 | 398 | US20150315612 SEQ ID NO: 94 |
| AAVrh.10 | 399 | US20150159173 SEQ ID NO: 9 |
| AAVrh.10 | 400 | US20150159173 SEQ ID NO: 25 |
| AAV44.2 | 401 | US20030138772 SEQ ID NO: 59 |
| AAVrh.10 (AAV44.2) | 402 | US20030138772 SEQ ID NO: 81 |
| AAV42.1B | 403 | US20030138772 SEQ ID NO: 90 |
| AAVrh.12 (AAV42.1b) | 404 | US20030138772 SEQ ID NO: 30 |
| AAVrh.13 | 405 | US20150159173 SEQ ID NO: 10 |
| AAVrh.13 | 406 | US20150159173 SEQ ID NO: 26 |
| AAVrh.13 | 407 | US20150315612 SEQ ID NO: 228 |
| AAVrh.13R | 408 | US20150159173 |
| AAV42.3A | 409 | US20030138772 SEQ ID NO: 87 |
| AAVrh.14 (AAV42.3a) | 410 | US20030138772 SEQ ID NO: 32 |
| AAV42.5A | 411 | US20030138772 SEQ ID NO: 89 |
| AAVrh.17 (AAV42.5a) | 412 | US20030138772 SEQ ID NO: 34 |
| AAV42.5B | 413 | US20030138772 SEQ ID NO: 91 |
| AAVrh.18 (AAV42.5b) | 414 | US20030138772 SEQ ID NO: 29 |
| AAV42.6B | 415 | US20030138772 SEQ ID NO: 112 |
| AAVrh.19 (AAV42.6b) | 416 | US20030138772 SEQ ID NO: 38 |
| AAVrh.2 | 417 | US20150159173 SEQ ID NO: 39 |
| AAVrh.2 | 418 | US20150315612 SEQ ID NO: 231 |
| AAVrh.20 | 419 | US20150159173 SEQ ID NO: 1 |
| AAV42.10 | 420 | US20030138772 SEQ ID NO: 106 |
| AAVrh.21 (AAV42.10) | 421 | US20030138772 SEQ ID NO: 35 |
| AAV42.11 | 422 | US20030138772 SEQ ID NO: 108 |
| AAVrh.22 (AAV42.11) | 423 | US20030138772 SEQ ID NO: 37 |
| AAV42.12 | 424 | US20030138772 SEQ ID NO: 113 |
| AAVrh.23 (AAV42.12) | 425 | US20030138772 SEQ ID NO: 58 |
| AAV42.13 | 426 | US20030138772 SEQ ID NO: 86 |
| AAVrh.24 (AAV42.13) | 427 | US20030138772 SEQ ID NO: 31 |
| AAV42.15 | 428 | US20030138772 SEQ ID NO: 84 |
| AAVrh.25 (AAV42.15) | 429 | US20030138772 SEQ ID NO: 28 |
| AAVrh.2R | 430 | US20150159173 |
| AAVrh.31 (AAV223.1) | 431 | US20030138772 SEQ ID NO: 48 |
| AAVC1 | 432 | US20030138772 SEQ ID NO: 60 |
| AAVrh.32 (AAVC1) | 433 | US20030138772 SEQ ID NO: 19 |
| AAVrh.32/33 | 434 | US20150159173 SEQ ID NO: 2 |
| AAVrh.33 (AAVC3) | 435 | US20030138772 SEQ ID NO: 20 |
| AAVC5 | 436 | US20030138772 SEQ ID NO: 62 |
| AAVrh.34 (AAVC5) | 437 | US20030138772 SEQ ID NO: 21 |
| AAVF1 | 438 | US20030138772 SEQ ID NO: 109 |
| AAVrh.35 (AAVF1) | 439 | US20030138772 SEQ ID NO: 22 |
| AAVF3 | 440 | US20030138772 SEQ ID NO: 111 |
| AAVrh.36 (AAVF3) | 441 | US20030138772 SEQ ID NO: 23 |
| AAVrh.37 | 442 | US20030138772 SEQ ID NO: 24 |
| AAVrh.37 | 443 | US20150159173 SEQ ID NO: 40 |
| AAVrh.37 | 444 | US20150315612 SEQ ID NO: 229 |
| AAVrh.37R2 | 445 | US20150159173 |
| AAVrh.38 (AAVLG-4) | 446 | US20150315612 SEQ ID NO: 7 |
| AAVrh.38 (AAVLG-4) | 447 | US20150315612 SEQ ID NO: 86 |
| AAVrh.39 | 448 | US20150159173 SEQ ID NO: 20, US20150315612 SEQ ID NO: 13 |
| AAVrh.39 | 449 | US20150159173 SEQ ID NO: 3, US20150159173 SEQ ID NO: 36, |
| | | US20150315612 SEQ ID NO: 89 |
| AAVrh.40 | 450 | US20150315612 SEQ ID NO: 92 |
| AAVrh.40 (AAVLG-10) | 451 | US20150315612 SEQ ID No: 14 |
| AAVrh.43 (AAVN721-8) | 452 | US20150315612 SEQ ID NO: 43, US20150159173 SEQ ID NO: 21 |
| AAVrh.43 (AAVN721-8) | 453 | US20150315612 SEQ ID NO: 163, US20150159173 SEQ ID NO: 37 |
| AAVrh.44 | 454 | US20150315612 SEQ ID NO: 34 |
| AAVrh.44 | 455 | US20150315612 SEQ ID NO: 111 |
| AAVrh.45 | 456 | US20150315612 SEQ ID NO: 41 |
| AAVrh.45 | 457 | US20150315612 SEQ ID NO: 109 |
| AAVrh.46 | 458 | US20150159173 SEQ ID NO: 22, US20150315612 SEQ ID NO: 19 |
| AAVrh.46 | 459 | US20150159173 SEQ ID NO: 4, US20150315612 SEQ ID NO: 101 |
| AAVrh.47 | 460 | US20150315612 SEQ ID NO: 38 |
| AAVrh.47 | 461 | US20150315612 SEQ ID NO: 118 |
| AAVrh.48 | 462 | US20150159173 SEQ ID NO: 44, US20150315612 SEQ ID NO: 115 |
| AAVrh.48.1 | 463 | US20150159173 |
| AAVrh.48.1.2 | 464 | US20150159173 |
| AAVrh.48.2 | 465 | US20150159173 |
| AAVrh.48 (AAV1-7) | 466 | US20150315612 SEQ ID NO: 32 |
| AAVrh.49 (AAV1-8) | 467 | US20150315612 SEQ ID NO: 25 |
| AAVrh.49 (AAV1-8) | 468 | US20150315612 SEQ ID NO: 103 |
| AAVrh.50 (AAV2-4) | 469 | US20150315612 SEQ ID NO: 23 |
| AAVrh.50 (AAV2-4) | 470 | US20150315612 SEQ ID NO: 108 |
| AAVrh.51 (AAV2-5) | 471 | US20150315612 SEQ ID No: 22 |
| AAVrh.51 (AAV2-5) | 472 | US20150315612 SEQ ID NO: 104 |
| AAVrh.52 (AAV3-9) | 473 | US20150315612 SEQ ID NO: 18 |
| AAVrh.52 (AAV3-9) | 474 | US20150315612 SEQ ID NO: 96 |
| AAVrh.53 | 475 | US20150315612 SEQ ID NO: 97 |
| AAVrh.53 (AAV3-11) | 476 | US20150315612 SEQ ID NO: 17 |
| AAVrh.53 (AAV3-11) | 477 | US20150315612 SEQ ID NO: 186 |
| AAVrh.54 | 478 | US20150315612 SEQ ID NO: 40 |
| AAVrh.54 | 479 | US20150159173 SEQ ID NO: 49, US20150315612 SEQ ID NO: 116 |
| AAVrh.55 | 480 | US20150315612 SEQ ID NO: 37 |
| AAVrh.55 (AAV4-19) | 481 | US20150315612 SEQ ID NO: 117 |
| AAVrh.56 | 482 | US20150315612 SEQ ID NO: 54 |
| AAVrh.56 | 483 | US20150315612 SEQ ID NO: 152 |
| AAVrh.57 | 484 | US20150315612 SEQ ID NO: 26 |
| AAVrh.57 | 485 | US20150315612 SEQ ID NO: 105 |
| AAVrh.58 | 486 | US20150315612 SEQ ID NO: 27 |
| AAVrh.58 | 487 | US20150159173 SEQ ID NO: 48, US20150315612 SEQ ID NO: 106 |
| AAVrh.58 | 488 | US20150315612 SEQ ID NO: 232 |
| AAVrh.59 | 489 | US20150315612 SEQ ID NO: 42 |
| AAVrh.59 | 490 | US20150315612 SEQ ID NO: 110 |
| AAVrh.60 | 491 | US20150315612 SEQ ID NO: 31 |
| AAVrh.60 | 492 | US20150315612 SEQ ID NO: 120 |
| AAVrh.61 | 493 | US20150315612 SEQ ID NO: 107 |
| AAVrh.61 (AAV2-3) | 494 | US20150315612 SEQ ID NO: 21 |
| AAVrh.62 (AAV2-15) | 495 | US20150315612 SEQ ID No: 33 |
| AAVrh.62 (AAV2-15) | 496 | US20150315612 SEQ ID NO: 114 |
| AAVrh.64 | 497 | US20150315612 SEQ ID No: 15 |
| AAVrh.64 | 498 | US20150159173 SEQ ID NO: 43, US20150315612 SEQ ID NO: 99 |
| AAVrh.64 | 499 | US20150315612 SEQ ID NO: 233 |
| AAVRh.64R1 | 500 | US20150159173 |
| AAVRh.64R2 | 501 | US20150159173 |
| AAVrh.65 | 502 | US20150315612 SEQ ID NO: 35 |
| AAVrh.65 | 503 | US20150315612 SEQ ID NO: 112 |
| AAVrh.67 | 504 | US20150315612 SEQ ID NO: 36 |
| AAVrh.67 | 505 | US20150315612 SEQ ID NO: 230 |
| AAVrh.67 | 506 | US20150159173 SEQ ID NO: 47, US20150315612 SEQ ID NO: 113 |
| AAVrh.68 | 507 | US20150315612 SEQ ID NO: 16 |
| AAVrh.68 | 508 | US20150315612 SEQ ID NO: 100 |
| AAVrh.69 | 509 | US20150315612 SEQ ID NO: 39 |
| AAVrh.69 | 510 | US20150315612 SEQ ID NO: 119 |
| AAVrh.70 | 511 | US20150315612 SEQ ID NO: 20 |
| AAVrh.70 | 512 | US20150315612 SEQ ID NO: 98 |
| AAVrh.71 | 513 | US20150315612 SEQ ID NO: 162 |
| AAVrh.72 | 514 | US20150315612 SEQ ID NO: 9 |
| AAVrh.73 | 515 | US20150159173 SEQ ID NO: 5 |
| AAVrh.74 | 516 | US20150159173 SEQ ID NO: 6 |
| AAVrh.8 | 517 | US20150159173 SEQ ID NO: 41 |
| AAVrh.8 | 518 | US20150315612 SEQ ID NO: 235 |
| AAVrh.8R | 519 | US20150159173, WO2015168666 SEQ ID NO: 9 |
| AAVrh.8R A586R mutant | 520 | WO2015168666 SEQ ID NO: 10 |
| AAVrh.8R R533A mutant | 521 | WO2015168666 SEQ ID NO: 11 |
| BAAV (bovine AAV) | 522 | U.S. Pat. No. 9,193,769 SEQ ID NO: 8 |
| BAAV (bovine AAV) | 523 | U.S. Pat. No. 9,193,769 SEQ ID NO: 10 |
| BAAV (bovine AAA) | 524 | U.S. Pat. No. 9,193,769 SEQ ID NO: 4 |
| BAAV (bovine AAV) | 525 | U.S. Pat. No. 9,193,769 SEQ ID NO: 2 |
| BAAV (bovine AAV) | 526 | U.S. Pat. No. 9,193,769 SEQ ID NO: 6 |
| BAAV (bovine AAV) | 527 | U.S. Pat. No. 9,193,769 SEQ ID NO: 1 |
| BAAV (bovine AAV) | 528 | U.S. Pat. No. 9,193,769 SEQ ID NO: 5 |
| BAAV (bovine AAV) | 529 | U.S. Pat. No. 9,193,769 SEQ ID NO: 3 |
| BAAV (bovine AAV) | 530 | U.S. Pat. No. 9,193,769 SEQ ID NO: 11 |
| BAAV (bovine AAA) | 531 | U.S. Pat. No. 7,427,396 SEQ ID NO: 5 |
| BAAV (bovine AAV) | 532 | U.S. Pat. No. 7,427,396 SEQ ID NO: 6 |
| BAAV (bovine AAV) | 533 | U.S. Pat. No. 9,193,769 SEQ ID NO: 7 |
| BAAV (bovine AAV) | 534 | U.S. Pat. No. 9,193,769 SEQ ID NO: 9 |
| BNP61 AAV | 535 | US20150238550 SEQ ID NO: 1 |
| BNP61 AAV | 536 | US20150238550 SEQ ID NO: 2 |
| BNP62 AAV | 537 | US20150238550 SEQ ID NO: 3 |
| BNP63 AAV | 538 | US20150238550 SEQ ID NO: 4 |
| caprine AAV | 539 | U.S. Pat. No. 7,427,396 SEQ ID NO: 3 |
| caprine AAV | 540 | U.S. Pat. No. 7,427,396 SEQ ID NO: 4 |
| true type AAV (ttAAV) | 541 | WO2015121501 SEQ ID NO: 2 |
| AAAV (Avian AAV) | 542 | U.S. Pat. No. 9,238,800 SEQ ID NO: 12 |
| AAAV (Avian AAV) | 543 | U.S. Pat. No. 9,238,800 SEQ ID NO: 2 |
| AAAV (Avian AAV) | 544 | U.S. Pat. No. 9,238,800 SEQ ID NO: 6 |
| AAAV (Avian AAV) | 545 | U.S. Pat. No. 9,238,800 SEQ ID NO: 4 |
| AAAV (Avian AAV) | 546 | U.S. Pat. No. 9,238,800 SEQ ID NO: 8 |
| AAAV (Avian AAV) | 547 | U.S. Pat. No. 9,238,800 SEQ ID NO: 14 |
| AAAV (Avian AAV) | 548 | U.S. Pat. No. 9,238,800 SEQ ID NO: 10 |
| AAAV (Avian AAV) | 549 | U.S. Pat. No. 9,238,800 SEQ ID NO: 15 |
| AAAV (Avian AAV) | 550 | U.S. Pat. No. 9,238,800 SEQ ID NO: 5 |
| AAAV (Avian AAV) | 551 | U.S. Pat. No. 9,238,800 SEQ ID NO: 9 |
| AAAV (Avian AAV) | 552 | U.S. Pat. No. 9,238,800 SEQ ID NO: 3 |
| AAAV (Avian AAV) | 553 | U.S. Pat. No. 9,238,800 SEQ ID NO: 7 |
| AAAV (Avian AAV) | 554 | U.S. Pat. No. 9,238,800 SEQ ID NO: 11 |
| AAAV (Avian AAV) | 555 | U.S. Pat. No. 9,238,800 SEQ ID NO: 13 |
| AAAV (Avian AAV) | 556 | U.S. Pat. No. 9,238,800 SEQ ID NO: 1 |
| AAV Shuffle 100-1 | 557 | US20160017295 SEQ ID NO: 23 |
| AAV Shuffle 100-1 | 558 | US20160017295 SEQ ID NO: 11 |
| AAV Shuffle 100-2 | 559 | US20160017295 SEQ ID NO: 37 |
| AAV Shuffle 100-2 | 560 | US20160017295 SEQ ID NO: 29 |
| AAV Shuffle 100-3 | 561 | US20160017295 SEQ ID NO: 24 |
| AAV Shuffle 100-3 | 562 | US20160017295 SEQ ID NO: 12 |
| AAV Shuffle 100-7 | 563 | US20160017295 SEQ ID NO: 25 |
| AAV Shuffle 100-7 | 564 | US20160017295 SEQ ID NO: 13 |
| AAV Shuffle 10-2 | 565 | US20160017295 SEQ ID NO: 34 |
| AAV Shuffle 10-2 | 566 | US20160017295 SEQ ID NO: 26 |
| AAV Shuffle 10-6 | 567 | US20160017295 SEQ ID NO: 35 |
| AAV Shuffle 10-6 | 568 | US20160017295 SEQ ID NO: 27 |
| AAV Shuffle 10-8 | 569 | US20160017295 SEQ ID NO: 36 |
| AAV Shuffle 10-8 | 570 | US20160017295 SEQ ID NO: 28 |
| AAV SM 100-10 | 571 | US20160017295 SEQ ID NO: 41 |
| AAV SM 100-10 | 572 | US20160017295 SEQ ID NO: 33 |
| AAV SM 100-3 | 573 | US20160017295 SEQ ID NO: 40 |
| AAV SM 100-3 | 574 | US20160017295 SEQ ID NO: 32 |
| AAV SM 10-1 | 575 | US20160017295 SEQ ID NO: 38 |
| AAV SM 10-1 | 576 | US20160017295 SEQ ID NO: 30 |
| AAV SM 10-2 | 577 | US20160017295 SEQ ID NO: 10 |
| AAV SM 10-2 | 578 | US20160017295 SEQ ID NO: 22 |
| AAV SM 10-8 | 579 | US20160017295 SEQ ID NO: 39 |
| AAV SM 10-8 | 580 | US20160017295 SEQ ID NO: 31 |
| AAVF1/HSC1 | 581 | WO2016049230 SEQ ID NO: 20 |
| AAVF2/HSC2 | 582 | WO2016049230 SEQ ID NO: 21 |
| AAVF3/HSC3 | 583 | WO2016049230 SEQ ID NO: 22 |
| AAVF4/HSC4 | 584 | WO2016049230 SEQ ID NO: 23 |
| AAVF5/HSC5 | 585 | WO2016049230 SEQ ID NO: 25 |
| AAVF6/HSC6 | 586 | WO2016049230 SEQ ID NO: 24 |
| AAVF7/HSC7 | 587 | WO2016049230 SEQ ID NO: 27 |
| AAVF8/HSC8 | 588 | WO2016049230 SEQ ID NO: 28 |
| AAVF9/HSC9 | 589 | WO2016049230 SEQ ID NO: 29 |
| AAVF11/HSC11 | 590 | WO2016049230 SEQ ID NO: 26 |
| AAVF12/HSC12 | 591 | WO2016049230 SEQ ID NO: 30 |
| AAVF13/HSC13 | 592 | WO2016049230 SEQ ID NO: 31 |
| AAVF14/HSC14 | 593 | WO2016049230 SEQ ID NO: 32 |
| AAVF15/HSC15 | 594 | WO2016049230 SEQ ID NO: 33 |
| AAVF16/HSC16 | 595 | WO2016049230 SEQ ID NO: 34 |
| AAVF17/HSC17 | 596 | WO2016049230 SEQ ID NO: 35 |
| AAVF1/HSC1 | 597 | WO2016049230 SEQ ID NO: 2 |
| AAVF2/HSC2 | 598 | WO2016049230 SEQ ID NO: 3 |
| AAVF3/HSC3 | 599 | WO2016049230 SEQ ID NO: 5 |
| AAVF4/HSC4 | 600 | WO2016049230 SEQ ID NO: 6 |
| AAVF5/HSC5 | 601 | WO2016049230 SEQ ID NO: 11 |
| AAVF6/HSC6 | 602 | WO2016049230 SEQ ID NO: 7 |
| AAVF7/HSC7 | 603 | WO2016049230 SEQ ID NO: 8 |
| AAVF8/HSC8 | 604 | WO2016049230 SEQ ID NO: 9 |
| AAVF9/HSC9 | 605 | WO2016049230 SEQ ID NO: 10 |
| AAVF11/HSC11 | 606 | WO2016049230 SEQ ID NO: 4 |
| AAVF12/HSC12 | 607 | WO2016049230 SEQ ID NO: 12 |
| AAVF13/HSC13 | 608 | WO2016049230 SEQ ID NO: 14 |
| AAVF14/HSC14 | 609 | WO2016049230 SEQ ID NO: 15 |
| AAVF15/HSC15 | 610 | WO2016049230 SEQ ID NO: 16 |
| AAVF16/HSC16 | 611 | WO2016049230 SEQ ID NO: 17 |
| AAVF17/HSC17 | 612 | WO2016049230 SEQ ID NO: 13 |
| AAV CBr-E1 | 613 | U.S. Pat. No. 8,734,809 SEQ ID NO: 13 |
| AAV CBr-E2 | 614 | U.S. Pat. No. 8,734,809 SEQ ID NO: 14 |
| AAV CBr-E3 | 615 | U.S. Pat. No. 8,734,809 SEQ ID NO: 15 |
| AAV CBr-E4 | 616 | U.S. Pat. No. 8,734,809 SEQ ID NO: 16 |
| AAV CBr-E5 | 617 | U.S. Pat. No. 8,734,809 SEQ ID NO: 17 |
| AAV CBr-e5 | 618 | U.S. Pat. No. 8,734,809 SEQ ID NO: 18 |
| AAV CBr-E6 | 619 | U.S. Pat. No. 8,734,809 SEQ ID NO: 19 |
| AAV CBr-E7 | 620 | U.S. Pat. No. 8,734,809 SEQ ID NO: 20 |
| AAV CBr-E8 | 621 | U.S. Pat. No. 8,734,809 SEQ ID NO: 21 |
| AAV CLv-D1 | 622 | U.S. Pat. No. 8,734,809 SEQ ID NO: 22 |
| AAV CLv-D2 | 623 | U.S. Pat. No. 8,734,809 SEQ ID NO: 23 |
| AAV CLv-D3 | 624 | U.S. Pat. No. 8,734,809 SEQ ID NO: 24 |
| AAV CLv-D4 | 625 | U.S. Pat. No. 8,734,809 SEQ ID NO: 25 |
| AAV CLv-D5 | 626 | U.S. Pat. No. 8,734,809 SEQ ID NO: 26 |
| AAV CLv-D6 | 627 | U.S. Pat. No. 8,734,809 SEQ ID NO: 27 |
| AAV CLv-D7 | 628 | U.S. Pat. No. 8,734,809 SEQ ID NO: 28 |
| AAV CLv-D8 | 629 | U.S. Pat. No. 8,734,809 SEQ ID NO: 29 |
| AAV CLv-E1 | 630 | U.S. Pat. No. 8,734,809 SEQ ID NO: 13 |
| AAV CLv-R1 | 631 | U.S. Pat. No. 8,734,809 SEQ ID NO: 30 |
| AAV CLv-R2 | 632 | U.S. Pat. No. 8,734,809 SEQ ID NO: 31 |
| AAV CLv-R3 | 633 | U.S. Pat. No. 8,734,809 SEQ ID NO: 32 |
| AAV CLv-R4 | 634 | U.S. Pat. No. 8,734,809 SEQ ID NO: 33 |
| AAV CLv-R5 | 635 | U.S. Pat. No. 8,734,809 SEQ ID NO: 34 |
| AAV CLv-R6 | 636 | U.S. Pat. No. 8,734,809 SEQ ID NO: 35 |
| AAV CLv-R7 | 637 | U.S. Pat. No. 8,734,809 SEQ ID NO: 36 |
| AAV CLv-R8 | 638 | U.S. Pat. No. 8,734,809 SEQ ID NO: 37 |
| AAV CLv-R9 | 639 | U.S. Pat. No. 8,734,809 SEQ ID NO: 38 |
| AAV CLg-F1 | 640 | U.S. Pat. No. 8,734,809 SEQ ID NO: 39 |
| AAV CLg-F2 | 641 | U.S. Pat. No. 8,734,809 SEQ ID NO: 40 |
| AAV CLg-F3 | 642 | U.S. Pat. No. 8,734,809 SEQ ID NO: 41 |
| AAV CLg-F4 | 643 | U.S. Pat. No. 8,734,809 SEQ ID NO: 42 |
| AAV CLg-F5 | 644 | U.S. Pat. No. 8,734,809 SEQ ID NO: 43 |
| AAV CLg-F6 | 645 | U.S. Pat. No. 8,734,809 SEQ ID NO: 43 |
| AAV CLg-F7 | 646 | U.S. Pat. No. 8,734,809 SEQ ID NO: 44 |
| AAV CLg-F8 | 647 | U.S. Pat. No. 8,734,809 SEQ ID NO: 43 |
| AAV CSp-1 | 648 | U.S. Pat. No. 8,734,809 SEQ ID NO: 45 |
| AAV CSp-10 | 649 | U.S. Pat. No. 8,734,809 SEQ ID NO: 46 |
| AAV CSp-11 | 650 | U.S. Pat. No. 8,734,809 SEQ ID NO: 47 |
| AAV CSp-2 | 651 | U.S. Pat. No. 8,734,809 SEQ ID NO: 48 |
| AAV CSp-3 | 652 | U.S. Pat. No. 8,734,809 SEQ ID NO: 49 |
| AAV CSp-4 | 653 | U.S. Pat. No. 8,734,809 SEQ ID NO: 50 |
| AAV CSp-6 | 654 | U.S. Pat. No. 8,734,809 SEQ ID NO: 51 |
| AAV CSp-7 | 655 | U.S. Pat. No. 8,734,809 SEQ ID NO: 52 |
| AAV CSp-8 | 656 | U.S. Pat. No. 8,734,809 SEQ ID NO: 53 |
| AAV CSp-9 | 657 | U.S. Pat. No. 8,734,809 SEQ ID NO: 54 |
| AAV CHt-2 | 658 | U.S. Pat. No. 8,734,809 SEQ ID NO: 55 |
| AAV CHt-3 | 659 | U.S. Pat. No. 8,734,809 SEQ ID NO: 56 |
| AAV CKd-1 | 660 | U.S. Pat. No. 8,734,809 SEQ ID NO: 57 |
| AAV CKd-10 | 661 | U.S. Pat. No. 8,734,809 SEQ ID NO: 58 |
| AAV CKd-2 | 662 | U.S. Pat. No. 8,734,809 SEQ ID NO: 59 |
| AAV CKd-3 | 663 | U.S. Pat. No. 8,734,809 SEQ ID NO: 60 |
| AAV CKd-4 | 664 | U.S. Pat. No. 8,734,809 SEQ ID NO: 61 |
| AAV CKd-6 | 665 | U.S. Pat. No. 8,734,809 SEQ ID NO: 62 |
| AAV CKd-7 | 666 | U.S. Pat. No. 8,734,809 SEQ ID NO: 63 |
| AAV CKd-8 | 667 | U.S. Pat. No. 8,734,809 SEQ ID NO: 64 |
| AAV CLv-1 | 668 | U.S. Pat. No. 8,734,809 SEQ ID NO: 65 |
| AAV CLv-12 | 669 | U.S. Pat. No. 8,734,809 SEQ ID NO: 66 |
| AAV CLv-13 | 670 | U.S. Pat. No. 8,734,809 SEQ ID NO: 67 |
| AAV CLv-2 | 671 | U.S. Pat. No. 8,734,809 SEQ ID NO: 68 |
| AAV CLv-3 | 672 | U.S. Pat. No. 8,734,809 SEQ ID NO: 69 |
| AAV CLv-4 | 673 | U.S. Pat. No. 8,734,809 SEQ ID NO: 70 |
| AAV CLv-6 | 674 | U.S. Pat. No. 8,734,809 SEQ ID NO: 71 |
| AAV CLv-8 | 675 | U.S. Pat. No. 8,734,809 SEQ ID NO: 72 |
| AAV CKd-B1 | 676 | U.S. Pat. No. 8,734,809 SEQ ID NO: 73 |
| AAV CKd-B2 | 677 | U.S. Pat. No. 8,734,809 SEQ ID NO: 74 |
| AAV CKd-B3 | 678 | U.S. Pat. No. 8,734,809 SEQ ID NO: 75 |
| AAV CKd-B4 | 679 | U.S. Pat. No. 8,734,809 SEQ ID NO: 76 |
| AAV CKd-B5 | 680 | U.S. Pat. No. 8,734,809 SEQ ID NO: 77 |
| AAV CKd-B6 | 681 | U.S. Pat. No. 8,734,809 SEQ ID NO: 78 |
| AAV CKd-B7 | 682 | U.S. Pat. No. 8,734,809 SEQ ID NO: 79 |
| AAV CKd-B8 | 683 | U.S. Pat. No. 8,734,809 SEQ ID NO: 80 |
| AAV CKd-H1 | 684 | U.S. Pat. No. 8,734,809 SEQ ID NO: 81 |
| AAV CKd-H2 | 685 | U.S. Pat. No. 8,734,809 SEQ ID NO: 82 |
| AAV CKd-H3 | 686 | U.S. Pat. No. 8,734,809 SEQ ID NO: 83 |
| AAV CKd-H4 | 687 | U.S. Pat. No. 8,734,809 SEQ ID NO: 84 |
| AAV CKd-H5 | 688 | U.S. Pat. No. 8,734,809 SEQ ID NO: 85 |
| AAV CKd-H6 | 689 | U.S. Pat. No. 8,734,809 SEQ ID NO: 77 |
| AAV CHt-1 | 690 | U.S. Pat. No. 8,734,809 SEQ ID NO: 86 |
| AAV CLv1-1 | 691 | U.S. Pat. No. 8,734,809 SEQ ID NO: 171 |
| AAV CLv1-2 | 692 | U.S. Pat. No. 8,734,809 SEQ ID NO: 172 |
| AAV CLv1-3 | 693 | U.S. Pat. No. 8,734,809 SEQ ID NO: 173 |
| AAV CLv1-4 | 694 | U.S. Pat. No. 8,734,809 SEQ ID NO: 174 |
| AAV Clv1-7 | 695 | U.S. Pat. No. 8,734,809 SEQ ID NO: 175 |
| AAV Clv1-8 | 696 | U.S. Pat. No. 8,734,809 SEQ ID NO: 176 |
| AAV Clv 1-9 | 697 | U.S. Pat. No. 8,734,809 SEQ ID NO: 177 |
| AAV Clv1-10 | 698 | U.S. Pat. No. 8,734,809 SEQ ID NO: 178 |
| AAV.VR-355 | 699 | U.S. Pat. No. 8,734,809 SEQ ID NO: 181 |
| AAV.hu.48R3 | 700 | U.S. Pat. No. 8,734,809 SEQ ID NO: 183 |
| AAV CBr-E1 | 701 | U.S. Pat. No. 8,734,809 SEQ ID NO: 87 |
| AAV CBr-E2 | 702 | U.S. Pat. No. 8,734,809 SEQ ID NO: 88 |
| AAV CBr-E3 | 703 | U.S. Pat. No. 8,734,809 SEQ ID NO: 89 |
| AAV CBr-E4 | 704 | U.S. Pat. No. 8,734,809 SEQ ID NO: 90 |
| AAV CBr-E5 | 705 | U.S. Pat. No. 8,734,809 SEQ ID NO: 91 |
| AAV CBr-e5 | 706 | U.S. Pat. No. 8,734,809 SEQ ID NO: 92 |
| AAV CBr-E6 | 707 | U.S. Pat. No. 8,734,809 SEQ ID NO: 93 |
| AAV CBr-E7 | 708 | U.S. Pat. No. 8,734,809 SEQ ID NO: 94 |
| AAV CBr-E8 | 709 | U.S. Pat. No. 8,734,809 SEQ ID NO: 95 |
| AAV CLv-D1 | 710 | U.S. Pat. No. 8,734,809 SEQ ID NO: 96 |
| AAV CLv-D2 | 711 | U.S. Pat. No. 8,734,809 SEQ ID NO: 97 |
| AAV CLv-D3 | 712 | U.S. Pat. No. 8,734,809 SEQ ID NO: 98 |
| AAV CLv-D4 | 713 | U.S. Pat. No. 8,734,809 SEQ ID NO: 99 |
| AAV CLv-D5 | 714 | U.S. Pat. No. 8,734,809 SEQ ID NO: 100 |
| AAV CLv-D6 | 715 | U.S. Pat. No. 8,734,809 SEQ ID NO: 101 |
| AAV CLv-D7 | 716 | U.S. Pat. No. 8,734,809 SEQ ID NO: 102 |
| AAV CLv-D8 | 717 | U.S. Pat. No. 8,734,809 SEQ ID NO: 103 |
| AAV CLv-E1 | 718 | U.S. Pat. No. 8,734,809 SEQ ID NO: 87 |
| AAV CLv-R1 | 719 | U.S. Pat. No. 8,734,809 SEQ ID NO: 104 |
| AAV CLv-R2 | 720 | U.S. Pat. No. 8,734,809 SEQ ID NO: 105 |
| AAV CLv-R3 | 721 | U.S. Pat. No. 8,734,809 SEQ ID NO: 106 |
| AAV CLv-R4 | 722 | U.S. Pat. No. 8,734,809 SEQ ID NO: 107 |
| AAV CLv-R5 | 723 | U.S. Pat. No. 8,734,809 SEQ ID NO: 108 |
| AAV CLv-R6 | 724 | U.S. Pat. No. 8,734,809 SEQ ID NO: 109 |
| AAV CLv-R7 | 725 | U.S. Pat. No. 8,734,809 SEQ ID NO: 110 |
| AAV CLv-R8 | 726 | U.S. Pat. No. 8,734,809 SEQ ID NO: 111 |
| AAV CLv-R9 | 727 | U.S. Pat. No. 8,734,809 SEQ ID NO: 112 |
| AAV CLg-F1 | 728 | U.S. Pat. No. 8,734,809 SEQ ID NO: 113 |
| AAV CLg-F2 | 729 | U.S. Pat. No. 8,734,809 SEQ ID NO: 114 |
| AAV CLg-F3 | 730 | U.S. Pat. No. 8,734,809 SEQ ID NO: 115 |
| AAV CLg-F4 | 731 | U.S. Pat. No. 8,734,809 SEQ ID NO: 116 |
| AAV CLg-F5 | 732 | U.S. Pat. No. 8,734,809 SEQ ID NO: 117 |
| AAV CLg-F6 | 733 | U.S. Pat. No. 8,734,809 SEQ ID NO: 117 |
| AAV CLg-F7 | 734 | U.S. Pat. No. 8,734,809 SEQ ID NO: 118 |
| AAV CLg-F8 | 735 | U.S. Pat. No. 8,734,809 SEQ ID NO: 117 |
| AAV CSp-1 | 736 | U.S. Pat. No. 8,734,809 SEQ ID NO: 119 |
| AAV CSp-10 | 737 | U.S. Pat. No. 8,734,809 SEQ ID NO: 120 |
| AAV CSp-11 | 738 | U.S. Pat. No. 8,734,809 SEQ ID NO: 121 |
| AAV CSp-2 | 739 | U.S. Pat. No. 8,734,809 SEQ ID NO: 122 |
| AAV CSp-3 | 740 | U.S. Pat. No. 8,734,809 SEQ ID NO: 123 |
| AAV CSp-4 | 741 | U.S. Pat. No. 8,734,809 SEQ ID NO: 124 |
| AAV CSp-6 | 742 | U.S. Pat. No. 8,734,809 SEQ ID NO: 125 |
| AAV CSp-7 | 743 | U.S. Pat. No. 8,734,809 SEQ ID NO: 126 |
| AAV CSp-8 | 744 | U.S. Pat. No. 8,734,809 SEQ ID NO: 127 |
| AAV CSp-9 | 745 | U.S. Pat. No. 8,734,809 SEQ ID NO: 128 |
| AAV CHt-2 | 746 | U.S. Pat. No. 8,734,809 SEQ ID NO: 129 |
| AAV CHt-3 | 747 | U.S. Pat. No. 8,734,809 SEQ ID NO: 130 |
| AAV CKd-1 | 748 | U.S. Pat. No. 8,734,809 SEQ ID NO: 131 |
| AAV CKd-10 | 749 | U.S. Pat. No. 8,734,809 SEQ ID NO: 132 |
| AAV CKd-2 | 750 | U.S. Pat. No. 8,734,809 SEQ ID NO: 133 |
| AAV CKd-3 | 751 | U.S. Pat. No. 8,734,809 SEQ ID NO: 134 |
| AAV CKd-4 | 752 | U.S. Pat. No. 8,734,809 SEQ ID NO: 135 |
| AAV CKd-6 | 753 | U.S. Pat. No. 8,734,809 SEQ ID NO: 136 |
| AAV CKd-7 | 754 | U.S. Pat. No. 8,734,809 SEQ ID NO: 137 |
| AAV CKd-8 | 755 | U.S. Pat. No. 8,734,809 SEQ ID NO: 138 |
| AAV CLv-1 | 756 | U.S. Pat. No. 8,734,809 SEQ ID NO: 139 |
| AAV CLv-12 | 757 | U.S. Pat. No. 8,734,809 SEQ ID NO: 140 |
| AAV CLv-13 | 758 | U.S. Pat. No. 8,734,809 SEQ ID NO: 141 |
| AAV CLv-2 | 759 | U.S. Pat. No. 8,734,809 SEQ ID NO: 142 |
| AAV CLv-3 | 760 | U.S. Pat. No. 8,734,809 SEQ ID NO: 143 |
| AAV CLv-4 | 761 | U.S. Pat. No. 8,734,809 SEQ ID NO: 144 |
| AAV CLv-6 | 762 | U.S. Pat. No. 8,734,809 SEQ ID NO: 145 |
| AAV CLv-8 | 763 | U.S. Pat. No. 8,734,809 SEQ ID NO: 146 |
| AAV CKd-B1 | 764 | U.S. Pat. No. 8,734,809 SEQ ID NO: 147 |
| AAV CKd-B2 | 765 | U.S. Pat. No. 8,734,809 SEQ ID NO: 148 |
| AAV CKd-B3 | 766 | U.S. Pat. No. 8,734,809 SEQ ID NO: 149 |
| AAV CKd-B4 | 767 | U.S. Pat. No. 8,734,809 SEQ ID NO: 150 |
| AAV CKd-B5 | 768 | U.S. Pat. No. 8,734,809 SEQ ID NO: 151 |
| AAV CKd-B6 | 769 | U.S. Pat. No. 8,734,809 SEQ ID NO: 152 |
| AAV CKd-B7 | 770 | U.S. Pat. No. 8,734,809 SEQ ID NO: 153 |
| AAV CKd-B8 | 771 | U.S. Pat. No. 8,734,809 SEQ ID NO: 154 |
| AAV CKd-H1 | 772 | U.S. Pat. No. 8,734,809 SEQ ID NO: 155 |
| AAV CKd-H2 | 773 | U.S. Pat. No. 8,734,809 SEQ ID NO: 156 |
| AAV CKd-H3 | 774 | U.S. Pat. No. 8,734,809 SEQ ID NO: 157 |
| AAV CKd-H4 | 775 | U.S. Pat. No. 8,734,809 SEQ ID NO: 158 |
| AAV CKd-H5 | 776 | U.S. Pat. No. 8,734,809 SEQ ID NO: 159 |
| AAV CKd-H6 | 777 | U.S. Pat. No. 8,734,809 SEQ ID NO: 151 |
| AAV CHt-1 | 778 | U.S. Pat. No. 8,734,809 SEQ ID NO: 160 |
| AAV CHt-P2 | 779 | WO2016065001 SEQ ID NO: 1 |
| AAV CHt-P5 | 780 | WO2016065001 SEQ ID NO: 2 |
| AAV CHt-P9 | 781 | WO2016065001 SEQ ID NO: 3 |
| AAV CBr-7.1 | 782 | WO2016065001 SEQ ID NO: 4 |
| AAV CBr-7.2 | 783 | WO2016065001 SEQ ID NO: 5 |
| AAV CBr-7.3 | 784 | WO2016065001 SEQ ID NO: 6 |
| AAV CBr-7.4 | 785 | WO2016065001 SEQ ID NO: 7 |
| AAV CBr-7.5 | 786 | WO2016065001 SEQ ID NO: 8 |
| AAV CBr-7.7 | 787 | WO2016065001 SEQ ID NO: 9 |
| AAV CBr-7.8 | 788 | WO2016065001 SEQ ID NO: 10 |
| AAV CBr-7.10 | 789 | WO2016065001 SEQ ID NO: 11 |
| AAV CKd-N3 | 790 | WO2016065001 SEQ ID NO: 12 |
| AAV CKd-N4 | 791 | WO2016065001 SEQ ID NO: 13 |
| AAV CKd-N9 | 792 | WO2016065001 SEQ ID NO: 14 |
| AAV CLv-L4 | 793 | WO2016065001 SEQ ID NO: 15 |
| AAV CLv-L5 | 794 | WO2016065001 SEQ ID NO: 16 |
| AAV CLv-L6 | 795 | WO2016065001 SEQ ID NO: 17 |
| AAV CLv-K1 | 796 | WO2016065001 SEQ ID NO: 18 |
| AAV CLv-K3 | 797 | WO2016065001 SEQ ID NO: 19 |
| AAV CLv-K6 | 798 | WO2016065001 SEQ ID NO: 20 |
| AAV CLv-M1 | 799 | WO2016065001 SEQ ID NO: 21 |
| AAV CLv-M11 | 800 | WO2016065001 SEQ ID NO: 22 |
| AAV CLv-M2 | 801 | WO2016065001 SEQ ID NO: 23 |
| AAV CLv-M5 | 802 | WO2016065001 SEQ ID NO: 24 |
| AAV CLv-M6 | 803 | WO2016065001 SEQ ID NO: 25 |
| AAV CLv-M7 | 804 | WO2016065001 SEQ ID NO: 26 |
| AAV CLv-M8 | 805 | WO2016065001 SEQ ID NO: 27 |
| AAV CLv-M9 | 806 | WO2016065001 SEQ ID NO: 28 |
| AAV CHt-P1 | 807 | WO2016065001 SEQ ID NO: 29 |
| AAV CHt-P6 | 808 | WO2016065001 SEQ ID NO: 30 |
| AAV CHt-P8 | 809 | WO2016065001 SEQ ID NO: 31 |
| AAV CHt-6.1 | 810 | WO2016065001 SEQ ID NO: 32 |
| AAV CHt-6.10 | 811 | WO2016065001 SEQ ID NO: 33 |
| AAV CHt-6.5 | 812 | WO2016065001 SEQ ID NO: 34 |
| AAV CHt-6.6 | 813 | WO2016065001 SEQ ID NO: 35 |
| AAV CHt-6.7 | 814 | WO2016065001 SEQ ID NO: 36 |
| AAV CHt-6.8 | 815 | WO2016065001 SEQ ID NO: 37 |
| AAV CSp-8.10 | 816 | WO2016065001 SEQ ID NO: 38 |
| AAV CSp-8.2 | 817 | WO2016065001 SEQ ID NO: 39 |
| AAV CSp-8.4 | 818 | WO2016065001 SEQ ID NO: 40 |
| AAV CSp-8.5 | 819 | WO2016065001 SEQ ID NO: 41 |
| AAV CSp-8.6 | 820 | WO2016065001 SEQ ID NO: 42 |
| AAV CSp-8.7 | 821 | WO2016065001 SEQ ID NO: 43 |
| AAV CSp-8.8 | 822 | WO2016065001 SEQ ID NO: 44 |
| AAV CSp-8.9 | 823 | WO2016065001 SEQ ID NO: 45 |
| AAV CBr-B7.3 | 824 | WO2016065001 SEQ ID NO: 46 |
| AAV CBr-B7.4 | 825 | WO2016065001 SEQ ID NO: 47 |
| AAV3B | 826 | WO2016065001 SEQ ID NO: 48 |
| AAV4 | 827 | WO2016065001 SEQ ID NO: 49 |
| AAV5 | 828 | WO2016065001 SEQ ID NO: 50 |
| AAV CHt-P2 | 829 | WO2016065001 SEQ ID NO: 51 |
| AAV CHt-P5 | 830 | WO2016065001 SEQ ID NO: 52 |
| AAV CHt-P9 | 831 | WO2016065001 SEQ ID NO: 53 |
| AAV CBr-7.1 | 832 | WO2016065001 SEQ ID NO: 54 |
| AAV CBr-7.2 | 833 | WO2016065001 SEQ ID NO: 55 |
| AAV CBr-7.3 | 834 | WO2016065001 SEQ ID NO: 56 |
| AAV CBr-7.4 | 835 | WO2016065001 SEQ ID NO: 57 |
| AAV CBr-7.5 | 836 | WO2016065001 SEQ ID NO: 58 |
| AAV CBr-7.7 | 837 | WO2016065001 SEQ ID NO: 59 |
| AAV CBr-7.8 | 838 | WO2016065001 SEQ ID NO: 60 |
| AAV CBr-7.10 | 839 | WO2016065001 SEQ ID NO: 61 |
| AAV CKd-N3 | 840 | WO2016065001 SEQ ID NO: 62 |
| AAV CKd-N4 | 841 | WO2016065001 SEQ ID NO: 63 |
| AAV CKd-N9 | 842 | WO2016065001 SEQ ID NO: 64 |
| AAV CLv-L4 | 843 | WO2016065001 SEQ ID NO: 65 |
| AAV CLv-L5 | 844 | WO2016065001 SEQ ID NO: 66 |
| AAV CLv-L6 | 845 | WO2016065001 SEQ ID NO: 67 |
| AAV CLv-K1 | 846 | WO2016065001 SEQ ID NO: 68 |
| AAV CLv-K3 | 847 | WO2016065001 SEQ ID NO: 69 |
| AAV CLv-K6 | 848 | WO2016065001 SEQ ID NO: 70 |
| AAV CLv-M1 | 849 | WO2016065001 SEQ ID NO: 71 |
| AAV CLv-M11 | 850 | WO2016065001 SEQ ID NO: 72 |
| AAV CLv-M2 | 851 | WO2016065001 SEQ ID NO: 73 |
| AAV CLv-M5 | 852 | WO2016065001 SEQ ID NO: 74 |
| AAV CLv-M6 | 853 | WO2016065001 SEQ ID NO: 75 |
| AAV CLv-M7 | 854 | WO2016065001 SEQ ID NO: 76 |
| AAV CLv-M8 | 855 | WO2016065001 SEQ ID NO: 77 |
| AAV CLv-M9 | 856 | WO2016065001 SEQ ID NO: 78 |
| AAV CHt-P1 | 857 | WO2016065001 SEQ ID NO: 79 |
| AAV CHt-P6 | 858 | WO2016065001 SEQ ID NO: 80 |
| AAV CHt-P8 | 859 | WO2016065001 SEQ ID NO: 81 |
| AAV CHt-6.1 | 860 | WO2016065001 SEQ ID NO: 82 |
| AAV CHt-6.10 | 861 | WO2016065001 SEQ ID NO: 83 |
| AAV CHt-6.5 | 862 | WO2016065001 SEQ ID NO: 84 |
| AAV CHt-6.6 | 863 | WO2016065001 SEQ ID NO: 85 |
| AAV CHt-6.7 | 864 | WO2016065001 SEQ ID NO: 86 |
| AAV CHt-6.8 | 865 | WO2016065001 SEQ ID NO: 87 |
| AAV CSp-8.10 | 866 | WO2016065001 SEQ ID NO: 88 |
| AAV CSp-8.2 | 867 | WO2016065001 SEQ ID NO: 89 |
| AAV CSp-8.4 | 868 | WO2016065001 SEQ ID NO: 90 |
| AAV CSp-8.5 | 869 | WO2016065001 SEQ ID NO: 91 |
| AAV CSp-8.6 | 870 | WO2016065001 SEQ ID NO: 92 |
| AAV CSp-8.7 | 871 | WO2016065001 SEQ ID NO: 93 |
| AAV CSp-8.8 | 872 | WO2016065001 SEQ ID NO: 94 |
| AAV CSp-8.9 | 873 | WO2016065001 SEQ ID NO: 95 |
| AAV CBr-B7.3 | 874 | WO2016065001 SEQ ID NO: 96 |
| AAV CBr-B7.4 | 875 | WO2016065001 SEQ ID NO: 97 |
| AAV3B | 876 | WO2016065001 SEQ ID NO: 98 |
| AAV4 | 877 | WO2016065001 SEQ ID NO: 99 |
| AAV5 | 878 | WO2016065001 SEQ ID NO: 100 |
| GPV | 879 | U.S. Pat. No. 9,624,274B2 SEQ ID NO: 192 |
| B19 | 880 | U.S. Pat. No. 9,624,274B2 SEQ ID NO: 193 |
| MVM | 881 | U.S. Pat. No. 9,624,274B2 SEQ ID NO: 194 |
| FPV | 882 | U.S. Pat. No. 9,624,274B2 SEQ ID NO: 195 |
| CPV | 883 | U.S. Pat. No. 9,624,274B2 SEQ ID NO: 196 |
| AAV6 | 884 | U.S. Pat. No. 9,546,112B2 SEQ ID NO: 5 |
| AAV6 | 885 | U.S. Pat. No. 9,457,103B2 SEQ ID NO: 1 |
| AAV2 | 886 | U.S. Pat. No. 9,457,103B2 SEQ ID NO: 2 |
| ShH10 | 887 | U.S. Pat. No. 9,457,103B2 SEQ ID NO: 3 |
| ShH13 | 888 | U.S. Pat. No. 9,457,103B2 SEQ ID NO: 4 |
| ShH10 | 889 | U.S. Pat. No. 9,457,103B2 SEQ ID NO: 5 |
| ShH10 | 890 | U.S. Pat. No. 9,457,103B2 SEQ ID NO: 6 |
| ShH10 | 891 | U.S. Pat. No. 9,457,103B2 SEQ ID NO: 7 |
| ShH10 | 892 | U.S. Pat. No. 9,457,103B2 SEQ ID NO: 8 |
| ShH10 | 893 | U.S. Pat. No. 9,457,103B2 SEQ ID NO: 9 |
| rh74 | 894 | U.S. Pat. No. 9,434,928B2 SEQ ID NO: 1, US2015023924A1 SEQ ID NO: 2 |
| rh74 | 895 | U.S. Pat. No. 9,434,928B2 SEQ ID NO: 2, US2015023924A1 SEQ ID NO: 1 |
| AAV8 | 896 | U.S. Pat. No. 9,434,928B2 SEQ ID NO: 4 |
| rh74 | 897 | U.S. Pat. No. 9,434,928B2 SEQ ID NO: 5 |
| rh74 (RHM4-1) | 898 | US2015023924A1 SEQ ID NO: 5, US20160375110A1 SEQ ID NO: 4 |
| rh74 (RHM15-1) | 899 | US2015023924A1 SEQ ID NO: 6, US20160375110A1 SEQ ID NO: 5 |
| rh74 (RHM15-2) | 900 | US2015023924A1 SEQ ID NO: 7, US20160375110A1 SEQ ID NO: 6 |
| rh74 (RHM15-3/RHM15-5) | 901 | US2015023924A1 SEQ ID NO: 8, US20160375110A1 SEQ ID NO: 7 |
| rh74 (RHM15-4) | 902 | US2015023924A1 SEQ ID NO: 9, US20160375110A1 SEQ ID NO: 8 |
| rh74 (RHM15-6) | 903 | US2015023924A1 SEQ ID NO: 10, US20160375110A1 SEQ ID NO: 9 |
| rh74 (RHM4-1) | 904 | US2015023924A1 SEQ ID NO: 11 |
| rh74 (RHM15-1) | 905 | US2015023924A1 SEQ ID NO: 12 |
| rh74 (RHM15-2) | 906 | US2015023924A1 SEQ ID NO: 13 |
| rh74 (RHM15-3/RHM15-5) | 907 | US2015023924A1 SEQ ID NO: 14 |
| rh74 (RHM15-4) | 908 | US2015023924A1 SEQ ID NO: 15 |
| rh74 (RHM15-6) | 909 | US2015023924A1 SEQ ID NO: 16 |
| AAV2 (comprising lung | 910 | US20160175389A1 SEQ ID NO: 9 |
| specific polypeptide) | | |
| AAV2 (comprising lung | 911 | US20160175389A1 SEQ ID NO: 10 |
| specific polypeptide) | | |
| Anc80 | 912 | US20170051257A1 SEQ ID NO: 1 |
| Anc80 | 913 | US20170051257A1 SEQ ID NO: 2 |
| Anc81 | 914 | US20170051257A1 SEQ ID NO: 3 |
| Anc80 | 915 | US20170051257A1 SEQ ID NO: 4 |
| Anc82 | 916 | US20170051257A1 SEQ ID NO: 5 |
| Anc82 | 917 | US20170051257A1 SEQ ID NO: 6 |
| Anc83 | 918 | US20170051257A1 SEQ ID NO: 7 |
| Anc83 | 919 | US20170051257A1 SEQ ID NO: 8 |
| Anc84 | 920 | US20170051257A1 SEQ ID NO: 9 |
| Anc84 | 921 | US20170051257A1 SEQ ID NO: 10 |
| Anc94 | 922 | US20170051257A1 SEQ ID NO: 11 |
| Anc94 | 923 | US20170051257A1 SEQ ID NO: 12 |
| Anc113 | 924 | US20170051257A1 SEQ ID NO: 13 |
| Anc113 | 925 | US20170051257A1 SEQ ID NO: 14 |
| Anc126 | 926 | US20170051257A1 SEQ ID NO: 15 |
| Anc126 | 927 | US20170051257A1 SEQ ID NO: 16 |
| Anc127 | 928 | US20170051257A1 SEQ ID NO: 17 |
| Anc127 | 929 | US20170051257A1 SEQ ID NO: 18 |
| Anc80L27 | 930 | US20170051257A1 SEQ ID NO: 19 |
| Anc80L59 | 931 | US20170051257A1 SEQ ID NO: 20 |
| Anc80L60 | 932 | US20170051257A1 SEQ ID NO: 21 |
| Anc80L62 | 933 | US20170051257A1 SEQ ID NO: 22 |
| Anc80L65 | 934 | US20170051257A1 SEQ ID NO: 23 |
| Anc80L33 | 935 | US20170051257A1 SEQ ID NO: 24 |
| Anc80L36 | 936 | US20170051257A1 SEQ ID NO: 25 |
| Anc80L44 | 937 | US20170051257A1 SEQ ID NO: 26 |
| Anc80L1 | 938 | US20170051257A1 SEQ ID NO: 35 |
| Anc80L1 | 939 | US20170051257A1 SEQ ID NO: 36 |
| AAV-X1 | 940 | U.S. Pat. No. 8,283,151B2 SEQ ID NO: 11 |
| AAV-X1b | 941 | U.S. Pat. No. 8,283,151B2 SEQ ID NO: 12 |
| AAV-X5 | 942 | U.S. Pat. No. 8,283,151B2 SEQ ID NO: 13 |
| AAV-X19 | 943 | U.S. Pat. No. 8,283,151B2 SEQ ID NO: 14 |
| AAV-X21 | 944 | U.S. Pat. No. 8,283,151B2 SEQ ID NO: 15 |
| AAV-X22 | 945 | U.S. Pat. No. 8,283,151B2 SEQ ID NO: 16 |
| AAV-X23 | 946 | U.S. Pat. No. 8,283,151B2 SEQ ID NO: 17 |
| AAV-X24 | 947 | U.S. Pat. No. 8,283,151B2 SEQ ID NO: 18 |
| AAV-X25 | 948 | U.S. Pat. No. 8,283,151B2 SEQ ID NO: 19 |
| AAV-X26 | 949 | U.S. Pat. No. 8,283,151B2 SEQ ID NO: 20 |
| AAV-X1 | 950 | U.S. Pat. No. 8,283,151B2 SEQ ID NO: 21 |
| AAV-X1b | 951 | U.S. Pat. No. 8,283,151B2 SEQ ID NO: 22 |
| AAV-X5 | 952 | U.S. Pat. No. 8,283,151B2 SEQ ID NO: 23 |
| AAV-X19 | 953 | U.S. Pat. No. 8,283,151B2 SEQ ID NO: 24 |
| AAV-X21 | 954 | U.S. Pat. No. 8,283,151B2 SEQ ID NO: 25 |
| AAV-X22 | 955 | U.S. Pat. No. 8,283,151B2 SEQ ID NO: 26 |
| AAV-X23 | 956 | U.S. Pat. No. 8,283,151B2 SEQ ID NO: 27 |
| AAV-X24 | 957 | U.S. Pat. No. 8,283,151B2 SEQ ID NO: 28 |
| AAV-X25 | 958 | U.S. Pat. No. 8,283,151B2 SEQ ID NO: 29 |
| AAV-X26 | 959 | U.S. Pat. No. 8,283,151B2 SEQ ID NO: 30 |
| AAVrh8 | 960 | WO2016054554A1 SEQ ID NO: 8 |
| AAVrh8VP2FC5 | 961 | WO2016054554A1 SEQ ID NO: 9 |
| AAVrh8VP2FC44 | 962 | WO2016054554A1 SEQ ID NO: 10 |
| AAVrh8VP2ApoB100 | 963 | WO2016054554A1 SEQ ID NO: 11 |
| AAVrh8VP2RVG | 964 | WO2016054554A1 SEQ ID NO: 12 |
| AAVrh8VP2Angiopep-2 VP2 | 965 | WO2016054554A1 SEQ ID NO: 13 |
| AAV9.47VP1.3 | 966 | WO2016054554A1 SEQ ID NO: 14 |
| AAV9.47VP2ICAMg3 | 967 | WO2016054554A1 SEQ ID NO: 15 |
| AAV9.47VP2RVG | 968 | WO2016054554A1 SEQ ID NO: 16 |
| AAV9.47VP2Angiopep-2 | 969 | WO2016054554A1 SEQ ID NO: 17 |
| AAV9.47VP2A-string | 970 | WO2016054554A1 SEQ ID NO: 18 |
| AAVrh8VP2FC5 VP2 | 971 | WO2016054554A1 SEQ ID NO: 19 |
| AAVrh8VP2FC44 VP2 | 972 | WO2016054554A1 SEQ ID NO: 20 |
| AAVrh8VP2ApoB100 VP2 | 973 | WO2016054554A1 SEQ ID NO: 21 |
| AAVrh8VP2RVG VP2 | 974 | WO2016054554A1 SEQ ID NO: 22 |
| AAVrh8VP2Angiopep-2 VP2 | 975 | WO2016054554A1 SEQ ID NO: 23 |
| AAV9.47VP2ICAMg3 VP2 | 976 | WO2016054554A1 SEQ ID NO: 24 |
| AAV9.47VP2RVG VP2 | 977 | WO2016054554A1 SEQ ID NO: 25 |
| AAV9.47VP2Angiopep-2 VP2 | 978 | WO2016054554A1 SEQ ID NO: 26 |
| AAV9.47VP2A-string VP2 | 979 | WO2016054554A1 SEQ ID NO: 27 |
| rAAV-B1 | 980 | WO2016054557A1 SEQ ID NO: 1 |
| rAAV-B2 | 981 | WO2016054557A1 SEQ ID NO: 2 |
| rAAV-B3 | 982 | WO2016054557A1 SEQ ID NO: 3 |
| rAAV-B4 | 983 | WO2016054557A1 SEQ ID NO: 4 |
| rAAV-B1 | 984 | WO2016054557A1 SEQ ID NO: 5 |
| rAAV-B2 | 985 | WO2016054557A1 SEQ ID NO: 6 |
| rAAV-B3 | 986 | WO2016054557A1 SEQ ID NO: 7 |
| rAAV-B4 | 987 | WO2016054557A1 SEQ ID NO: 8 |
| rAAV-L1 | 988 | WO2016054557A1 SEQ ID NO: 9 |
| rAAV-L2 | 989 | WO2016054557A1 SEQ ID NO: 10 |
| rAAV-L3 | 990 | WO2016054557A1 SEQ ID NO: 11 |
| rAAV-L4 | 991 | WO2016054557A1 SEQ ID NO: 12 |
| rAAV-L1 | 992 | WO2016054557A1 SEQ ID NO: 13 |
| rAAV-L2 | 993 | WO2016054557A1 SEQ ID NO: 14 |
| rAAV-L3 | 994 | WO2016054557A1 SEQ ID NO: 15 |
| rAAV-L4 | 995 | WO2016054557A1 SEQ ID NO: 16 |
| AAV9 | 996 | WO2016073739A1 SEQ ID NO: 3 |
| rAAV | 997 | WO2016081811A1 SEQ ID NO: 1 |
| rAAV | 998 | WO2016081811A1 SEQ ID NO: 2 |
| rAAV | 999 | WO2016081811A1 SEQ ID NO: 3 |
| rAAV | 1000 | WO2016081811A1 SEQ ID NO: 4 |
| rAAV | 1001 | WO2016081811A1 SEQ ID NO: 5 |
| rAAV | 1002 | WO2016081811A1 SEQ ID NO: 6 |
| rAAV | 1003 | WO2016081811A1 SEQ ID NO: 7 |
| rAAV | 1004 | WO2016081811A1 SEQ ID NO: 8 |
| rAAV | 1005 | WO2016081811A1 SEQ ID NO: 9 |
| rAAV | 1006 | WO2016081811A1 SEQ ID NO: 10 |
| rAAV | 1007 | WO2016081811A1 SEQ ID NO: 11 |
| rAAV | 1008 | WO2016081811A1 SEQ ID NO: 12 |
| rAAV | 1009 | WO2016081811A1 SEQ ID NO: 13 |
| rAAV | 1010 | WO2016081811A1 SEQ ID NO: 14 |
| rAAV | 1011 | WO2016081811A1 SEQ ID NO: 15 |
| rAAV | 1012 | WO2016081811A1 SEQ ID NO: 16 |
| rAAV | 1013 | WO2016081811A1 SEQ ID NO: 17 |
| rAAV | 1014 | WO2016081811A1 SEQ ID NO: 18 |
| rAAV | 1015 | WO2016081811A1 SEQ ID NO: 19 |
| rAAV | 1016 | WO2016081811A1 SEQ ID NO: 20 |
| rAAV | 1017 | WO2016081811A1 SEQ ID NO: 21 |
| rAAV | 1018 | WO2016081811A1 SEQ ID NO: 22 |
| rAAV | 1019 | WO2016081811A1 SEQ ID NO: 23 |
| rAAV | 1020 | WO2016081811A1 SEQ ID NO: 24 |
| rAAV | 1021 | WO2016081811A1 SEQ ID NO: 25 |
| rAAV | 1022 | WO2016081811A1 SEQ ID NO: 26 |
| rAAV | 1023 | WO2016081811A1 SEQ ID NO: 27 |
| rAAV | 1024 | WO2016081811A1 SEQ ID NO: 28 |
| rAAV | 1025 | WO2016081811A1 SEQ ID NO: 29 |
| rAAV | 1026 | WO2016081811A1 SEQ ID NO: 30 |
| rAAV | 1027 | WO2016081811A1 SEQ ID NO: 31 |
| rAAV | 1028 | WO2016081811A1 SEQ ID NO: 32 |
| rAAV | 1029 | WO2016081811A1 SEQ ID NO: 33 |
| rAAV | 1030 | WO2016081811A1 SEQ ID NO: 34 |
| rAAV | 1031 | WO2016081811A1 SEQ ID NO: 35 |
| rAAV | 1032 | WO2016081811A1 SEQ ID NO: 36 |
| rAAV | 1033 | WO2016081811A1 SEQ ID NO: 37 |
| rAAV | 1034 | WO2016081811A1 SEQ ID NO: 38 |
| rAAV | 1035 | WO2016081811A1 SEQ ID NO: 39 |
| rAAV | 1036 | WO2016081811A1 SEQ ID NO: 40 |
| rAAV | 1037 | WO2016081811A1 SEQ ID NO: 41 |
| rAAV | 1038 | WO2016081811A1 SEQ ID NO: 42 |
| rAAV | 1039 | WO2016081811A1 SEQ ID NO: 43 |
| rAAV | 1040 | WO2016081811A1 SEQ ID NO: 44 |
| rAAV | 1041 | WO2016081811A1 SEQ ID NO: 45 |
| rAAV | 1042 | WO2016081811A1 SEQ ID NO: 46 |
| rAAV | 1043 | WO2016081811A1 SEQ ID NO: 47 |
| rAAV | 1044 | WO2016081811A1 SEQ ID NO: 48 |
| rAAV | 1045 | WO2016081811A1 SEQ ID NO: 49 |
| rAAV | 1046 | WO2016081811A1 SEQ ID NO: 50 |
| rAAV | 1047 | WO2016081811A1 SEQ ID NO: 51 |
| rAAV | 1048 | WO2016081811A1 SEQ ID NO: 52 |
| rAAV | 1049 | WO2016081811A1 SEQ ID NO: 53 |
| rAAV | 1050 | WO2016081811A1 SEQ ID NO: 54 |
| rAAV | 1051 | WO2016081811A1 SEQ ID NO: 55 |
| rAAV | 1052 | WO2016081811A1 SEQ ID NO: 56 |
| rAAV | 1053 | WO2016081811A1 SEQ ID NO: 57 |
| rAAV | 1054 | WO2016081811A1 SEQ ID NO: 58 |
| rAAV | 1055 | WO2016081811A1 SEQ ID NO: 59 |
| rAAV | 1056 | WO2016081811A1 SEQ ID NO: 60 |
| rAAV | 1057 | WO2016081811A1 SEQ ID NO: 61 |
| rAAV | 1058 | WO2016081811A1 SEQ ID NO: 62 |
| rAAV | 1059 | WO2016081811A1 SEQ ID NO: 63 |
| rAAV | 1060 | WO2016081811A1 SEQ ID NO: 64 |
| rAAV | 1061 | WO2016081811A1 SEQ ID NO: 65 |
| rAAV | 1062 | WO2016081811A1 SEQ ID NO: 66 |
| rAAV | 1063 | WO2016081811A1 SEQ ID NO: 67 |
| rAAV | 1064 | WO2016081811A1 SEQ ID NO: 68 |
| rAAV | 1065 | WO2016081811A1 SEQ ID NO: 69 |
| rAAV | 1066 | WO2016081811A1 SEQ ID NO: 70 |
| rAAV | 1067 | WO2016081811A1 SEQ ID NO: 71 |
| rAAV | 1068 | WO2016081811A1 SEQ ID NO: 72 |
| rAAV | 1069 | WO2016081811A1 SEQ ID NO: 73 |
| rAAV | 1070 | WO2016081811A1 SEQ ID NO: 74 |
| rAAV | 1071 | WO2016081811A1 SEQ ID NO: 75 |
| rAAV | 1072 | WO2016081811A1 SEQ ID NO: 76 |
| rAAV | 1073 | WO2016081811A1 SEQ ID NO: 77 |
| rAAV | 1074 | WO2016081811A1 SEQ ID NO: 78 |
| rAAV | 1075 | WO2016081811A1 SEQ ID NO: 79 |
| rAAV | 1076 | WO2016081811A1 SEQ ID NO: 80 |
| rAAV | 1077 | WO2016081811A1 SEQ ID NO: 81 |
| rAAV | 1078 | WO2016081811A1 SEQ ID NO: 82 |
| rAAV | 1079 | WO2016081811A1 SEQ ID NO: 83 |
| rAAV | 1080 | WO2016081811A1 SEQ ID NO: 84 |
| rAAV | 1081 | WO2016081811A1 SEQ ID NO: 85 |
| rAAV | 1082 | WO2016081811A1 SEQ ID NO: 86 |
| rAAV | 1083 | WO2016081811A1 SEQ ID NO: 87 |
| rAAV | 1084 | WO2016081811A1 SEQ ID NO: 88 |
| rAAV | 1085 | WO2016081811A1 SEQ ID NO: 89 |
| rAAV | 1086 | WO2016081811A1 SEQ ID NO: 90 |
| rAAV | 1087 | WO2016081811A1 SEQ ID NO: 91 |
| rAAV | 1088 | WO2016081811A1 SEQ ID NO: 92 |
| rAAV | 1089 | WO2016081811A1 SEQ ID NO: 93 |
| rAAV | 1090 | WO2016081811A1 SEQ ID NO: 94 |
| rAAV | 1091 | WO2016081811A1 SEQ ID NO: 95 |
| rAAV | 1092 | WO2016081811A1 SEQ ID NO: 96 |
| rAAV | 1093 | WO2016081811A1 SEQ ID NO: 97 |
| rAAV | 1094 | WO2016081811A1 SEQ ID NO: 98 |
| rAAV | 1095 | WO2016081811A1 SEQ ID NO: 99 |
| rAAV | 1096 | WO2016081811A1 SEQ ID NO: 100 |
| rAAV | 1097 | WO2016081811A1 SEQ ID NO: 101 |
| rAAV | 1098 | WO2016081811A1 SEQ ID NO: 102 |
| rAAV | 1099 | WO2016081811A1 SEQ ID NO: 103 |
| rAAV | 1100 | WO2016081811A1 SEQ ID NO: 104 |
| rAAV | 1101 | WO2016081811A1 SEQ ID NO: 105 |
| rAAV | 1102 | WO2016081811A1 SEQ ID NO: 106 |
| rAAV | 1103 | WO2016081811A1 SEQ ID NO: 107 |
| rAAV | 1104 | WO2016081811A1 SEQ ID NO: 108 |
| rAAV | 1105 | WO2016081811A1 SEQ ID NO: 109 |
| rAAV | 1106 | WO2016081811A1 SEQ ID NO: 110 |
| rAAV | 1107 | WO2016081811A1 SEQ ID NO: 111 |
| rAAV | 1108 | WO2016081811A1 SEQ ID NO: 112 |
| rAAV | 1109 | WO2016081811A1 SEQ ID NO: 113 |
| rAAV | 1110 | WO2016081811A1 SEQ ID NO: 114 |
| rAAV | 1111 | WO2016081811A1 SEQ ID NO: 115 |
| rAAV | 1112 | WO2016081811A1 SEQ ID NO: 116 |
| rAAV | 1113 | WO2016081811A1 SEQ ID NO: 117 |
| rAAV | 1114 | WO2016081811A1 SEQ ID NO: 118 |
| rAAV | 1115 | WO2016081811A1 SEQ ID NO: 119 |
| rAAV | 1116 | WO2016081811A1 SEQ ID NO: 120 |
| rAAV | 1117 | WO2016081811A1 SEQ ID NO: 121 |
| rAAV | 1118 | WO2016081811A1 SEQ ID NO: 122 |
| rAAV | 1119 | WO2016081811A1 SEQ ID NO: 123 |
| rAAV | 1120 | WO2016081811A1 SEQ ID NO: 124 |
| rAAV | 1121 | WO2016081811A1 SEQ ID NO: 125 |
| rAAV | 1122 | WO2016081811A1 SEQ ID NO: 126 |
| rAAV | 1123 | WO2016081811A1 SEQ ID NO: 127 |
| rAAV | 1124 | WO2016081811A1 SEQ ID NO: 128 |
| AAV8 E532K | 1125 | WO2016081811A1 SEQ ID NO: 133 |
| AAV8 E532K | 1126 | WO2016081811A1 SEQ ID NO: 134 |
| rAAV4 | 1127 | WO2016115382A1 SEQ ID NO: 2 |
| rAAV4 | 1128 | WO2016115382A1 SEQ ID NO: 3 |
| rAAV4 | 1129 | WO2016115382A1 SEQ ID NO: 4 |
| rAAV4 | 1130 | WO2016115382A1 SEQ ID NO: 5 |
| rAAV4 | 1131 | WO2016115382A1 SEQ ID NO: 6 |
| rAAV4 | 1132 | WO2016115382A1 SEQ ID NO: 7 |
| rAAV4 | 1133 | WO2016115382A1 SEQ ID NO: 8 |
| rAAV4 | 1134 | WO2016115382A1 SEQ ID NO: 9 |
| rAAV4 | 1135 | WO2016115382A1 SEQ ID NO: 10 |
| rAAV4 | 1136 | WO2016115382A1 SEQ ID NO: 11 |
| rAAV4 | 1137 | WO2016115382A1 SEQ ID NO: 12 |
| rAAV4 | 1138 | WO2016115382A1 SEQ ID NO: 13 |
| rAAV4 | 1139 | WO2016115382A1 SEQ ID NO: 14 |
| rAAV4 | 1140 | WO2016115382A1 SEQ ID NO: 15 |
| rAAV4 | 1141 | WO2016115382A1 SEQ ID NO: 16 |
| rAAV4 | 1142 | WO2016115382A1 SEQ ID NO: 17 |
| rAAV4 | 1143 | WO2016115382A1 SEQ ID NO: 18 |
| rAAV4 | 1144 | WO2016115382A1 SEQ ID NO: 19 |
| rAAV4 | 1145 | WO2016115382A1 SEQ ID NO: 20 |
| rAAV4 | 1146 | WO2016115382A1 SEQ ID NO: 21 |
| AAV11 | 1147 | WO2016115382A1 SEQ ID NO: 22 |
| AAV12 | 1148 | WO2016115382A1 SEQ ID NO: 23 |
| rh32 | 1149 | WO2016115382A1 SEQ ID NO: 25 |
| rh33 | 1150 | WO2016115382A1 SEQ ID NO: 26 |
| rh34 | 1151 | WO2016115382A1 SEQ ID NO: 27 |
| rAAV4 | 1152 | WO2016115382A1 SEQ ID NO: 28 |
| rAAV4 | 1153 | WO2016115382A1 SEQ ID NO: 29 |
| rAAV4 | 1154 | WO2016115382A1 SEQ ID NO: 30 |
| rAAV4 | 1155 | WO2016115382A1 SEQ ID NO: 31 |
| rAAV4 | 1156 | WO2016115382A1 SEQ ID NO: 32 |
| rAAV4 | 1157 | WO2016115382A1 SEQ ID NO: 33 |
| AAV2/8 | 1158 | WO2016131981A1 SEQ ID NO: 47 |
| AAV2/8 | 1159 | WO2016131981A1 SEQ ID NO: 48 |
| ancestral AAV | 1160 | WO2016154344A1 SEQ ID NO: 7 |
| ancestral AAV variant C4 | 1161 | WO2016154344A1 SEQ ID NO: 13 |
| ancestral AAV variant C7 | 1162 | WO2016154344A1 SEQ ID NO: 14 |
| ancestral AAV variant G4 | 1163 | WO2016154344A1 SEQ ID NO: 15 |
| consensus amino acid sequence | 1164 | WO2016154344A1 SEQ ID NO: 16 |
| of ancestral AAV variants, C4, | | |
| C7 and G4 | | |
| consensus amino acid sequence | 1165 | WO2016154344A1 SEQ ID NO: 17 |
| of ancestral AAV variants, C4 | | |
| and C7 | | |
| AAV8 (with a AAV2 | 1166 | WO2016150403A1 SEQ ID NO: 13 |
| phospholipase domain) | | |
| AAV VR-942n | 1167 | US20160289275A1 SEQ ID NO: 10 |
| AAV5-A (M569V) | 1168 | US20160289275A1 SEQ ID NO: 13 |
| AAV5-A (M569V) | 1169 | US20160289275A1 SEQ ID NO: 14 |
| AAV5-A (Y585V) | 1170 | US20160289275A1 SEQ ID NO: 16 |
| AAV5-A (Y585V) | 1171 | US20160289275A1 SEQ ID NO: 17 |
| AAV5-A (L587T) | 1172 | US20160289275A1 SEQ ID NO: 19 |
| AAV5-A (L587T) | 1173 | US20160289275A1 SEQ ID NO: 20 |
| AAV5-A (Y585V/L587T) | 1174 | US20160289275A1 SEQ ID NO: 22 |
| AAV5-A (Y585V7L587T) | 1175 | US20160289275A1 SEQ ID NO: 23 |
| AAV5-B (D652A) | 1176 | US20160289275A1 SEQ ID NO: 25 |
| AAV5-B (D652A) | 1177 | US20160289275A1 SEQ ID NO: 26 |
| AAV5-B (T362M) | 1178 | US20160289275A1 SEQ ID NO: 28 |
| AAV5-B (T362M) | 1179 | US20160289275A1 SEQ ID NO: 29 |
| AAV5-B (Q359D) | 1180 | US20160289275A1 SEQ ID NO: 31 |
| AAV5-B (Q359D) | 1181 | US20160289275A1 SEQ ID NO: 32 |
| AAV5-B (E350Q) | 1182 | US20160289275A1 SEQ ID NO: 34 |
| AAV5-B (E350Q) | 1183 | US20160289275A1 SEQ ID NO: 35 |
| AAV5-B (P533S) | 1184 | US20160289275A1 SEQ ID NO: 37 |
| AAV5-B (P533S) | 1185 | US20160289275A1 SEQ ID NO: 38 |
| AAV5-B (P533G) | 1186 | US20160289275A1 SEQ ID NO: 40 |
| AAV5-B (P533G) | 1187 | US20160289275A1 SEQ ID NO: 41 |
| AAV5-mutation in loop VII | 1188 | US20160289275A1 SEQ ID NO: 43 |
| AAV5 -mutation in loop VII | 1189 | US20160289275A1 SEQ ID NO: 44 |
| AAV8 | 1190 | US20160289275A1 SEQ ID NO: 47 |
| Mut A (LK03/AAV8) | 1191 | WO2016181123A1 SEQ ID NO: 1 |
| Mut B (LK03/AAV5) | 1192 | WO2016181123A1 SEQ ID NO: 2 |
| Mut C (AAV8/AAV3B) | 1193 | WO2016181123A1 SEQ ID NO: 3 |
| Mut D (AAV5/AAV3B) | 1194 | WO2016181123A1 SEQ ID NO: 4 |
| Mut E (AAV8/AAV3B) | 1195 | WO2016181123A1 SEQ ID NO: 5 |
| Mut F (AAV3B/AAV8) | 1196 | WO2016181123A1 SEQ ID NO: 6 |
| AAV44.9 | 1197 | WO2016183297A1 SEQ ID NO: 4 |
| AAV44.9 | 1198 | WO2016183297A1 SEQ ID NO: 5 |
| AAVrh8 | 1199 | WO2016183297A1 SEQ ID NO: 6 |
| AAV44.9 (S470N) | 1200 | WO2016183297A1 SEQ ID NO: 9 |
| rh74 VP1 | 1201 | US20160375110A1 SEQ ID NO: 1 |
| AAV-LK03 (L125I) | 1202 | WO2017015102A1 SEQ ID NO: 5 |
| AAV3B (S663V + T492V) | 1203 | WO2017015102A1 SEQ ID NO: 6 |
| Anc80 | 1204 | WO2017019994A2 SEQ ID NO: 1 |
| Anc80 | 1205 | WO2017019994A2 SEQ ID NO: 2 |
| Anc81 | 1206 | WO2017019994A2 SEQ ID NO: 3 |
| Anc81 | 1207 | WO2017019994A2 SEQ ID NO: 4 |
| Anc82 | 1208 | WO2017019994A2 SEQ ID NO: 5 |
| Anc82 | 1209 | WO2017019994A2 SEQ ID NO: 6 |
| Anc83 | 1210 | WO2017019994A2 SEQ ID NO: 7 |
| Anc83 | 1211 | WO2017019994A2 SEQ ID NO: 8 |
| Anc84 | 1212 | WO2017019994A2 SEQ ID NO: 9 |
| Anc84 | 1213 | WO2017019994A2 SEQ ID NO: 10 |
| Anc94 | 1214 | WO2017019994A2 SEQ ID NO: 11 |
| Anc94 | 1215 | WO2017019994A2 SEQ ID NO: 12 |
| Anc113 | 1216 | WO2017019994A2 SEQ ID NO: 13 |
| Anc13 | 1217 | WO2017019994A2 SEQ ID NO: 14 |
| Anc126 | 1218 | WO2017019994A2 SEQ ID NO: 15 |
| Anc126 | 1219 | WO2017019994A2 SEQ ID NO: 16 |
| Anc127 | 1220 | WO2017019994A2 SEQ ID NO: 17 |
| Anc127 | 1221 | WO2017019994A2 SEQ ID NO: 18 |
| Anc80L27 | 1222 | WO2017019994A2 SEQ ID NO: 19 |
| Anc80L59 | 1223 | WO2017019994A2 SEQ ID NO: 20 |
| Anc80L60 | 1224 | WO2017019994A2 SEQ ID NO: 21 |
| Anc80L62 | 1225 | WO2017019994A2 SEQ ID NO: 22 |
| Anc80L65 | 1226 | WO2017019994A2 SEQ ID NO: 23 |
| Anc80L33 | 1227 | WO2017019994A2 SEQ ID NO: 24 |
| Anc80L36 | 1228 | WO2017019994A2 SEQ ID NO: 25 |
| Anc80L44 | 1229 | WO2017019994A2 SEQ ID NO: 26 |
| Anc80L1 | 1230 | WO2017019994A2 SEQ ID NO: 35 |
| Anc80L1 | 1231 | WO2017019994A2 SEQ ID NO: 36 |
| AAVrh10 | 1232 | WO2017019994A2 SEQ ID NO: 41 |
| Anc110 | 1233 | WO2017019994A2 SEQ ID NO: 42 |
| Anc110 | 1234 | WO2017019994A2 SEQ ID NO: 43 |
| AAVrh32.33 | 1235 | WO2017019994A2 SEQ ID NO: 45 |
| AAVrh74 | 1236 | WO2017049031A1 SEQ ID NO: 1 |
| AAV2 | 1237 | WO2017053629A2 SEQ ID NO: 49 |
| AAV2 | 1238 | WO2017053629A2 SEQ ID NO: 50 |
| AAV2 | 1239 | WO2017053629A2 SEQ ID NO: 82 |
| Parvo-like virus | 1240 | WO2017070476A2 SEQ ID NO: 1 |
| Parvo-like virus | 1241 | WO2017070476A2 SEQ ID NO: 2 |
| Parvo-like virus | 1242 | WO2017070476A2 SEQ ID NO: 3 |
| Parvo-like virus | 1243 | WO2017070476A2 SEQ ID NO: 4 |
| Parvo-like virus | 1244 | WO2017070476A2 SEQ ID NO: 5 |
| Parvo-like virus | 1245 | WO2017070476A2 SEQ ID NO: 6 |
| AAVrh.10 | 1246 | WO2017070516A1 SEQ ID NO: 7 |
| AAVrh.10 | 1247 | WO2017070516A1 SEQ ID NO: 14 |
| AAV2tYF | 1248 | WO2017070491A1 SEQ ID NO: 1 |
| AAV-SPK | 1249 | WO2017075619A1 SEQ ID NO: 28 |
| AAV2.5 | 1250 | US20170128528A1 SEQ ID NO: 13 |
| AAV1.1 | 1251 | US20170128528A1 SEQ ID NO: 15 |
| AAV6.1 | 1252 | US20170128528A1 SEQ ID NO: 17 |
| AAV6.3.1 | 1253 | US20170128528A1 SEQ ID NO: 18 |
| AAV2i8 | 1254 | US20170128528A1 SEQ ID NO: 28 |
| AAV2i8 | 1255 | US20170128528A1 SEQ ID NO: 29 |
| ttAAV | 1256 | US20170128528A1 SEQ ID NO: 30 |
| ttAAV-S312N | 1257 | US20170128528A1 SEQ ID NO: 32 |
| ttAAV-S312N | 1258 | US20170128528A1 SEQ ID NO: 33 |
| AAV6 (Y705, Y731, and T492) | 1259 | WO2016134337A1 SEQ ID NO: 24 |
| AAV2 | 1260 | WO2016134375A1 SEQ ID NO: 9 |
| AAV2 | 1261 | WO2016134375A1 SEQ ID NO: 10 |
| AAV2 variant | 2322 | WO2018071831 SEQ ID NO: 1 |
| AAV2 variant | 2323 | WO2018071831 SEQ ID NO: 2 |
| AAV2 variant | 2324 | WO2018071831 SEQ ID NO: 3 |
| AAV2 variant | 2325 | WO2018071831 SEQ ID NO: 4 |
| AAV2 variant | 2326 | WO2018071831 SEQ ID NO: 5 |
| AAV2 variant | 2327 | WO2018071831 SEQ ID NO: 6 |
| AAV2 variant | 2328 | WO2018071831 SEQ ID NO: 7 |
| AAV2 variant | 2329 | WO2018071831 SEQ ID NO: 8 |
| AAV2 variant | 2330 | WO2018071831 SEQ ID NO: 9 |
| AAV2 variant | 2331 | WO2018071831 SEQ ID NO: 10 |
| AAV2 variant | 2332 | WO2018071831 SEQ ID NO: 11 |
| AAV2 variant | 2333 | WO2018071831 SEQ ID NO: 12 |
| AAV2 variant | 2334 | WO2018071831 SEQ ID NO: 13 |
| AAV2 variant | 2335 | WO2018071831 SEQ ID NO: 14 |
| AAV2 variant | 2336 | WO2018071831 SEQ ID NO: 15 |
| AAV2 variant | 2337 | WO2018071831 SEQ ID NO: 16 |
| AAV2 variant | 2338 | WO2018071831 SEQ ID NO: 17 |
| AAV2 variant | 2339 | WO2018071831 SEQ ID NO: 18 |
| AAV2 variant | 2340 | WO2018071831 SEQ ID NO: 19 |
| AAV2 variant | 2341 | WO2018071831 SEQ ID NO: 20 |
| AAV2 variant | 2342 | WO2018071831 SEQ ID NO: 21 |
| AAV2 variant | 2343 | WO2018071831 SEQ ID NO: 22 |
| AAV2 variant | 2344 | WO2018071831 SEQ ID NO: 23 |
| AAV2 variant | 2345 | WO2018071831 SEQ ID NO: 24 |
| AAV2 variant | 2346 | WO2018071831 SEQ ID NO: 25 |
| AAV2 variant | 2347 | WO2018071831 SEQ ID NO: 26 |
| AAV2 variant | 2348 | WO2018071831 SEQ ID NO: 27 |
| AAV2 variant | 2349 | WO2018071831 SEQ ID NO: 28 |
| AAV2 variant | 2350 | WO2018071831 SEQ ID NO: 29 |
| AAV2 variant | 2351 | WO2018071831 SEQ ID NO: 30 |
| AAV2 variant | 2352 | WO2018071831 SEQ ID NO: 31 |
| AAV2 variant | 2353 | WO2018071831 SEQ ID NO: 32 |
| AAV2 variant | 2354 | WO2018071831 SEQ ID NO: 33 |
| AAV2 variant | 2355 | WO2018071831 SEQ ID NO: 34 |
| AAV2 variant | 2356 | WO2018071831 SEQ ID NO: 35 |
| AAV2 variant | 2357 | WO2018071831 SEQ ID NO: 36 |
| AAV2 variant | 2358 | WO2018071831 SEQ ID NO: 37 |
| AAV2 variant | 2359 | WO2018071831 SEQ ID NO: 38 |
| AAV2 variant | 2360 | WO2018071831 SEQ ID NO: 39 |
| AAV2 variant | 2361 | WO2018071831 SEQ ID NO: 40 |
| AAV2 variant | 2362 | WO2018071831 SEQ ID NO: 41 |
| AAV2 variant | 2363 | WO2018071831 SEQ ID NO: 42 |
| AAV2 variant | 2364 | WO2018071831 SEQ ID NO: 43 |
| AAV2 variant | 2365 | WO2018071831 SEQ ID NO: 44 |
| AAV2 variant | 2366 | WO2018071831 SEQ ID NO: 45 |
| AAV2 variant | 2367 | WO2018071831 SEQ ID NO: 46 |
| AAV2 variant | 2368 | WO2018071831 SEQ ID NO: 47 |
| AAV2 variant | 2369 | WO2018071831 SEQ ID NO: 48 |
| AAV2 variant | 2370 | WO2018071831 SEQ ID NO: 49 |
| AAV2 variant | 2371 | WO2018071831 SEQ ID NO: 50 |
| AAV2 variant | 2372 | WO2018071831 SEQ ID NO: 51 |
| AAV2 variant | 2373 | WO2018071831 SEQ ID NO: 52 |
| AAV2 variant | 2374 | WO2018071831 SEQ ID NO: 53 |
| AAV2 variant | 2375 | WO2018071831 SEQ ID NO: 54 |
| AAV2 variant | 2376 | WO2018071831 SEQ ID NO: 55 |
| AAV2 variant | 2377 | WO2018071831 SEQ ID NO: 56 |
| AAV2 variant | 2378 | WO2018071831 SEQ ID NO: 57 |
| AAV2 variant | 2379 | WO2018071831 SEQ ID NO: 58 |
| AAV2 variant | 2380 | WO2018071831 SEQ ID NO: 59 |
| AAV2 variant | 2381 | WO2018071831 SEQ ID NO: 60 |
| AAV2 variant | 2382 | WO2018071831 SEQ ID NO: 61 |
| AAV2 variant | 2383 | WO2018071831 SEQ ID NO: 62 |
| AAV2 variant | 2384 | WO2018071831 SEQ ID NO: 63 |
| AAV2 variant | 2385 | WO2018071831 SEQ ID NO: 64 |
| AAV2 variant | 2386 | WO2018071831 SEQ ID NO: 65 |
| AAV2 variant | 2387 | WO2018071831 SEQ ID NO: 66 |
| AAV2 variant | 2388 | WO2018071831 SEQ ID NO: 67 |
| AAV2 variant | 2389 | WO2018071831 SEQ ID NO: 68 |
| AAV2 variant | 2390 | WO2018071831 SEQ ID NO: 69 |
| AAV2 variant | 2391 | WO2018071831 SEQ ID NO: 70 |
| AAV2 variant | 2392 | WO2018071831 SEQ ID NO: 71 |
| AAV2 variant | 2393 | WO2018071831 SEQ ID NO: 72 |
| AAV2 variant | 2394 | WO2018071831 SEQ ID NO: 73 |
| AAV2 variant | 2395 | WO2018071831 SEQ ID NO: 74 |
| AAV2 variant | 2396 | WO2018071831 SEQ ID NO: 75 |
| AAV2 variant | 2397 | WO2018071831 SEQ ID NO: 76 |
| AAV2 variant | 2398 | WO2018071831 SEQ ID NO: 77 |
| AAV2 variant | 2399 | WO2018071831 SEQ ID NO: 78 |
| AAV2 variant | 2400 | WO2018071831 SEQ ID NO: 79 |
| AAV2 variant | 2401 | WO2018071831 SEQ ID NO: 80 |
| AAV2 variant | 2402 | WO2018071831 SEQ ID NO: 81 |
| AAV2 variant | 2403 | WO2018071831 SEQ ID NO: 82 |
| AAV2 variant | 2404 | WO2018071831 SEQ ID NO: 83 |
| AAV2 variant | 2405 | WO2018071831 SEQ ID NO: 84 |
| AAV2 variant | 2406 | WO2018071831 SEQ ID NO: 85 |
| AAV2 variant | 2407 | WO2018071831 SEQ ID NO: 86 |
| AAV2 variant | 2408 | WO2018071831 SEQ ID NO: 87 |
| AAV2 variant | 2409 | WO2018071831 SEQ ID NO: 88 |
| AAV2 variant | 2410 | WO2018071831 SEQ ID NO: 89 |
| AAV2 variant | 2411 | WO2018071831 SEQ ID NO: 90 |
| AAV2 variant | 2412 | WO2018071831 SEQ ID NO: 91 |
| AAV2 variant | 2413 | WO2018071831 SEQ ID NO: 92 |
| AAV2 variant | 2414 | WO2018071831 SEQ ID NO: 93 |
| AAV2 variant | 2415 | WO2018071831 SEQ ID NO: 94 |
| AAV2 variant | 2416 | WO2018071831 SEQ ID NO: 95 |
| AAV2 variant | 2417 | WO2018071831 SEQ ID NO: 96 |
| AAV2 variant | 2418 | WO2018071831 SEQ ID NO: 97 |
| AAV2 variant | 2419 | WO2018071831 SEQ ID NO: 98 |
| AAV2 variant | 2420 | WO2018071831 SEQ ID NO: 99 |
| AAV2 variant | 2421 | WO2018071831 SEQ ID NO: 100 |
| AAV2 variant | 2422 | WO2018071831 SEQ ID NO: 101 |
| AAV2 variant | 2423 | WO2018071831 SEQ ID NO: 102 |
| AAV2 variant | 2424 | WO2018071831 SEQ ID NO: 103 |
| AAV2 variant | 2425 | WO2018071831 SEQ ID NO: 104 |
| AAV2 variant | 2426 | WO2018071831 SEQ ID NO: 105 |
| AAV2 variant | 2427 | WO2018071831 SEQ ID NO: 106 |
| AAV2 variant | 2428 | WO2018071831 SEQ ID NO: 107 |
| AAV2 variant | 2429 | WO2018071831 SEQ ID NO: 108 |
| AAV2 variant | 2430 | WO2018071831 SEQ ID NO: 109 |
| AAV2 variant | 2431 | WO2018071831 SEQ ID NO: 110 |
| AAV2 variant | 2432 | WO2018071831 SEQ ID NO: 111 |
| AAV2 variant | 2433 | WO2018071831 SEQ ID NO: 112 |
| AAV2 variant | 2434 | WO2018071831 SEQ ID NO: 113 |
| AAV2 variant | 2435 | WO2018071831 SEQ ID NO: 114 |
| AAV2 variant | 2436 | WO2018071831 SEQ ID NO: 115 |
| AAV2 variant | 2437 | WO2018071831 SEQ ID NO: 116 |
| AAV2 variant | 2438 | WO2018071831 SEQ ID NO: 117 |
| AAV2 variant | 2439 | WO2018071831 SEQ ID NO: 118 |
| AAV2 variant | 2440 | WO2018071831 SEQ ID NO: 119 |
| AAV2 variant | 2441 | WO2018071831 SEQ ID NO: 120 |
| AAV2 variant | 2442 | WO2018071831 SEQ ID NO: 121 |
| AAV2 variant | 2443 | WO2018071831 SEQ ID NO: 122 |
| AAV2 variant | 2444 | WO2018071831 SEQ ID NO: 123 |
| AAV2 variant | 2445 | WO2018071831 SEQ ID NO: 124 |
| AAV2 variant | 2446 | WO2018071831 SEQ ID NO: 125 |
| AAV2 variant | 2447 | WO2018071831 SEQ ID NO: 126 |
| AAV2 variant | 2448 | WO2018071831 SEQ ID NO: 127 |
| AAV2 variant | 2449 | WO2018071831 SEQ ID NO: 128 |
| AAV2 variant | 2450 | WO2018071831 SEQ ID NO: 129 |
| AAV2 variant | 2451 | WO2018071831 SEQ ID NO: 130 |
| AAV2 variant | 2452 | WO2018071831 SEQ ID NO: 131 |
| AAV2 variant | 2453 | WO2018071831 SEQ ID NO: 132 |
| AAV2 variant | 2454 | WO2018071831 SEQ ID NO: 133 |
| AAV2 variant | 2455 | WO2018071831 SEQ ID NO: 134 |
| AAV2 variant | 2456 | WO2018071831 SEQ ID NO: 135 |
| AAV2 variant | 2457 | WO2018071831 SEQ ID NO: 136 |
| AAV2 variant | 2458 | WO2018071831 SEQ ID NO: 137 |
| AAV2 variant | 2459 | WO2018071831 SEQ ID NO: 138 |
| AAV2 variant | 2460 | WO2018071831 SEQ ID NO: 139 |
| AAV2 variant | 2461 | WO2018071831 SEQ ID NO: 140 |
| AAV2 variant | 2462 | WO2018071831 SEQ ID NO: 141 |
| AAV2 variant | 2463 | WO2018071831 SEQ ID NO: 142 |
| AAV2 variant | 2464 | WO2018071831 SEQ ID NO: 143 |
| AAV2 variant | 2465 | WO2018071831 SEQ ID NO: 144 |
| AAV2 variant | 2466 | WO2018071831 SEQ ID NO: 145 |
| AAV2 variant | 2467 | WO2018071831 SEQ ID NO: 146 |
| AAV2 variant | 2468 | WO2018071831 SEQ ID NO: 147 |
| AAV2 variant | 2469 | WO2018071831 SEQ ID NO: 148 |
| AAV2 variant | 2470 | WO2018071831 SEQ ID NO: 149 |
| AAV2 variant | 2471 | WO2018071831 SEQ ID NO: 150 |
| AAV2 variant | 2472 | WO2018071831 SEQ ID NO: 151 |
| AAV2 variant | 2473 | WO2018071831 SEQ ID NO: 152 |
| AAV2 variant | 2474 | WO2018071831 SEQ ID NO: 153 |
| AAV2 variant | 2475 | WO2018071831 SEQ ID NO: 154 |
| AAV2 variant | 2476 | WO2018071831 SEQ ID NO: 155 |
| AAV2 variant | 2477 | WO2018071831 SEQ ID NO: 156 |
| AAV2 variant | 2478 | WO2018071831 SEQ ID NO: 157 |
| AAV2 variant | 2479 | WO2018071831 SEQ ID NO: 158 |
| AAV2 variant | 2480 | WO2018071831 SEQ ID NO: 159 |
| AAV2 variant | 2481 | WO2018071831 SEQ ID NO: 160 |
| AAV2 variant | 2482 | WO2018071831 SEQ ID NO: 161 |
| AAV2 variant | 2483 | WO2018071831 SEQ ID NO: 162 |
| AAV2 variant | 2484 | WO2018071831 SEQ ID NO: 163 |
| AAV2 variant | 2485 | WO2018071831 SEQ ID NO: 164 |
| AAV2 variant | 2486 | WO2018071831 SEQ ID NO: 165 |
| AAV2 variant | 2487 | WO2018071831 SEQ ID NO: 166 |
| AAV2 variant | 2488 | WO2018071831 SEQ ID NO: 167 |
| AAV2 variant | 2489 | WO2018071831 SEQ ID NO: 168 |
| AAV2 variant | 2490 | WO2018071831 SEQ ID NO: 169 |
| AAV2 variant | 2491 | WO2018071831 SEQ ID NO: 170 |
| AAV2 variant | 2492 | WO2018071831 SEQ ID NO: 171 |
| AAV2 variant | 2493 | WO2018071831 SEQ ID NO: 172 |
| AAV2 variant | 2494 | WO2018071831 SEQ ID NO: 173 |
| AAV2 variant | 2495 | WO2018071831 SEQ ID NO: 174 |
| AAV2 variant | 2496 | WO2018071831 SEQ ID NO: 175 |
| AAV2 variant | 2497 | WO2018071831 SEQ ID NO: 176 |
| AAV2 variant | 2498 | WO2018071831 SEQ ID NO: 177 |
| AAV2 variant | 2499 | WO2018071831 SEQ ID NO: 178 |
| AAV2 variant | 2500 | WO2018071831 SEQ ID NO: 179 |
| AAV2 variant | 2501 | WO2018071831 SEQ ID NO: 180 |
| AAV2 variant | 2502 | WO2018071831 SEQ ID NO: 181 |
| AAV2 variant | 2503 | WO2018071831 SEQ ID NO: 182 |
| AAV2 variant | 2504 | WO2018071831 SEQ ID NO: 183 |
| AAV2 variant | 2505 | WO2018071831 SEQ ID NO: 184 |
| AAV2 variant | 2506 | WO2018071831 SEQ ID NO: 185 |
| AAV2 variant | 2507 | WO2018071831 SEQ ID NO: 186 |
| AAV2 variant | 2508 | WO2018071831 SEQ ID NO: 187 |
| AAV2 variant | 2509 | WO2018071831 SEQ ID NO: 188 |
| AAV2 variant | 2510 | WO2018071831 SEQ ID NO: 189 |
| AAV2 variant | 2511 | WO2018071831 SEQ ID NO: 190 |
| AAV2 variant | 2512 | WO2018071831 SEQ ID NO: 191 |
| AAV2 variant | 2513 | WO2018071831 SEQ ID NO: 192 |
| AAV2 variant | 2514 | WO2018071831 SEQ ID NO: 193 |
| AAV2 variant | 2515 | WO2018071831 SEQ ID NO: 194 |
| AAV2 variant | 2516 | WO2018071831 SEQ ID NO: 195 |
| AAV2 variant | 2517 | WO2018071831 SEQ ID NO: 196 |
| AAV2 variant | 2518 | WO2018071831 SEQ ID NO: 197 |
| AAV2 variant | 2519 | WO2018071831 SEQ ID NO: 198 |
| AAV2 variant | 2520 | WO2018071831 SEQ ID NO: 199 |
| AAV2 variant | 2521 | WO2018071831 SEQ ID NO: 200 |
| AAV2 variant | 2522 | WO2018071831 SEQ ID NO: 201 |
| AAV2 variant | 2523 | WO2018071831 SEQ ID NO: 202 |
| AAV2 variant | 2524 | WO2018071831 SEQ ID NO: 203 |
| AAV2 variant | 2525 | WO2018071831 SEQ ID NO: 204 |
| AAV2 variant | 2526 | WO2018071831 SEQ ID NO: 205 |
| AAV2 variant | 2527 | WO2018071831 SEQ ID NO: 206 |
| AAV2 variant | 2528 | WO2018071831 SEQ ID NO: 207 |
| AAV2 variant | 2529 | WO2018071831 SEQ ID NO: 208 |
| AAV2 variant | 2530 | WO2018071831 SEQ ID NO: 209 |
| AAV2 variant | 2531 | WO2018071831 SEQ ID NO: 210 |
| AAV2 variant | 2532 | WO2018071831 SEQ ID NO: 211 |
| AAV2 variant | 2533 | WO2018071831 SEQ ID NO: 212 |
| AAV2 variant | 2534 | WO2018071831 SEQ ID NO: 213 |
| AAV2 variant | 2535 | WO2018071831 SEQ ID NO: 214 |
| AAV2 variant | 2536 | WO2018071831 SEQ ID NO: 215 |
| AAV2 variant | 2537 | WO2018071831 SEQ ID NO: 216 |
| AAV2 variant | 2538 | WO2018071831 SEQ ID NO: 217 |
| AAV2 variant | 2539 | WO2018071831 SEQ ID NO: 218 |
| AAV2 variant | 2540 | WO2018071831 SEQ ID NO: 219 |
| AAV2 variant | 2541 | WO2018071831 SEQ ID NO: 220 |
| AAV2 variant | 2542 | WO2018071831 SEQ ID NO: 221 |
| AAV2 variant | 2543 | WO2018071831 SEQ ID NO: 222 |
| AAV2 variant | 2544 | WO2018071831 SEQ ID NO: 223 |
| AAV2 variant | 2545 | WO2018071831 SEQ ID NO: 224 |
| AAV2 variant | 2546 | WO2018071831 SEQ ID NO: 225 |
| AAV2 variant | 2547 | WO2018071831 SEQ ID NO: 226 |
| AAV2 variant | 2548 | WO2018071831 SEQ ID NO: 227 |
| AAV2 variant | 2549 | WO2018071831 SEQ ID NO: 228 |
| AAV2 variant | 2550 | WO2018071831 SEQ ID NO: 229 |
| AAV2 variant | 2551 | WO2018071831 SEQ ID NO: 230 |
| AAV2 variant | 2552 | WO2018071831 SEQ ID NO: 231 |
| AAV2 variant | 2553 | WO2018071831 SEQ ID NO: 232 |
| AAV2 variant | 2554 | WO2018071831 SEQ ID NO: 233 |
| AAV2 variant | 2555 | WO2018071831 SEQ ID NO: 234 |
| AAV2 variant | 2556 | WO2018071831 SEQ ID NO: 235 |
| AAV2 variant | 2557 | WO2018071831 SEQ ID NO: 236 |
| AAV2 variant | 2558 | WO2018071831 SEQ ID NO: 237 |
| AAV2 variant | 2559 | WO2018071831 SEQ ID NO: 238 |
| AAV2 variant | 2560 | WO2018071831 SEQ ID NO: 239 |
| AAV2 variant | 2561 | WO2018071831 SEQ ID NO: 240 |
| AAV2 variant | 2562 | WO2018071831 SEQ ID NO: 241 |
| AAV2 variant | 2563 | WO2018071831 SEQ ID NO: 242 |
| AAV2 variant | 2564 | WO2018071831 SEQ ID NO: 243 |
| AAV2 variant | 2565 | WO2018071831 SEQ ID NO: 244 |
| AAV2 variant | 2566 | WO2018071831 SEQ ID NO: 245 |
| AAV2 variant | 2567 | WO2018071831 SEQ ID NO: 246 |
| AAV2 variant | 2568 | WO2018071831 SEQ ID NO: 247 |
| AAV2 variant | 2569 | WO2018071831 SEQ ID NO: 248 |
| AAV2 variant | 2570 | WO2018071831 SEQ ID NO: 249 |
| AAV2 variant | 2571 | WO2018071831 SEQ ID NO: 250 |
| AAV2 variant | 2572 | WO2018071831 SEQ ID NO: 251 |
| AAV2 variant | 2573 | WO2018071831 SEQ ID NO: 252 |
| AAV2 variant | 2574 | WO2018071831 SEQ ID NO: 253 |
| AAV2 variant | 2575 | WO2018071831 SEQ ID NO: 254 |
| AAV2 variant | 2576 | WO2018071831 SEQ ID NO: 255 |
| AAV2 variant | 2577 | WO2018071831 SEQ ID NO: 256 |
| AAV2 variant | 2578 | WO2018071831 SEQ ID NO: 257 |
| AAV2 variant | 2579 | WO2018071831 SEQ ID NO: 258 |
| AAV2 variant | 2580 | WO2018071831 SEQ ID NO: 259 |
| AAV2 variant | 2584 | WO2018071831 SEQ ID NO: 260 |
| AAV2 variant | 2582 | WO2018071831 SEQ ID NO: 261 |
| AAV2 variant | 2583 | WO2018071831 SEQ ID NO: 262 |
| AAV2 variant | 2584 | WO2018071831 SEQ ID NO: 263 |
| AAV2 variant | 2585 | WO2018071831 SEQ ID NO: 264 |
| AAV2 variant | 2586 | WO2018071831 SEQ ID NO: 265 |
| AAV2 variant | 2587 | WO2018071831 SEQ ID NO: 266 |
| AAV2 variant | 2588 | WO2018071831 SEQ ID NO: 267 |
| AAV2 variant | 2589 | WO2018071831 SEQ ID NO: 268 |
| AAV2 variant | 2590 | WO2018071831 SEQ ID NO: 269 |
| AAV2 variant | 2591 | WO2018071831 SEQ ID NO: 270 |
| AAV2 variant | 2592 | WO2018071831 SEQ ID NO: 271 |
| AAV2 variant | 2593 | WO2018071831 SEQ ID NO: 272 |
| AAV2 variant | 2594 | WO2018071831 SEQ ID NO: 273 |
| AAV2 variant | 2595 | WO2018071831 SEQ ID NO: 274 |
| AAV2 variant | 2596 | WO2018071831 SEQ ID NO: 275 |
| AAV2 variant | 2597 | WO2018071831 SEQ ID NO: 276 |
| AAV2 variant | 2598 | WO2018071831 SEQ ID NO: 277 |
| AAV2 variant | 2599 | WO2018071831 SEQ ID NO: 278 |
| AAV2 variant | 2600 | WO2018071831 SEQ ID NO: 279 |
| AAV2 variant | 2601 | WO2018071831 SEQ ID NO: 280 |
| AAV2 variant | 2602 | WO2018071831 SEQ ID NO: 281 |
| AAV2 variant | 2603 | WO2018071831 SEQ ID NO: 282 |
| AAV2 variant | 2604 | WO2018071831 SEQ ID NO: 283 |
| AAV2 variant | 2605 | WO2018071831 SEQ ID NO: 284 |
| AAV2 variant | 2606 | WO2018071831 SEQ ID NO: 285 |
| AAV2 variant | 2607 | WO2018071831 SEQ ID NO: 286 |
| AAV2 variant | 2608 | WO2018071831 SEQ ID NO: 287 |
| AAV2 variant | 2609 | WO2018071831 SEQ ID NO: 288 |
| AAV2 variant | 2610 | WO2018071831 SEQ ID NO: 289 |
| AAV2 variant | 2611 | WO2018071831 SEQ ID NO: 290 |
| AAV2 variant | 2612 | WO2018071831 SEQ ID NO: 291 |
| AAV2 variant | 2613 | WO2018071831 SEQ ID NO: 292 |
| AAV2 variant | 2614 | WO2018071831 SEQ ID NO: 293 |
| AAV2 variant | 2615 | WO2018071831 SEQ ID NO: 294 |
| AAV2 variant | 2616 | WO2018071831 SEQ ID NO: 295 |
| AAV2 variant | 2617 | WO2018071831 SEQ ID NO: 296 |
| AAV2 variant | 2618 | WO2018071831 SEQ ID NO: 297 |
| AAV2 variant | 2619 | WO2018071831 SEQ ID NO: 298 |
| AAV2 variant | 2620 | WO2018071831 SEQ ID NO: 299 |
| AAV2 variant | 2621 | WO2018071831 SEQ ID NO: 300 |
| AAV2 variant | 2622 | WO2018071831 SEQ ID NO: 301 |
| AAV2 variant | 2623 | WO2018071831 SEQ ID NO: 302 |
| AAV2 variant | 2624 | WO2018071831 SEQ ID NO: 303 |
| AAV2 variant | 2625 | WO2018071831 SEQ ID NO: 304 |
| AAV2 variant | 2626 | WO2018071831 SEQ ID NO: 305 |
| AAV2 variant | 2627 | WO2018071831 SEQ ID NO: 306 |
| AAV2 variant | 2628 | WO2018071831 SEQ ID NO: 307 |
| AAV2 variant | 2629 | WO2018071831 SEQ ID NO: 308 |
| AAV2 variant | 2630 | WO2018071831 SEQ ID NO: 309 |
| AAV2 variant | 2631 | WO2018071831 SEQ ID NO: 310 |
| AAV2 variant | 2632 | WO2018071831 SEQ ID NO: 311 |
| AAV2 variant | 2633 | WO2018071831 SEQ ID NO: 312 |
| AAV2 variant | 2634 | WO2018071831 SEQ ID NO: 313 |
| AAV2 variant | 2635 | WO2018071831 SEQ ID NO: 314 |
| AAV2 variant | 2636 | WO2018071831 SEQ ID NO: 315 |
| AAV2 variant | 2637 | WO2018071831 SEQ ID NO: 316 |
| AAV2 variant | 2638 | WO2018071831 SEQ ID NO: 317 |
| AAV2 variant | 2639 | WO2018071831 SEQ ID NO: 318 |
| AAV2 variant | 2640 | WO2018071831 SEQ ID NO: 319 |
| AAV2 variant | 2641 | WO2018071831 SEQ ID NO: 320 |
| AAV2 variant | 2642 | WO2018071831 SEQ ID NO: 321 |
| AAV2 variant | 2643 | WO2018071831 SEQ ID NO: 322 |
| AAV2 variant | 2644 | WO2018071831 SEQ ID NO: 323 |
| AAV2 variant | 2645 | WO2018071831 SEQ ID NO: 324 |
| AAV2 variant | 2646 | WO2018071831 SEQ ID NO: 325 |
| AAV2 variant | 2647 | WO2018071831 SEQ ID NO: 326 |
| AAV2 variant | 2648 | WO2018071831 SEQ ID NO: 327 |
| AAV2 variant | 2649 | WO2018071831 SEQ ID NO: 328 |
| AAV2 variant | 2650 | WO2018071831 SEQ ID NO: 329 |
| AAV2 variant | 2651 | WO2018071831 SEQ ID NO: 330 |
| AAV2 variant | 2652 | WO2018071831 SEQ ID NO: 331 |
| AAV2 variant | 2653 | WO2018071831 SEQ ID NO: 332 |
| AAV2 variant | 2654 | WO2018071831 SEQ ID NO: 333 |
| AAV2 variant | 2655 | WO2018071831 SEQ ID NO: 334 |
| AAV2 variant | 2656 | WO2018071831 SEQ ID NO: 335 |
| AAV2 variant | 2657 | WO2018071831 SEQ ID NO: 336 |
| AAV2 variant | 2658 | WO2018071831 SEQ ID NO: 337 |
| AAV2 variant | 2659 | WO2018071831 SEQ ID NO: 338 |
| AAV2 variant | 2660 | WO2018071831 SEQ ID NO: 339 |
| AAV2 variant | 2661 | WO2018071831 SEQ ID NO: 340 |
| AAV2 variant | 2662 | WO2018071831 SEQ ID NO: 341 |
| AAV2 variant | 2663 | WO2018071831 SEQ ID NO: 342 |
| AAV2 variant | 2664 | WO2018071831 SEQ ID NO: 343 |
| AAV2 variant | 2665 | WO2018071831 SEQ ID NO: 344 |
| AAV2 variant | 2666 | WO2018071831 SEQ ID NO: 345 |
| AAV2 variant | 2667 | WO2018071831 SEQ ID NO: 346 |
| AAV2 variant | 2668 | WO2018071831 SEQ ID NO: 347 |
| AAV2 variant | 2669 | WO2018071831 SEQ ID NO: 348 |
| AAV2 variant | 2670 | WO2018071831 SEQ ID NO: 349 |
| AAV2 variant | 2671 | WO2018071831 SEQ ID NO: 350 |
| AAV2 variant | 2672 | WO2018071831 SEQ ID NO: 351 |
| AAV2 variant | 2673 | WO2018071831 SEQ ID NO: 352 |
| AAV2 variant | 2674 | WO2018071831 SEQ ID NO: 353 |
| AAV2 variant | 2675 | WO2018071831 SEQ ID NO: 354 |
| AAV2 variant | 2676 | WO2018071831 SEQ ID NO: 355 |
| AAV2 variant | 2677 | WO2018071831 SEQ ID NO: 356 |
| AAV2 variant | 2678 | WO2018071831 SEQ ID NO: 357 |
| AAV2 variant | 2679 | WO2018071831 SEQ ID NO: 358 |
| AAV2 variant | 2680 | WO2018071831 SEQ ID NO: 359 |
| AAV2 variant | 2681 | WO2018071831 SEQ ID NO: 360 |
| AAV2 variant | 2682 | WO2018071831 SEQ ID NO: 361 |
| AAV2 variant | 2683 | WO2018071831 SEQ ID NO: 362 |
| AAV2 variant | 2684 | WO2018071831 SEQ ID NO: 363 |
| AAV2 variant | 2685 | WO2018071831 SEQ ID NO: 364 |
| AAV2 variant | 2686 | WO2018071831 SEQ ID NO: 365 |
| AAV2 variant | 2687 | WO2018071831 SEQ ID NO: 366 |
| AAV2 variant | 2688 | WO2018071831 SEQ ID NO: 367 |
| AAV2 variant | 2689 | WO2018071831 SEQ ID NO: 368 |
| AAV2 variant | 2690 | WO2018071831 SEQ ID NO: 369 |
| AAV2 variant | 2691 | WO2018071831 SEQ ID NO: 370 |
| AAV2 variant | 2692 | WO2018071831 SEQ ID NO: 371 |
| AAV2 variant | 2693 | WO2018071831 SEQ ID NO: 372 |
| AAV2 variant | 2694 | WO2018071831 SEQ ID NO: 373 |
| AAV2 variant | 2695 | WO2018071831 SEQ ID NO: 374 |
| AAV2 variant | 2696 | WO2018071831 SEQ ID NO: 375 |
| AAV2 variant | 2697 | WO2018071831 SEQ ID NO: 376 |
| AAV2 variant | 2698 | WO2018071831 SEQ ID NO: 377 |
| AAV2 variant | 2699 | WO2018071831 SEQ ID NO: 378 |
| AAV2 variant | 2700 | WO2018071831 SEQ ID NO: 379 |
| AAV2 variant | 2701 | WO2018071831 SEQ ID NO: 380 |
| AAV2 variant | 2702 | WO2018071831 SEQ ID NO: 381 |
| AAV2 variant | 2703 | WO2018071831 SEQ ID NO: 382 |
| AAV2 variant | 2704 | WO2018071831 SEQ ID NO: 383 |
| AAV2 variant | 2705 | WO2018071831 SEQ ID NO: 384 |
| AAV2 variant | 2706 | WO2018071831 SEQ ID NO: 385 |
| AAV2 variant | 2707 | WO2018071831 SEQ ID NO: 386 |
| AAV2 variant | 2708 | WO2018071831 SEQ ID NO: 387 |
| AAV2 variant | 2709 | WO2018071831 SEQ ID NO: 388 |
| AAV2 variant | 2710 | WO2018071831 SEQ ID NO: 389 |
| AAV2 variant | 2711 | WO2018071831 SEQ ID NO: 390 |
| AAV2 variant | 2712 | WO2018071831 SEQ ID NO: 391 |
| AAV2 variant | 2713 | WO2018071831 SEQ ID NO: 392 |
| AAV2 variant | 2714 | WO2018071831 SEQ ID NO: 393 |
| AAV2 variant | 2715 | WO2018071831 SEQ ID NO: 394 |
| AAV2 variant | 2716 | WO2018071831 SEQ ID NO: 395 |
| AAV2 variant | 2717 | WO2018071831 SEQ ID NO: 396 |
| AAV2 variant | 2718 | WO2018071831 SEQ ID NO: 397 |
| AAV2 variant | 2719 | WO2018071831 SEQ ID NO: 398 |
| AAV2 variant | 2720 | WO2018071831 SEQ ID NO: 399 |
| AAV2 variant | 2721 | WO2018071831 SEQ ID NO: 400 |
| AAV2 variant | 2722 | WO2018071831 SEQ ID NO: 401 |
| AAV2 variant | 2723 | WO2018071831 SEQ ID NO: 402 |
| AAV2 variant | 2724 | WO2018071831 SEQ ID NO: 403 |
| AAV2 variant | 2725 | WO2018071831 SEQ ID NO: 404 |
| AAV2 variant | 2726 | WO2018071831 SEQ ID NO: 405 |
| AAV2 variant | 2727 | WO2018071831 SEQ ID NO: 406 |
| AAV2 variant | 2728 | WO2018071831 SEQ ID NO: 407 |
| AAV2 variant | 2729 | WO2018071831 SEQ ID NO: 408 |
| AAV2 variant | 2730 | WO2018071831 SEQ ID NO: 409 |
| AAV2/3 variant | 2731 | WO2018071831 SEQ ID NO: 435 |
| AAV2/3 variant | 2732 | WO2018071831 SEQ ID NO: 436 |
| AAV2/3 variant | 2733 | WO2018071831 SEQ ID NO: 437 |
| AAV2/3 variant | 2734 | WO2018071831 SEQ ID NO: 438 |
| AAV2/3 variant | 2735 | WO2018071831 SEQ ID NO: 439 |
| AAV2/3 variant | 2736 | WO2018071831 SEQ ID NO: 440 |
| AAV2/3 variant | 2737 | WO2018071831 SEQ ID NO: 441 |
| AAV2/3 variant | 2738 | WO2018071831 SEQ ID NO: 442 |
| AAV2/3 variant | 2739 | WO2018071831 SEQ ID NO: 443 |
| AAV2/3 variant | 2740 | WO2018071831 SEQ ID NO: 444 |
| AAV2/3 variant | 2744 | WO2018071831 SEQ ID NO: 445 |
| AAV2/3 variant | 2742 | WO2018071831 SEQ ID NO: 446 |
| AAV2/3 variant | 2743 | WO2018071831 SEQ ID NO: 447 |
| AAV2/3 variant | 2744 | WO2018071831 SEQ ID NO: 448 |
| AAV2/3 variant | 2745 | WO2018071831 SEQ ID NO: 449 |
| AAV2/3 variant | 2746 | WO2018071831 SEQ ID NO: 450 |
| AAV2/3 variant | 2747 | WO2018071831 SEQ ID NO: 451 |
| AAV2/3 variant | 2748 | WO2018071831 SEQ ID NO: 452 |
| AAV2/3 variant | 2749 | WO2018071831 SEQ ID NO: 453 |
| AAV2/3 variant | 2750 | WO2018071831 SEQ ID NO: 454 |
| AAV2/3 variant | 2751 | WO2018071831 SEQ ID NO: 455 |
| AAV2/3 variant | 2752 | WO2018071831 SEQ ID NO: 456 |
| AAV2/3 variant | 2753 | WO2018071831 SEQ ID NO: 457 |
| AAV2/3 variant | 2754 | WO2018071831 SEQ ID NO: 458 |
| AAV2/3 variant | 2755 | WO2018071831 SEQ ID NO: 459 |
| AAV2/3 variant | 2756 | WO2018071831 SEQ ID NO: 460 |
| AAV2/3 variant | 2757 | WO2018071831 SEQ ID NO: 461 |
| AAV2/3 variant | 2758 | WO2018071831 SEQ ID NO: 462 |
| AAV2/3 variant | 2759 | WO2018071831 SEQ ID NO: 463 |
| AAV2/3 variant | 2760 | WO2018071831 SEQ ID NO: 464 |
| AAV2/3 variant | 2761 | WO2018071831 SEQ ID NO: 465 |
| AAV2/3 variant | 2762 | WO2018071831 SEQ ID NO: 466 |
| AAV2/3 variant | 2763 | WO2018071831 SEQ ID NO: 467 |
| AAV2/3 variant | 2764 | WO2018071831 SEQ ID NO: 468 |
| AAV2/3 variant | 2765 | WO2018071831 SEQ ID NO: 469 |
| AAV2/3 variant | 2766 | WO2018071831 SEQ ID NO: 470 |
| AAV2/3 variant | 2767 | WO2018071831 SEQ ID NO: 471 |
| AAV2/3 variant | 2768 | WO2018071831 SEQ ID NO: 472 |
| AAV2/3 variant | 2769 | WO2018071831 SEQ ID NO: 473 |
| AAV2/3 variant | 2770 | WO2018071831 SEQ ID NO: 474 |
| AAV2/3 variant | 2771 | WO2018071831 SEQ ID NO: 475 |
| AAV2/3 variant | 2772 | WO2018071831 SEQ ID NO: 476 |
| AAV2/3 variant | 2773 | WO2018071831 SEQ ID NO: 477 |
| AAV2/3 variant | 2774 | WO2018071831 SEQ ID NO: 478 |
| AAV2/3 variant | 2775 | WO2018071831 SEQ ID NO: 479 |
| AAV2/3 variant | 2776 | WO2018071831 SEQ ID NO: 480 |
| AAV2/3 variant | 2777 | WO2018071831 SEQ ID NO: 481 |
| AAV2/3 variant | 2778 | WO2018071831 SEQ ID NO: 482 |
| AAV2/3 variant | 2779 | WO2018071831 SEQ ID NO: 483 |
| AAV2/3 variant | 2780 | WO2018071831 SEQ ID NO: 484 |
| AAV2/3 variant | 2781 | WO2018071831 SEQ ID NO: 485 |
| AAV2/3 variant | 2782 | WO2018071831 SEQ ID NO: 486 |
| AAV2/3 variant | 2783 | WO2018071831 SEQ ID NO: 487 |
| AAV2/3 variant | 2784 | WO2018071831 SEQ ID NO: 488 |
| AAV2/3 variant | 2785 | WO2018071831 SEQ ID NO: 489 |
| AAV2/3 variant | 2786 | WO2018071831 SEQ ID NO: 490 |
| AAV2/3 variant | 2787 | WO2018071831 SEQ ID NO: 491 |
| AAV2/3 variant | 2788 | WO2018071831 SEQ ID NO: 492 |
| AAV2/3 variant | 2789 | WO2018071831 SEQ ID NO: 493 |
| AAV2/3 variant | 2790 | WO2018071831 SEQ ID NO: 494 |
| AAV2/3 variant | 2791 | WO2018071831 SEQ ID NO: 495 |
| AAV2/3 variant | 2792 | WO2018071831 SEQ ID NO: 496 |
| AAV2/3 variant | 2793 | WO2018071831 SEQ ID NO: 497 |
| AAV2/3 variant | 2794 | WO2018071831 SEQ ID NO: 498 |
| AAV2/3 variant | 2795 | WO2018071831 SEQ ID NO: 499 |
| AAV2/3 variant | 2796 | WO2018071831 SEQ ID NO: 500 |
| AAV2/3 variant | 2797 | WO2018071831 SEQ ID NO: 501 |
| AAV2/3 variant | 2798 | WO2018071831 SEQ ID NO: 502 |
| AAV2/3 variant | 2799 | WO2018071831 SEQ ID NO: 503 |
| AAV2/3 variant | 2800 | WO2018071831 SEQ ID NO: 504 |
| AAV2/3 variant | 2801 | WO2018071831 SEQ ID NO: 505 |
| AAV2/3 variant | 2802 | WO2018071831 SEQ ID NO: 506 |
| AAV2/3 variant | 2803 | WO2018071831 SEQ ID NO: 507 |
| AAV2/3 variant | 2804 | WO2018071831 SEQ ID NO: 508 |
| AAV2/3 variant | 2805 | WO2018071831 SEQ ID NO: 509 |
| AAV2/3 variant | 2806 | WO2018071831 SEQ ID NO: 510 |
| AAV2/3 variant | 2807 | WO2018071831 SEQ ID NO: 511 |
| AAV2/3 variant | 2808 | WO2018071831 SEQ ID NO: 512 |
| AAV2/3 variant | 2809 | WO2018071831 SEQ ID NO: 513 |
| AAV2/3 variant | 2810 | WO2018071831 SEQ ID NO: 514 |
| AAV2/3 variant | 2811 | WO2018071831 SEQ ID NO: 515 |
| AAV2/3 variant | 2812 | WO2018071831 SEQ ID NO: 516 |
| AAV2/3 variant | 2813 | WO2018071831 SEQ ID NO: 517 |
| AAV2/3 variant | 2814 | WO2018071831 SEQ ID NO: 518 |
| AAV2/3 variant | 2815 | WO2018071831 SEQ ID NO: 519 |
| AAV2/3 variant | 2816 | WO2018071831 SEQ ID NO: 520 |
| AAV2/3 variant | 2817 | WO2018071831 SEQ ID NO: 521 |
| AAV2/3 variant | 2818 | WO2018071831 SEQ ID NO: 522 |
| AAV2/3 variant | 2819 | WO2018071831 SEQ ID NO: 523 |
| AAV2/3 variant | 2820 | WO2018071831 SEQ ID NO: 524 |
| AAV2/3 variant | 2821 | WO2018071831 SEQ ID NO: 525 |
| AAV2/3 variant | 2822 | WO2018071831 SEQ ID NO: 526 |
| AAV2/3 variant | 2823 | WO2018071831 SEQ ID NO: 527 |
| AAV2/3 variant | 2824 | WO2018071831 SEQ ID NO: 528 |
| AAV2/3 variant | 2825 | WO2018071831 SEQ ID NO: 529 |
| AAV2/3 variant | 2826 | WO2018071831 SEQ ID NO: 530 |
| AAV2/3 variant | 2827 | WO2018071831 SEQ ID NO: 531 |
| AAV2/3 variant | 2828 | WO2018071831 SEQ ID NO: 532 |
| AAV2/3 variant | 2829 | WO2018071831 SEQ ID NO: 533 |
| AAV2/3 variant | 2830 | WO2018071831 SEQ ID NO: 534 |
| AAV2/3 variant | 2831 | WO2018071831 SEQ ID NO: 535 |
| AAV2/3 variant | 2832 | WO2018071831 SEQ ID NO: 536 |
| AAV2/3 variant | 2833 | WO2018071831 SEQ ID NO: 537 |
| AAV2/3 variant | 2834 | WO2018071831 SEQ ID NO: 538 |
| AAV2/3 variant | 2835 | WO2018071831 SEQ ID NO: 539 |
| AAV2/3 variant | 2836 | WO2018071831 SEQ ID NO: 540 |
| AAV2/3 variant | 2837 | WO2018071831 SEQ ID NO: 541 |
| AAV2/3 variant | 2838 | WO2018071831 SEQ ID NO: 542 |
| AAV2/3 variant | 2839 | WO2018071831 SEQ ID NO: 543 |
| AAV2/3 variant | 2840 | WO2018071831 SEQ ID NO: 544 |
| AAV2/3 variant | 2841 | WO2018071831 SEQ ID NO: 545 |
| AAV2/3 variant | 2842 | WO2018071831 SEQ ID NO: 546 |
| AAV2/3 variant | 2843 | WO2018071831 SEQ ID NO: 547 |
| AAV2/3 variant | 2844 | WO2018071831 SEQ ID NO: 548 |
| AAV2/3 variant | 2845 | WO2018071831 SEQ ID NO: 549 |
| AAV2/3 variant | 2846 | WO2018071831 SEQ ID NO: 550 |
| AAV2/3 variant | 2847 | WO2018071831 SEQ ID NO: 551 |
| AAV2/3 variant | 2848 | WO2018071831 SEQ ID NO: 552 |
| AAV2/3 variant | 2849 | WO2018071831 SEQ ID NO: 553 |
| AAV2/3 variant | 2850 | WO2018071831 SEQ ID NO: 554 |
| AAV2/3 variant | 2851 | WO2018071831 SEQ ID NO: 555 |
| AAV2/3 variant | 2852 | WO2018071831 SEQ ID NO: 556 |
| AAV2/3 variant | 2853 | WO2018071831 SEQ ID NO: 557 |
| AAV2/3 variant | 2854 | WO2018071831 SEQ ID NO: 558 |
| AAV2/3 variant | 2855 | WO2018071831 SEQ ID NO: 559 |
| AAV2/3 variant | 2856 | WO2018071831 SEQ ID NO: 560 |
| AAV2/3 variant | 2857 | WO2018071831 SEQ ID NO: 561 |
| AAV2/3 variant | 2858 | WO2018071831 SEQ ID NO: 562 |
| AAV2/3 variant | 2859 | WO2018071831 SEQ ID NO: 563 |
| AAV2/3 variant | 2860 | WO2018071831 SEQ ID NO: 564 |
| AAV2/3 variant | 2861 | WO2018071831 SEQ ID NO: 565 |
| AAV2/3 variant | 2862 | WO2018071831 SEQ ID NO: 566 |
| AAV2/3 variant | 2863 | WO2018071831 SEQ ID NO: 567 |
| AAV2/3 variant | 2864 | WO2018071831 SEQ ID NO: 568 |
| AAV2/3 variant | 2865 | WO2018071831 SEQ ID NO: 569 |
| AAV2/3 variant | 2866 | WO2018071831 SEQ ID NO: 570 |
| AAV2/3 variant | 2867 | WO2018071831 SEQ ID NO: 571 |
| AAV2/3 variant | 2868 | WO2018071831 SEQ ID NO: 572 |
| AAV2/3 variant | 2869 | WO2018071831 SEQ ID NO: 573 |
| AAV2/3 variant | 2870 | WO2018071831 SEQ ID NO: 574 |
| AAV2/3 variant | 2871 | WO2018071831 SEQ ID NO: 575 |
| AAV2/3 variant | 2872 | WO2018071831 SEQ ID NO: 576 |
| AAV2/3 variant | 2873 | WO2018071831 SEQ ID NO: 577 |
| AAV2/3 variant | 2874 | WO2018071831 SEQ ID NO: 578 |
| AAV2/3 variant | 2875 | WO2018071831 SEQ ID NO: 579 |
| AAV2/3 variant | 2876 | WO2018071831 SEQ ID NO: 580 |
| AAV2/3 variant | 2877 | WO2018071831 SEQ ID NO: 581 |
| AAV2/3 variant | 2878 | WO2018071831 SEQ ID NO: 582 |
| AAV2/3 variant | 2879 | WO2018071831 SEQ ID NO: 583 |
| AAV2/3 variant | 2880 | WO2018071831 SEQ ID NO: 584 |
| AAV2/3 variant | 2881 | WO2018071831 SEQ ID NO: 585 |
| AAV2/3 variant | 2882 | WO2018071831 SEQ ID NO: 586 |
| AAV2/3 variant | 2883 | WO2018071831 SEQ ID NO: 587 |
| AAV2/3 variant | 2884 | WO2018071831 SEQ ID NO: 588 |
| AAV2/3 variant | 2885 | WO2018071831 SEQ ID NO: 589 |
| AAV2/3 variant | 2886 | WO2018071831 SEQ ID NO: 590 |
| AAV2/3 variant | 2887 | WO2018071831 SEQ ID NO: 591 |
| AAV2/3 variant | 2888 | WO2018071831 SEQ ID NO: 592 |
| AAV2/3 variant | 2889 | WO2018071831 SEQ ID NO: 593 |
| AAV2/3 variant | 2890 | WO2018071831 SEQ ID NO: 594 |
| AAV2/3 variant | 2891 | WO2018071831 SEQ ID NO: 595 |
| AAV2/3 variant | 2892 | WO2018071831 SEQ ID NO: 596 |
| AAV2/3 variant | 2893 | WO2018071831 SEQ ID NO: 597 |
| AAV2/3 variant | 2894 | WO2018071831 SEQ ID NO: 598 |
| AAV2/3 variant | 2895 | WO2018071831 SEQ ID NO: 599 |
| AAV2/3 variant | 2896 | WO2018071831 SEQ ID NO: 600 |
| AAV2/3 variant | 2897 | WO2018071831 SEQ ID NO: 601 |
| AAV2/3 variant | 2898 | WO2018071831 SEQ ID NO: 602 |
| AAV2/3 variant | 2899 | WO2018071831 SEQ ID NO: 603 |
| AAV2/3 variant | 2900 | WO2018071831 SEQ ID NO: 604 |
| AAV2/3 variant | 2901 | WO2018071831 SEQ ID NO: 605 |
| AAV2/3 variant | 2902 | WO2018071831 SEQ ID NO: 606 |
| AAV2/3 variant | 2903 | WO2018071831 SEQ ID NO: 607 |
| AAV2/3 variant | 2904 | WO2018071831 SEQ ID NO: 608 |
| AAV2/3 variant | 2905 | WO2018071831 SEQ ID NO: 609 |
| AAV2/3 variant | 2906 | WO2018071831 SEQ ID NO: 610 |
| AAV2/3 variant | 2907 | WO2018071831 SEQ ID NO: 611 |
| AAV2/3 variant | 2908 | WO2018071831 SEQ ID NO: 612 |
| AAV2/3 variant | 2909 | WO2018071831 SEQ ID NO: 613 |
| AAV2/3 variant | 2910 | WO2018071831 SEQ ID NO: 614 |
| AAV2/3 variant | 2911 | WO2018071831 SEQ ID NO: 615 |
| AAV2/3 variant | 2912 | WO2018071831 SEQ ID NO: 616 |
| AAV2/3 variant | 2913 | WO2018071831 SEQ ID NO: 617 |
| AAV2/3 variant | 2914 | WO2018071831 SEQ ID NO: 618 |
| AAV2/3 variant | 2915 | WO2018071831 SEQ ID NO: 619 |
| AAV2/3 variant | 2916 | WO2018071831 SEQ ID NO: 620 |
| AAV2/3 variant | 2917 | WO2018071831 SEQ ID NO: 621 |
| AAV2/3 variant | 2918 | WO2018071831 SEQ ID NO: 622 |
| AAV2/3 variant | 2919 | WO2018071831 SEQ ID NO: 623 |
| AAV2/3 variant | 2920 | WO2018071831 SEQ ID NO: 624 |
| AAV2/3 variant | 2921 | WO2018071831 SEQ ID NO: 625 |
| AAV2/3 variant | 2922 | WO2018071831 SEQ ID NO: 626 |
| AAV2/3 variant | 2923 | WO2018071831 SEQ ID NO: 627 |
| AAV2/3 variant | 2924 | WO2018071831 SEQ ID NO: 628 |
| AAV8 Variant | 2925 | WO2018071831 SEQ ID NO: 629 |
| AAV8 Variant | 2926 | WO2018071831 SEQ ID NO: 630 |
| AAV8 Variant | 2927 | WO2018071831 SEQ ID NO: 631 |
| AAV8 Variant | 2928 | WO2018071831 SEQ ID NO: 632 |
| AAV8 Variant | 2929 | WO2018071831 SEQ ID NO: 633 |
| AAV8 Variant | 2930 | WO2018071831 SEQ ID NO: 634 |
| AAV8 Variant | 2931 | WO2018071831 SEQ ID NO: 635 |
| AAV8 Variant | 2932 | WO2018071831 SEQ ID NO: 636 |
| AAV8 Variant | 2933 | WO2018071831 SEQ ID NO: 637 |
| AAV8 Variant | 2934 | WO2018071831 SEQ ID NO: 638 |
| AAV8 Variant | 2935 | WO2018071831 SEQ ID NO: 639 |
| AAV8 Variant | 2936 | WO2018071831 SEQ ID NO: 640 |
| AAV8 Variant | 2937 | WO2018071831 SEQ ID NO: 641 |
| AAV8 Variant | 2938 | WO2018071831 SEQ ID NO: 642 |
| AAV8 Variant | 2939 | WO2018071831 SEQ ID NO: 643 |
| AAV8 Variant | 2940 | WO2018071831 SEQ ID NO: 644 |
| AAV8 Variant | 2941 | WO2018071831 SEQ ID NO: 645 |
| AAV8 Variant | 2942 | WO2018071831 SEQ ID NO: 646 |
| AAV8 Variant | 2943 | WO2018071831 SEQ ID NO: 647 |
| AAV8 Variant | 2944 | WO2018071831 SEQ ID NO: 648 |
| AAV8 Variant | 2945 | WO2018071831 SEQ ID NO: 649 |
| AAV8 Variant | 2946 | WO2018071831 SEQ ID NO: 650 |
| AAV8 Variant | 2947 | WO2018071831 SEQ ID NO: 651 |
| AAV8 Variant | 2948 | WO2018071831 SEQ ID NO: 652 |
| AAV8 Variant | 2949 | WO2018071831 SEQ ID NO: 653 |
| AAV8 Variant | 2950 | WO2018071831 SEQ ID NO: 654 |
| AAV8 Variant | 2951 | WO2018071831 SEQ ID NO: 655 |
| AAV8 Variant | 2952 | WO2018071831 SEQ ID NO: 656 |
| AAV8 Variant | 2953 | WO2018071831 SEQ ID NO: 657 |
| AAV8 Variant | 2954 | WO2018071831 SEQ ID NO: 658 |
| AAV8 Variant | 2955 | WO2018071831 SEQ ID NO: 659 |
| AAV8 Variant | 2956 | WO2018071831 SEQ ID NO: 660 |
| AAV8 Variant | 2957 | WO2018071831 SEQ ID NO: 661 |
| AAV8 Variant | 2958 | WO2018071831 SEQ ID NO: 662 |
| AAV8 Variant | 2959 | WO2018071831 SEQ ID NO: 663 |
| AAV8 Variant | 2960 | WO2018071831 SEQ ID NO: 664 |
| AAV8 Variant | 2961 | WO2018071831 SEQ ID NO: 665 |
| AAV8 Variant | 2962 | WO2018071831 SEQ ID NO: 666 |
| AAV8 Variant | 2963 | WO2018071831 SEQ ID NO: 667 |
| AAV8 Variant | 2964 | WO2018071831 SEQ ID NO: 668 |
| AAV8 Variant | 2965 | WO2018071831 SEQ ID NO: 669 |
| AAV8 Variant | 2966 | WO2018071831 SEQ ID NO: 670 |
| AAV8 Variant | 2967 | WO2018071831 SEQ ID NO: 671 |
| AAV8 Variant | 2968 | WO2018071831 SEQ ID NO: 672 |
| AAV8 Variant | 2969 | WO2018071831 SEQ ID NO: 673 |
| AAV8 Variant | 2970 | WO2018071831 SEQ ID NO: 674 |
| AAV8 Variant | 2971 | WO2018071831 SEQ ID NO: 675 |
| AAV8 Variant | 2972 | WO2018071831 SEQ ID NO: 676 |
| AAV8 Variant | 2973 | WO2018071831 SEQ ID NO: 677 |
| AAV8 Variant | 2974 | WO2018071831 SEQ ID NO: 678 |
| AAV8 Variant | 2975 | WO2018071831 SEQ ID NO: 679 |
| AAV8 Variant | 2976 | WO2018071831 SEQ ID NO: 680 |
| AAV8 Variant | 2977 | WO2018071831 SEQ ID NO: 681 |
| AAV8 Variant | 2978 | WO2018071831 SEQ ID NO: 682 |
| AAV8 Variant | 2979 | WO2018071831 SEQ ID NO: 683 |
| AAV8 Variant | 2980 | WO2018071831 SEQ ID NO: 684 |
| AAV8 Variant | 2981 | WO2018071831 SEQ ID NO: 685 |
| AAV8 Variant | 2982 | WO2018071831 SEQ ID NO: 686 |
| AAV8 Variant | 2983 | WO2018071831 SEQ ID NO: 687 |
| AAV8 Variant | 2984 | WO2018071831 SEQ ID NO: 688 |
| AAV8 Variant | 2985 | WO2018071831 SEQ ID NO: 689 |
| AAV8 Variant | 2986 | WO2018071831 SEQ ID NO: 690 |
| AAV8 Variant | 2987 | WO2018071831 SEQ ID NO: 691 |
| AAV8 Variant | 2988 | WO2018071831 SEQ ID NO: 692 |
| AAV8 Variant | 2989 | WO2018071831 SEQ ID NO: 693 |
| AAV8 Variant | 2990 | WO2018071831 SEQ ID NO: 694 |
| AAV8 Variant | 2991 | WO2018071831 SEQ ID NO: 695 |
| AAV8 Variant | 2992 | WO2018071831 SEQ ID NO: 696 |
| AAV8 Variant | 2993 | WO2018071831 SEQ ID NO: 697 |
| AAV8 Variant | 2994 | WO2018071831 SEQ ID NO: 698 |
| AAV8 Variant | 2995 | WO2018071831 SEQ ID NO: 699 |
| AAV8 Variant | 2996 | WO2018071831 SEQ ID NO: 700 |
| AAV8 Variant | 2997 | WO2018071831 SEQ ID NO: 701 |
| AAV8 Variant | 2998 | WO2018071831 SEQ ID NO: 702 |
| AAV8 Variant | 2999 | WO2018071831 SEQ ID NO: 703 |
| AAV8 Variant | 3000 | WO2018071831 SEQ ID NO: 704 |
| AAV8 Variant | 3001 | WO2018071831 SEQ ID NO: 705 |
| AAV8 Variant | 3002 | WO2018071831 SEQ ID NO: 706 |
| AAV8 Variant | 3003 | WO2018071831 SEQ ID NO: 707 |
| AAV8 Variant | 3004 | WO2018071831 SEQ ID NO: 708 |
| AAV8 Variant | 3005 | WO2018071831 SEQ ID NO: 709 |
| AAV8 Variant | 3006 | WO2018071831 SEQ ID NO: 710 |
| AAV8 Variant | 3007 | WO2018071831 SEQ ID NO: 711 |
| AAV8 Variant | 3008 | WO2018071831 SEQ ID NO: 712 |
| AAV8 Variant | 3009 | WO2018071831 SEQ ID NO: 713 |
| AAV8 Variant | 3010 | WO2018071831 SEQ ID NO: 714 |
| AAV8 Variant | 3011 | WO2018071831 SEQ ID NO: 715 |
| AAV8 Variant | 3012 | WO2018071831 SEQ ID NO: 716 |
| AAV8 Variant | 3013 | WO2018071831 SEQ ID NO: 717 |
| AAV8 Variant | 3014 | WO2018071831 SEQ ID NO: 718 |
| AAV8 Variant | 3015 | WO2018071831 SEQ ID NO: 719 |
| AAV8 Variant | 3016 | WO2018071831 SEQ ID NO: 720 |
| AAV8 Variant | 3017 | WO2018071831 SEQ ID NO: 721 |
| AAV8 Variant | 3018 | WO2018071831 SEQ ID NO: 722 |
| AAV8 Variant | 3019 | WO2018071831 SEQ ID NO: 723 |
| AAV8 Variant | 3020 | WO2018071831 SEQ ID NO: 724 |
| AAV8 Variant | 3021 | WO2018071831 SEQ ID NO: 725 |
| AAV8 Variant | 3022 | WO2018071831 SEQ ID NO: 726 |
| AAV8 Variant | 3023 | WO2018071831 SEQ ID NO: 727 |
| AAV8 Variant | 3024 | WO2018071831 SEQ ID NO: 728 |
| AAV8 Variant | 3025 | WO2018071831 SEQ ID NO: 729 |
| AAV8 Variant | 3026 | WO2018071831 SEQ ID NO: 730 |
| AAV8 Variant | 3027 | WO2018071831 SEQ ID NO: 731 |
| AAV8 Variant | 3028 | WO2018071831 SEQ ID NO: 732 |
| AAV8 Variant | 3029 | WO2018071831 SEQ ID NO: 733 |
| AAV8 Variant | 3030 | WO2018071831 SEQ ID NO: 734 |
| AAV8 Variant | 3031 | WO2018071831 SEQ ID NO: 735 |
| AAV8 Variant | 3032 | WO2018071831 SEQ ID NO: 736 |
| AAV8 Variant | 3033 | WO2018071831 SEQ ID NO: 737 |
| AAV8 Variant | 3034 | WO2018071831 SEQ ID NO: 738 |
| AAV8 Variant | 3035 | WO2018071831 SEQ ID NO: 739 |
| AAV8 Variant | 3036 | WO2018071831 SEQ ID NO: 740 |
| AAV8 Variant | 3037 | WO2018071831 SEQ ID NO: 741 |
| AAV8 Variant | 3038 | WO2018071831 SEQ ID NO: 742 |
| AAV8 Variant | 3039 | WO2018071831 SEQ ID NO: 743 |
| AAV8 Variant | 3040 | WO2018071831 SEQ ID NO: 744 |
| AAV8 Variant | 3041 | WO2018071831 SEQ ID NO: 745 |
| AAV8 Variant | 3042 | WO2018071831 SEQ ID NO: 746 |
| AAV8 Variant | 3043 | WO2018071831 SEQ ID NO: 747 |
| AAV8 Variant | 3044 | WO2018071831 SEQ ID NO: 748 |
| AAV8 Variant | 3045 | WO2018071831 SEQ ID NO: 749 |
| AAV8 Variant | 3046 | WO2018071831 SEQ ID NO: 750 |
| AAV8 Variant | 3047 | WO2018071831 SEQ ID NO: 751 |
| AAV8 Variant | 3048 | WO2018071831 SEQ ID NO: 752 |
| AAV8 Variant | 3049 | WO2018071831 SEQ ID NO: 753 |
| AAV8 Variant | 3050 | WO2018071831 SEQ ID NO: 754 |
| AAV8 Variant | 3051 | WO2018071831 SEQ ID NO: 755 |
| AAV8 Variant | 3052 | WO2018071831 SEQ ID NO: 756 |
| AAV8 Variant | 3053 | WO2018071831 SEQ ID NO: 757 |
| AAV8 Variant | 3054 | WO2018071831 SEQ ID NO: 758 |
| AAV8 Variant | 3055 | WO2018071831 SEQ ID NO: 759 |
| AAV8 Variant | 3056 | WO2018071831 SEQ ID NO: 760 |
| AAV8 Variant | 3057 | WO2018071831 SEQ ID NO: 761 |
| AAV8 Variant | 3058 | WO2018071831 SEQ ID NO: 762 |
| AAV8 Variant | 3059 | WO2018071831 SEQ ID NO: 763 |
| AAV8 Variant | 3060 | WO2018071831 SEQ ID NO: 764 |
| AAV8 Variant | 3061 | WO2018071831 SEQ ID NO: 765 |
| AAV8 Variant | 3062 | WO2018071831 SEQ ID NO: 766 |
| AAV8 Variant | 3063 | WO2018071831 SEQ ID NO: 767 |
| AAV8 Variant | 3064 | WO2018071831 SEQ ID NO: 768 |
| AAV8 Variant | 3065 | WO2018071831 SEQ ID NO: 769 |
| AAV8 Variant | 3066 | WO2018071831 SEQ ID NO: 770 |
| AAV8 Variant | 3067 | WO2018071831 SEQ ID NO: 771 |
| AAV8 Variant | 3068 | WO2018071831 SEQ ID NO: 772 |
| AAV8 Variant | 3069 | WO2018071831 SEQ ID NO: 773 |
| AAV8 Variant | 3070 | WO2018071831 SEQ ID NO: 774 |
| AAV8 Variant | 3071 | WO2018071831 SEQ ID NO: 775 |
| AAV8 Variant | 3072 | WO2018071831 SEQ ID NO: 776 |
| AAV8 Variant | 3073 | WO2018071831 SEQ ID NO: 777 |
| AAV8 Variant | 3074 | WO2018071831 SEQ ID NO: 778 |
| AAV8 Variant | 3075 | WO2018071831 SEQ ID NO: 779 |
| AAV8 Variant | 3076 | WO2018071831 SEQ ID NO: 780 |
| AAV8 Variant | 3077 | WO2018071831 SEQ ID NO: 781 |
| AAV8 Variant | 3078 | WO2018071831 SEQ ID NO: 782 |
| AAV8 Variant | 3079 | WO2018071831 SEQ ID NO: 783 |
| AAV8 Variant | 3080 | WO2018071831 SEQ ID NO: 784 |
| AAV8 Variant | 3081 | WO2018071831 SEQ ID NO: 785 |
| AAV8 Variant | 3082 | WO2018071831 SEQ ID NO: 786 |
| AAV8 Variant | 3083 | WO2018071831 SEQ ID NO: 787 |
| AAV8 Variant | 3084 | WO2018071831 SEQ ID NO: 788 |
| AAV8 Variant | 3085 | WO2018071831 SEQ ID NO: 789 |
| AAV8 Variant | 3086 | WO2018071831 SEQ ID NO: 790 |
| AAV8 Variant | 3087 | WO2018071831 SEQ ID NO: 791 |
| AAV8 Variant | 3088 | WO2018071831 SEQ ID NO: 792 |
| AAV8 Variant | 3089 | WO2018071831 SEQ ID NO: 793 |
| AAV8 Variant | 3090 | WO2018071831 SEQ ID NO: 794 |
| AAV8 Variant | 3091 | WO2018071831 SEQ ID NO: 795 |
| AAV8 Variant | 3092 | WO2018071831 SEQ ID NO: 796 |
| AAV8 Variant | 3093 | WO2018071831 SEQ ID NO: 797 |
| AAV8 Variant | 3094 | WO2018071831 SEQ ID NO: 798 |
| AAV8 Variant | 3095 | WO2018071831 SEQ ID NO: 799 |
| AAV8 Variant | 3096 | WO2018071831 SEQ ID NO: 800 |
| AAV8 Variant | 3097 | WO2018071831 SEQ ID NO: 801 |
| AAV8 Variant | 3098 | WO2018071831 SEQ ID NO: 802 |
| AAV8 Variant | 3099 | WO2018071831 SEQ ID NO: 803 |
| AAV8 Variant | 3100 | WO2018071831 SEQ ID NO: 804 |
| AAV8 Variant | 3101 | WO2018071831 SEQ ID NO: 805 |
| AAV8 Variant | 3102 | WO2018071831 SEQ ID NO: 806 |
| AAV8 Variant | 3103 | WO2018071831 SEQ ID NO: 807 |
| AAV8 Variant | 3104 | WO2018071831 SEQ ID NO: 808 |
| AAV8 Variant | 3105 | WO2018071831 SEQ ID NO: 809 |
| AAV8 Variant | 3106 | WO2018071831 SEQ ID NO: 810 |
| AAV8 Variant | 3107 | WO2018071831 SEQ ID NO: 811 |
| AAV8 Variant | 3108 | WO2018071831 SEQ ID NO: 812 |
| AAV8 Variant | 3109 | WO2018071831 SEQ ID NO: 813 |
| AAV8 Variant | 3110 | WO2018071831 SEQ ID NO: 814 |
| AAV8 Variant | 3111 | WO2018071831 SEQ ID NO: 815 |
| AAV8 Variant | 3112 | WO2018071831 SEQ ID NO: 816 |
| AAV8 Variant | 3113 | WO2018071831 SEQ ID NO: 817 |
| AAV8 Variant | 3114 | WO2018071831 SEQ ID NO: 818 |
| AAV8 Variant | 3115 | WO2018071831 SEQ ID NO: 819 |
| AAV8 Variant | 3116 | WO2018071831 SEQ ID NO: 820 |
| AAV8 Variant | 3117 | WO2018071831 SEQ ID NO: 821 |
| AAV8 Variant | 3118 | WO2018071831 SEQ ID NO: 822 |
| AAV8 Variant | 3119 | WO2018071831 SEQ ID NO: 823 |
| AAV8 Variant | 3120 | WO2018071831 SEQ ID NO: 824 |
| AAV8 Variant | 3121 | WO2018071831 SEQ ID NO: 825 |
| AAV8 Variant | 3122 | WO2018071831 SEQ ID NO: 826 |
| AAV8 Variant | 3123 | WO2018071831 SEQ ID NO: 827 |
| AAV8 Variant | 3124 | WO2018071831 SEQ ID NO: 828 |
| AAV8 Variant | 3125 | WO2018071831 SEQ ID NO: 829 |
| AAV8 Variant | 3126 | WO2018071831 SEQ ID NO: 830 |
| AAV8 Variant | 3127 | WO2018071831 SEQ ID NO: 831 |
| AAV8 Variant | 3128 | WO2018071831 SEQ ID NO: 832 |
| AAV8 Variant | 3129 | WO2018071831 SEQ ID NO: 833 |
| AAV8 Variant | 3130 | WO2018071831 SEQ ID NO: 834 |
| AAV8 Variant | 3131 | WO2018071831 SEQ ID NO: 835 |
| AAV8 Variant | 3132 | WO2018071831 SEQ ID NO: 836 |
| AAV2 variant | 3133 | WO2018071831 SEQ ID NO: 837 |
| AAV2 variant | 3134 | WO2018071831 SEQ ID NO: 838 |
| AAV2 variant | 3135 | WO2018071831 SEQ ID NO: 839 |
| AAV2 variant | 3136 | WO2018071831 SEQ ID NO: 840 |
| AAV2 variant | 3137 | WO2018071831 SEQ ID NO: 841 |
| AAV2 variant | 3138 | WO2018071831 SEQ ID NO: 842 |
| AAV2 variant | 3139 | WO2018071831 SEQ ID NO: 843 |
| AAV2 variant | 3140 | WO2018071831 SEQ ID NO: 844 |
| AAV2 variant | 3141 | WO2018071831 SEQ ID NO: 845 |
| AAV2 variant | 3142 | WO2018071831 SEQ ID NO: 846 |
| AAV2 variant | 3143 | WO2018071831 SEQ ID NO: 847 |
| AAV2 variant | 3144 | WO2018071831 SEQ ID NO: 848 |
| AAV2 variant | 3145 | WO2018071831 SEQ ID NO: 849 |
| AAV2 variant | 3146 | WO2018071831 SEQ ID NO: 850 |
| AAV2 variant | 3147 | WO2018071831 SEQ ID NO: 851 |
| AAV2 variant | 3148 | WO2018071831 SEQ ID NO: 852 |
| AAV8 B1 | 3149 | WO2018071831 SEQ ID NO: 853 |
| AAV8 B2 | 3150 | WO2018071831 SEQ ID NO: 854 |
| AAV8 B3 | 3151 | WO2018071831 SEQ ID NO: 855 |
| AAV8 B4 | 3152 | WO2018071831 SEQ ID NO: 856 |
| AAV8 B12 | 3153 | WO2018071831 SEQ ID NO: 857 |
| AAV8 B18 | 3154 | WO2018071831 SEQ ID NO: 858 |
| AAV8 B24 | 3155 | WO2018071831 SEQ ID NO: 859 |
| AAV8 B41 | 3156 | WO2018071831 SEQ ID NO: 860 |
| AAV8 B44 | 3157 | WO2018071831 SEQ ID NO: 861 |
| AAV8 B45 | 3158 | WO2018071831 SEQ ID NO: 862 |
| AAV8 B46 | 3159 | WO2018071831 SEQ ID NO: 863 |
| AAV8 B60 | 3160 | WO2018071831 SEQ ID NO: 864 |
| AAV8 B61 | 3161 | WO2018071831 SEQ ID NO: 865 |
| AAV8 B62 | 3162 | WO2018071831 SEQ ID NO: 866 |
| AAV8 B63 | 3163 | WO2018071831 SEQ ID NO: 867 |
| AAV8 B64 | 3164 | WO2018071831 SEQ ID NO: 868 |
| AAV variant | 3165 | WO2018071831 SEQ ID NO: 876 |
| AAV variant | 3166 | WO2018071831 SEQ ID NO: 877 |
| AAV variant | 3167 | WO2018071831 SEQ ID NO: 878 |
| AAV variant | 3168 | WO2018071831 SEQ ID NO: 879 |
| AAV variant | 3169 | WO2018071831 SEQ ID NO: 880 |
| AAV variant | 3170 | WO2018071831 SEQ ID NO: 881 |
| AAV variant | 3171 | WO2018071831 SEQ ID NO: 882 |
| AAV variant | 3172 | WO2018071831 SEQ ID NO: 883 |
| AAV variant | 3173 | WO2018071831 SEQ ID NO: 884 |
| AAV variant | 3174 | WO2018071831 SEQ ID NO: 885 |
| AAV variant | 3175 | WO2018071831 SEQ ID NO: 886 |
| AAV variant | 3176 | WO2018071831 SEQ ID NO: 887 |
| AAV variant | 3177 | WO2018071831 SEQ ID NO: 888 |
| AAV variant | 3178 | WO2018071831 SEQ ID NO: 889 |
| AAV variant | 3179 | WO2018071831 SEQ ID NO: 890 |
| AAV variant | 3180 | WO2018071831 SEQ ID NO: 891 |
| AAV variant | 3181 | WO2018071831 SEQ ID NO: 892 |
| AAV variant | 3182 | WO2018071831 SEQ ID NO: 893 |
| AAV variant | 3183 | WO2018071831 SEQ ID NO: 894 |
| AAV variant | 3184 | WO2018071831 SEQ ID NO: 895 |
| AAV variant | 3185 | WO2018071831 SEQ ID NO: 896 |
| AAV variant | 3186 | WO2018071831 SEQ ID NO: 897 |
| AAV variant | 3187 | WO2018071831 SEQ ID NO: 898 |
| AAV variant | 3188 | WO2018071831 SEQ ID NO: 899 |
| AAV variant | 3189 | WO2018071831 SEQ ID NO: 900 |
| AAV variant | 3190 | WO2018071831 SEQ ID NO: 901 |
| AAV variant | 3191 | WO2018071831 SEQ ID NO: 902 |
| AAV variant | 3192 | WO2018071831 SEQ ID NO: 903 |
| AAV variant | 3193 | WO2018071831 SEQ ID NO: 904 |
| AAV variant | 3194 | WO2018071831 SEQ ID NO: 905 |
| AAV variant | 3195 | WO2018071831 SEQ ID NO: 906 |
| AAV variant | 3196 | WO2018071831 SEQ ID NO: 907 |
| AAV variant | 3197 | WO2018071831 SEQ ID NO: 908 |
| AAV variant | 3198 | WO2018071831 SEQ ID NO: 909 |
| AAV variant | 3199 | WO2018071831 SEQ ID NO: 910 |
| AAV variant | 3200 | WO2018071831 SEQ ID NO: 911 |
| AAV variant | 3201 | WO2018071831 SEQ ID NO: 912 |
| AAV variant | 3202 | WO2018071831 SEQ ID NO: 913 |
| AAV variant | 3203 | WO2018071831 SEQ ID NO: 914 |
| AAV variant | 3204 | WO2018071831 SEQ ID NO: 915 |
| AAV variant | 3205 | WO2018071831 SEQ ID NO: 916 |
| AAV variant | 3206 | WO2018071831 SEQ ID NO: 917 |
| AAV variant | 3207 | WO2018071831 SEQ ID NO: 918 |
| AAV variant | 3208 | WO2018071831 SEQ ID NO: 919 |
| AAV variant | 3209 | WO2018071831 SEQ ID NO: 920 |
| AAV variant | 3210 | WO2018071831 SEQ ID NO: 921 |
| AAV variant | 3211 | WO2018071831 SEQ ID NO: 922 |
| AAV variant | 3212 | WO2018071831 SEQ ID NO: 923 |
| AAV variant | 3213 | WO2018071831 SEQ ID NO: 924 |
| AAV variant | 3214 | WO2018071831 SEQ ID NO: 925 |
| AAV variant | 3215 | WO2018071831 SEQ ID NO: 926 |
| AAV variant | 3216 | WO2018071831 SEQ ID NO: 927 |
| AAV variant | 3217 | WO2018071831 SEQ ID NO: 928 |
| AAV variant | 3218 | WO2018071831 SEQ ID NO: 929 |
| AAV variant | 3219 | WO2018071831 SEQ ID NO: 930 |
| AAV variant | 3220 | WO2018071831 SEQ ID NO: 931 |
| AAV variant | 3221 | WO2018071831 SEQ ID NO: 932 |
| AAV variant | 3222 | WO2018071831 SEQ ID NO: 933 |
| AAV variant | 3223 | WO2018071831 SEQ ID NO: 934 |
| AAV variant | 3224 | WO2018071831 SEQ ID NO: 935 |
| AAV variant | 3225 | WO2018071831 SEQ ID NO: 936 |
| AAV variant | 3226 | WO2018071831 SEQ ID NO: 937 |
| AAV variant | 3227 | WO2018071831 SEQ ID NO: 938 |
| AAV variant | 3228 | WO2018071831 SEQ ID NO: 939 |
| AAV variant | 3229 | WO2018071831 SEQ ID NO: 940 |
| AAV variant | 3230 | WO2018071831 SEQ ID NO: 941 |
| AAV variant | 3231 | WO2018071831 SEQ ID NO: 942 |
| AAV variant | 3232 | WO2018071831 SEQ ID NO: 943 |
| AAV variant | 3233 | WO2018071831 SEQ ID NO: 944 |
| AAV variant | 3234 | WO2018071831 SEQ ID NO: 945 |
| AAV variant | 3235 | WO2018071831 SEQ ID NO: 946 |
| AAV variant | 3236 | WO2018071831 SEQ ID NO: 947 |
| AAV variant | 3237 | WO2018071831 SEQ ID NO: 948 |
| AAV variant | 3238 | WO2018071831 SEQ ID NO: 949 |
| AAV variant | 3239 | WO2018071831 SEQ ID NO: 950 |
| AAV variant | 3240 | WO2018071831 SEQ ID NO: 951 |
| AAV variant | 3241 | WO2018071831 SEQ ID NO: 952 |
| AAV variant | 3242 | WO2018071831 SEQ ID NO: 953 |
| AAV variant | 3243 | WO2018071831 SEQ ID NO: 954 |
| AAV variant | 3244 | WO2018071831 SEQ ID NO: 955 |
| AAV variant | 3245 | WO2018071831 SEQ ID NO: 956 |
| AAV variant | 3246 | WO2018071831 SEQ ID NO: 957 |
| AAV variant | 3247 | WO2018071831 SEQ ID NO: 958 |
| AAV variant | 3248 | WO2018071831 SEQ ID NO: 959 |
| AAV variant | 3249 | WO2018071831 SEQ ID NO: 960 |
| AAV variant | 3250 | WO2018071831 SEQ ID NO: 961 |
| AAV variant | 3251 | WO2018071831 SEQ ID NO: 962 |
| AAV variant | 3252 | WO2018071831 SEQ ID NO: 963 |
| AAV variant | 3253 | WO2018071831 SEQ ID NO: 964 |
| AAV variant | 3254 | WO2018071831 SEQ ID NO: 965 |
| AAV variant | 3255 | WO2018071831 SEQ ID NO: 966 |
| AAV variant | 3256 | WO2018071831 SEQ ID NO: 967 |
| AAV variant | 3257 | WO2018071831 SEQ ID NO: 968 |
| AAV variant | 3258 | WO2018071831 SEQ ID NO: 969 |
| AAV variant | 3259 | WO2018071831 SEQ ID NO: 970 |
| AAV variant | 3260 | WO2018071831 SEQ ID NO: 971 |
| AAV variant | 3261 | WO2018071831 SEQ ID NO: 972 |
| AAV variant | 3262 | WO2018071831 SEQ ID NO: 973 |
| AAV variant | 3263 | WO2018071831 SEQ ID NO: 974 |
| AAV variant | 3264 | WO2018071831 SEQ ID NO: 975 |
| AAV variant | 3265 | WO2018071831 SEQ ID NO: 976 |
| AAV variant | 3266 | WO2018071831 SEQ ID NO: 977 |
| AAV variant | 3267 | WO2018071831 SEQ ID NO: 978 |
| AAV variant | 3268 | WO2018071831 SEQ ID NO: 979 |
| AAV variant | 3269 | WO2018071831 SEQ ID NO: 980 |
| AAV variant | 3270 | WO2018071831 SEQ ID NO: 981 |
| AAV variant | 3271 | WO2018071831 SEQ ID NO: 982 |
| AAV variant | 3272 | WO2018071831 SEQ ID NO: 983 |
| AAV variant | 3273 | WO2018071831 SEQ ID NO: 984 |
| AAV variant | 3274 | WO2018071831 SEQ ID NO: 985 |
| AAV variant | 3275 | WO2018071831 SEQ ID NO: 986 |
| AAV variant | 3276 | WO2018071831 SEQ ID NO: 987 |
| AAV variant | 3277 | WO2018071831 SEQ ID NO: 988 |
| AAV variant | 3278 | WO2018071831 SEQ ID NO: 989 |
| AAV variant | 3279 | WO2018071831 SEQ ID NO: 990 |
| AAV variant | 3280 | WO2018071831 SEQ ID NO: 991 |
| AAV variant | 3281 | WO2018071831 SEQ ID NO: 992 |
| AAV variant | 3282 | WO2018071831 SEQ ID NO: 993 |
| AAV variant | 3283 | WO2018071831 SEQ ID NO: 994 |
| AAV variant | 3284 | WO2018071831 SEQ ID NO: 995 |
| AAV variant | 3285 | WO2018071831 SEQ ID NO: 996 |
| AAV variant | 3286 | WO2018071831 SEQ ID NO: 997 |
| AAV variant | 3287 | WO2018071831 SEQ ID NO: 998 |
| AAV variant | 3288 | WO2018071831 SEQ ID NO: 999 |
| AAV variant | 3289 | WO2018071831 SEQ ID NO: 1000 |
| AAV variant | 3290 | WO2018071831 SEQ ID NO: 1001 |
| AAV variant | 3291 | WO2018071831 SEQ ID NO: 1002 |
| AAV variant | 3292 | WO2018071831 SEQ ID NO: 1003 |
| AAV variant | 3293 | WO2018071831 SEQ ID NO: 1004 |
| AAV variant | 3294 | WO2018071831 SEQ ID NO: 1005 |
| AAV variant | 3295 | WO2018071831 SEQ ID NO: 1006 |
| AAV variant | 3296 | WO2018071831 SEQ ID NO: 1007 |
| AAV variant | 3297 | WO2018071831 SEQ ID NO: 1008 |
| AAV variant | 3298 | WO2018071831 SEQ ID NO: 1009 |
| AAV variant | 3299 | WO2018071831 SEQ ID NO: 1010 |
| AAV variant | 3300 | WO2018071831 SEQ ID NO: 1011 |
| AAV variant | 3301 | WO2018071831 SEQ ID NO: 1012 |
| AAV variant | 3302 | WO2018071831 SEQ ID NO: 1013 |
| AAV variant | 3303 | WO2018071831 SEQ ID NO: 1014 |
| AAV variant | 3304 | WO2018071831 SEQ ID NO: 1015 |
| AAV variant | 3305 | WO2018071831 SEQ ID NO: 1016 |
| AAV variant | 3306 | WO2018071831 SEQ ID NO: 1017 |
| AAV variant | 3307 | WO2018071831 SEQ ID NO: 1018 |
| AAV variant | 3308 | WO2018071831 SEQ ID NO: 1019 |
| AAV variant | 3309 | WO2018071831 SEQ ID NO: 1020 |
| AAV variant | 3310 | WO2018071831 SEQ ID NO: 1021 |
| AAV variant | 3311 | WO2018071831 SEQ ID NO: 1022 |
| AAV variant | 3312 | WO2018071831 SEQ ID NO: 1023 |
| AAV variant | 3313 | WO2018071831 SEQ ID NO: 1024 |
| AAV variant | 3314 | WO2018071831 SEQ ID NO: 1025 |
| AAV variant | 3315 | WO2018071831 SEQ ID NO: 1026 |
| AAV variant | 3316 | WO2018071831 SEQ ID NO: 1027 |
| AAV variant | 3317 | WO2018071831 SEQ ID NO: 1028 |
| AAV variant | 3318 | WO2018071831 SEQ ID NO: 1029 |
| AAV variant | 3319 | WO2018071831 SEQ ID NO: 1030 |
| AAV variant | 3320 | WO2018071831 SEQ ID NO: 1031 |
| AAV variant | 3321 | WO2018071831 SEQ ID NO: 1032 |
| AAV variant | 3322 | WO2018071831 SEQ ID NO: 1033 |
| AAV variant | 3323 | WO2018071831 SEQ ID NO: 1034 |
| AAV variant | 3324 | WO2018071831 SEQ ID NO: 1035 |
| AAV variant | 3325 | WO2018071831 SEQ ID NO: 1036 |
| AAV variant | 3326 | WO2018071831 SEQ ID NO: 1037 |
| AAV variant | 3327 | WO2018071831 SEQ ID NO: 1038 |
| AAV variant | 3328 | WO2018071831 SEQ ID NO: 1039 |
| AAV variant | 3329 | WO2018071831 SEQ ID NO: 1040 |
| AAV variant | 3330 | WO2018071831 SEQ ID NO: 1041 |
| AAV variant | 3331 | WO2018071831 SEQ ID NO: 1042 |
| AAV variant | 3332 | WO2018071831 SEQ ID NO: 1043 |
| AAV variant | 3333 | WO2018071831 SEQ ID NO: 1044 |
| AAV variant | 3334 | WO2018071831 SEQ ID NO: 1045 |
| AAV variant | 3335 | WO2018071831 SEQ ID NO: 1046 |
| AAV variant | 3336 | WO2018071831 SEQ ID NO: 1047 |
| AAV variant | 3337 | WO2018071831 SEQ ID NO: 1048 |
| AAV variant | 3338 | WO2018071831 SEQ ID NO: 1049 |
| AAV variant | 3339 | WO2018071831 SEQ ID NO: 1050 |
| AAV variant | 3340 | WO2018071831 SEQ ID NO: 1051 |
| AAV variant | 3341 | WO2018071831 SEQ ID NO: 1052 |
| AAV variant | 3342 | WO2018071831 SEQ ID NO: 1053 |
| AAV variant | 3343 | WO2018071831 SEQ ID NO: 1054 |
| AAV variant | 3344 | WO2018071831 SEQ ID NO: 1055 |
| AAV variant | 3345 | WO2018071831 SEQ ID NO: 1056 |
| AAV variant | 3346 | WO2018071831 SEQ ID NO: 1057 |
| AAV variant | 3347 | WO2018071831 SEQ ID NO: 1058 |
| AAV variant | 3348 | WO2018071831 SEQ ID NO: 1059 |
| AAV variant | 3349 | WO2018071831 SEQ ID NO: 1060 |
| AAV variant | 3350 | WO2018071831 SEQ ID NO: 1061 |
| AAV variant | 3351 | WO2018071831 SEQ ID NO: 1062 |
| AAV variant | 3352 | WO2018071831 SEQ ID NO: 1063 |
| AAV variant | 3353 | WO2018071831 SEQ ID NO: 1064 |
| AAV variant | 3354 | WO2018071831 SEQ ID NO: 1065 |
| AAV variant | 3355 | WO2018071831 SEQ ID NO: 1066 |
| AAV variant | 3356 | WO2018071831 SEQ ID NO: 1067 |
| AAV variant | 3357 | WO2018071831 SEQ ID NO: 1068 |
| AAV variant | 3358 | WO2018071831 SEQ ID NO: 1069 |
| AAV variant | 3359 | WO2018071831 SEQ ID NO: 1070 |
| AAV variant | 3360 | WO2018071831 SEQ ID NO: 1071 |
| AAV variant | 3361 | WO2018071831 SEQ ID NO: 1072 |
| AAV variant | 3362 | WO2018071831 SEQ ID NO: 1073 |
| AAV variant | 3363 | WO2018071831 SEQ ID NO: 1074 |
| AAV variant | 3364 | WO2018071831 SEQ ID NO: 1075 |
| AAV variant | 3365 | WO2018071831 SEQ ID NO: 1076 |
| AAV variant | 3366 | WO2018071831 SEQ ID NO: 1077 |
| AAV variant | 3367 | WO2018071831 SEQ ID NO: 1078 |
| AAV variant | 3368 | WO2018071831 SEQ ID NO: 1079 |
| AAV variant | 3369 | WO2018071831 SEQ ID NO: 1080 |
| AAV variant | 3370 | WO2018071831 SEQ ID NO: 1081 |
| AAV variant | 3371 | WO2018071831 SEQ ID NO: 1082 |
| AAV variant | 3372 | WO2018071831 SEQ ID NO: 1083 |
| AAV variant | 3373 | WO2018071831 SEQ ID NO: 1084 |
| AAV variant | 3374 | WO2018071831 SEQ ID NO: 1085 |
| AAV variant | 3375 | WO2018071831 SEQ ID NO: 1086 |
| AAV variant | 3376 | WO2018071831 SEQ ID NO: 1087 |
| AAV variant | 3377 | WO2018071831 SEQ ID NO: 1088 |
| AAV variant | 3378 | WO2018071831 SEQ ID NO: 1089 |
| AAV variant | 3379 | WO2018071831 SEQ ID NO: 1090 |
| AAV variant | 3380 | WO2018071831 SEQ ID NO: 1091 |
| AAV variant | 3381 | WO2018071831 SEQ ID NO: 1092 |
| AAV variant | 3382 | WO2018071831 SEQ ID NO: 1093 |
| AAV variant | 3383 | WO2018071831 SEQ ID NO: 1094 |
| AAV variant | 3384 | WO2018071831 SEQ ID NO: 1095 |
| AAV variant | 3385 | WO2018071831 SEQ ID NO: 1096 |
| AAV variant | 3386 | WO2018071831 SEQ ID NO: 1097 |
| AAV variant | 3387 | WO2018071831 SEQ ID NO: 1098 |
| AAV variant | 3388 | WO2018071831 SEQ ID NO: 1099 |
| AAV variant | 3389 | WO2018071831 SEQ ID NO: 1100 |
| AAV variant | 3390 | WO2018071831 SEQ ID NO: 1101 |
| AAV variant | 3391 | WO2018071831 SEQ ID NO: 1102 |
| AAV variant | 3392 | WO2018071831 SEQ ID NO: 1103 |
| AAV variant | 3393 | WO2018071831 SEQ ID NO: 1104 |
| AAV variant | 3394 | WO2018071831 SEQ ID NO: 1105 |
| AAV variant | 3395 | WO2018071831 SEQ ID NO: 1106 |
| AAV variant | 3396 | WO2018071831 SEQ ID NO: 1107 |
| AAV variant | 3397 | WO2018071831 SEQ ID NO: 1108 |
| AAV variant | 3398 | WO2018071831 SEQ ID NO: 1109 |
| AAV variant | 3399 | WO2018071831 SEQ ID NO: 1110 |
| AAV variant | 3400 | WO2018071831 SEQ ID NO: 1111 |
| AAV variant | 3401 | WO2018071831 SEQ ID NO: 1112 |
| AAV variant | 3402 | WO2018071831 SEQ ID NO: 1113 |
| AAV variant | 3403 | WO2018071831 SEQ ID NO: 1114 |
| AAV variant | 3404 | WO2018071831 SEQ ID NO: 1115 |
| AAV variant | 3405 | WO2018071831 SEQ ID NO: 1116 |
| AAV variant | 3406 | WO2018071831 SEQ ID NO: 1117 |
| AAV variant | 3407 | WO2018071831 SEQ ID NO: 1118 |
| AAV variant | 3408 | WO2018071831 SEQ ID NO: 1119 |
| AAV variant | 3409 | WO2018071831 SEQ ID NO: 1120 |
| AAV variant | 3410 | WO2018071831 SEQ ID NO: 1121 |
| AAV variant | 3411 | WO2018071831 SEQ ID NO: 1122 |
| AAV variant | 3412 | WO2018071831 SEQ ID NO: 1123 |
| AAV variant | 3413 | WO2018071831 SEQ ID NO: 1124 |
| AAV variant | 3414 | WO2018071831 SEQ ID NO: 1125 |
| AAV variant | 3415 | WO2018071831 SEQ ID NO: 1126 |
| AAV variant | 3416 | WO2018071831 SEQ ID NO: 1127 |
| AAV variant | 3417 | WO2018071831 SEQ ID NO: 1128 |
| AAV variant | 3418 | WO2018071831 SEQ ID NO: 1129 |
| AAV variant | 3419 | WO2018071831 SEQ ID NO: 1130 |
| AAV variant | 3420 | WO2018071831 SEQ ID NO: 1131 |
| AAV variant | 3421 | WO2018071831 SEQ ID NO: 1132 |
| AAV variant | 3422 | WO2018071831 SEQ ID NO: 1133 |
| AAV variant | 3423 | WO2018071831 SEQ ID NO: 1134 |
| AAV variant | 3424 | WO2018071831 SEQ ID NO: 1135 |
| AAV variant | 3425 | WO2018071831 SEQ ID NO: 1136 |
| AAV variant | 3426 | WO2018071831 SEQ ID NO: 1137 |
| AAV variant | 3427 | WO2018071831 SEQ ID NO: 1138 |
| AAV variant | 3428 | WO2018071831 SEQ ID NO: 1139 |
| AAV variant | 3429 | WO2018071831 SEQ ID NO: 1140 |
| AAV variant | 3430 | WO2018071831 SEQ ID NO: 1141 |
| AAV variant | 3431 | WO2018071831 SEQ ID NO: 1142 |
| AAV variant | 3432 | WO2018071831 SEQ ID NO: 1143 |
| AAV variant | 3433 | WO2018071831 SEQ ID NO: 1144 |
| AAV variant | 3434 | WO2018071831 SEQ ID NO: 1145 |
| AAV variant | 3435 | WO2018071831 SEQ ID NO: 1146 |
| AAV variant | 3436 | WO2018071831 SEQ ID NO: 1147 |
| AAV variant | 3437 | WO2018071831 SEQ ID NO: 1148 |
| AAV variant | 3438 | WO2018071831 SEQ ID NO: 1149 |
| AAV variant | 3439 | WO2018071831 SEQ ID NO: 1150 |
| AAV variant | 3440 | WO2018071831 SEQ ID NO: 1151 |
| AAV variant | 3441 | WO2018071831 SEQ ID NO: 1152 |
| AAV variant | 3442 | WO2018071831 SEQ ID NO: 1153 |
| AAV variant | 3443 | WO2018071831 SEQ ID NO: 1154 |
| AAV variant | 3444 | WO2018071831 SEQ ID NO: 1155 |
| AAV variant | 3445 | WO2018071831 SEQ ID NO: 1156 |
| AAV variant | 3446 | WO2018071831 SEQ ID NO: 1157 |
| AAV variant | 3447 | WO2018071831 SEQ ID NO: 1158 |
| AAV variant | 3448 | WO2018071831 SEQ ID NO: 1159 |
| AAV variant | 3449 | WO2018071831 SEQ ID NO: 1160 |
| AAV variant | 3450 | WO2018071831 SEQ ID NO: 1161 |
| AAV variant | 3451 | WO2018071831 SEQ ID NO: 1162 |
| AAV variant | 3452 | WO2018071831 SEQ ID NO: 1163 |
| AAV variant | 3453 | WO2018071831 SEQ ID NO: 1164 |
| AAV variant | 3454 | WO2018071831 SEQ ID NO: 1165 |
| AAV variant | 3455 | WO2018071831 SEQ ID NO: 1166 |
| AAV variant | 3456 | WO2018071831 SEQ ID NO: 1167 |
| AAV variant | 3457 | WO2018071831 SEQ ID NO: 1168 |
| AAV variant | 3458 | WO2018071831 SEQ ID NO: 1169 |
| AAV variant | 3459 | WO2018071831 SEQ ID NO: 1170 |
| AAV variant | 3460 | WO2018071831 SEQ ID NO: 1171 |
| AAV variant | 3461 | WO2018071831 SEQ ID NO: 1172 |
| AAV variant | 3462 | WO2018071831 SEQ ID NO: 1173 |
| AAV variant | 3463 | WO2018071831 SEQ ID NO: 1174 |
| AAV variant | 3464 | WO2018071831 SEQ ID NO: 1175 |
| AAV variant | 3465 | WO2018071831 SEQ ID NO: 1176 |
| AAV variant | 3466 | WO2018071831 SEQ ID NO: 1177 |
| AAV variant | 3467 | WO2018071831 SEQ ID NO: 1178 |
| AAV variant | 3468 | WO2018071831 SEQ ID NO: 1179 |
| AAV variant | 3469 | WO2018071831 SEQ ID NO: 1180 |
| AAV variant | 3470 | WO2018071831 SEQ ID NO: 1181 |
| AAV variant | 3471 | WO2018071831 SEQ ID NO: 1182 |
| AAV variant | 3472 | WO2018071831 SEQ ID NO: 1183 |
| AAV variant | 3473 | WO2018071831 SEQ ID NO: 1184 |
| AAV variant | 3474 | WO2018071831 SEQ ID NO: 1185 |
| AAV variant | 3475 | WO2018071831 SEQ ID NO: 1186 |
| AAV variant | 3476 | WO2018071831 SEQ ID NO: 1187 |
| AAV variant | 3477 | WO2018071831 SEQ ID NO: 1188 |
| AAV variant | 3478 | WO2018071831 SEQ ID NO: 1189 |
| AAV variant | 3479 | WO2018071831 SEQ ID NO: 1190 |
| AAV variant | 3480 | WO2018071831 SEQ ID NO: 1191 |
| AAV variant | 3481 | WO2018071831 SEQ ID NO: 1192 |
| AAV variant | 3482 | WO2018071831 SEQ ID NO: 1193 |
| AAV variant | 3483 | WO2018071831 SEQ ID NO: 1194 |
| AAV variant | 3484 | WO2018071831 SEQ ID NO: 1195 |
| AAV variant | 3485 | WO2018071831 SEQ ID NO: 1196 |
| AAV variant | 3486 | WO2018071831 SEQ ID NO: 1197 |
| AAV variant | 3487 | WO2018071831 SEQ ID NO: 1198 |
| AAV variant | 3488 | WO2018071831 SEQ ID NO: 1199 |
| AAV variant | 3489 | WO2018071831 SEQ ID NO: 1200 |
| AAV variant | 3490 | WO2018071831 SEQ ID NO: 1201 |
| AAV variant | 3491 | WO2018071831 SEQ ID NO: 1202 |
| AAV variant | 3492 | WO2018071831 SEQ ID NO: 1203 |
| AAV variant | 3493 | WO2018071831 SEQ ID NO: 1204 |
| AAV variant | 3494 | WO2018071831 SEQ ID NO: 1205 |
| AAV variant | 3495 | WO2018071831 SEQ ID NO: 1206 |
| AAV variant | 3496 | WO2018071831 SEQ ID NO: 1207 |
| AAV variant | 3497 | WO2018071831 SEQ ID NO: 1208 |
| AAV variant | 3498 | WO2018071831 SEQ ID NO: 1209 |
| AAV variant | 3499 | WO2018071831 SEQ ID NO: 1210 |
| AAV variant | 3500 | WO2018071831 SEQ ID NO: 1211 |
| AAV variant | 3501 | WO2018071831 SEQ ID NO: 1212 |
| AAV variant | 3502 | WO2018071831 SEQ ID NO: 1213 |
| AAV variant | 3503 | WO2018071831 SEQ ID NO: 1214 |
| AAV variant | 3504 | WO2018071831 SEQ ID NO: 1215 |
| AAV variant | 3505 | WO2018071831 SEQ ID NO: 1216 |
| AAV variant | 3506 | WO2018071831 SEQ ID NO: 1217 |
| AAV variant | 3507 | WO2018071831 SEQ ID NO: 1218 |
| AAV variant | 3508 | WO2018071831 SEQ ID NO: 1219 |
| AAV variant | 3509 | WO2018071831 SEQ ID NO: 1220 |
| AAV variant | 3510 | WO2018071831 SEQ ID NO: 1221 |
| AAV variant | 3511 | WO2018071831 SEQ ID NO: 1222 |
| AAV variant | 3512 | WO2018071831 SEQ ID NO: 1223 |
| AAV variant | 3513 | WO2018071831 SEQ ID NO: 1224 |
| AAV variant | 3514 | WO2018071831 SEQ ID NO: 1225 |
| AAV variant | 3515 | WO2018071831 SEQ ID NO: 1226 |
| AAV variant | 3516 | WO2018071831 SEQ ID NO: 1227 |
| AAV variant | 3517 | WO2018071831 SEQ ID NO: 1228 |
| AAV variant | 3518 | WO2018071831 SEQ ID NO: 1229 |
| AAV variant | 3519 | WO2018071831 SEQ ID NO: 1230 |
| AAV variant | 3520 | WO2018071831 SEQ ID NO: 1231 |
| AAV variant | 3521 | WO2018071831 SEQ ID NO: 1232 |
| AAV variant | 3522 | WO2018071831 SEQ ID NO: 1233 |
| AAV variant | 3523 | WO2018071831 SEQ ID NO: 1234 |
| AAV variant | 3524 | WO2018071831 SEQ ID NO: 1235 |
| AAV variant | 3525 | WO2018071831 SEQ ID NO: 1236 |
| AAV variant | 3526 | WO2018071831 SEQ ID NO: 1237 |
| AAV variant | 3527 | WO2018071831 SEQ ID NO: 1238 |
| AAV variant | 3528 | WO2018071831 SEQ ID NO: 1239 |
| AAV variant | 3529 | WO2018071831 SEQ ID NO: 1240 |
| AAV variant | 3530 | WO2018071831 SEQ ID NO: 1241 |
| AAV variant | 3531 | WO2018071831 SEQ ID NO: 1242 |
| AAV variant | 3532 | WO2018071831 SEQ ID NO: 1243 |
| AAV variant | 3533 | WO2018071831 SEQ ID NO: 1244 |
| AAV variant | 3534 | WO2018071831 SEQ ID NO: 1245 |
| AAV variant | 3535 | WO2018071831 SEQ ID NO: 1246 |
| AAV variant | 3536 | WO2018071831 SEQ ID NO: 1247 |
| AAV variant | 3537 | WO2018071831 SEQ ID NO: 1248 |
| AAV variant | 3538 | WO2018071831 SEQ ID NO: 1249 |
| AAV variant | 3539 | WO2018071831 SEQ ID NO: 1250 |
| AAV variant | 3540 | WO2018071831 SEQ ID NO: 1251 |
| AAV variant | 3541 | WO2018071831 SEQ ID NO: 1252 |
| AAV variant | 3542 | WO2018071831 SEQ ID NO: 1253 |
| AAV variant | 3543 | WO2018071831 SEQ ID NO: 1254 |
| AAV variant | 3544 | WO2018071831 SEQ ID NO: 1255 |
| AAV variant | 3545 | WO2018071831 SEQ ID NO: 1256 |
| AAV variant | 3546 | WO2018071831 SEQ ID NO: 1257 |
| AAV variant | 3547 | WO2018071831 SEQ ID NO: 1258 |
| AAV variant | 3548 | WO2018071831 SEQ ID NO: 1259 |
| AAV variant | 3549 | WO2018071831 SEQ ID NO: 1260 |
| AAV variant | 3550 | WO2018071831 SEQ ID NO: 1261 |
| AAV variant | 3551 | WO2018071831 SEQ ID NO: 1262 |
| AAV variant | 3552 | WO2018071831 SEQ ID NO: 1263 |
| AAV variant | 3553 | WO2018071831 SEQ ID NO: 1264 |
| AAV variant | 3554 | WO2018071831 SEQ ID NO: 1265 |
| AAV variant | 3555 | WO2018071831 SEQ ID NO: 1266 |
| AAV variant | 3556 | WO2018071831 SEQ ID NO: 1267 |
| AAV variant | 3557 | WO2018071831 SEQ ID NO: 1268 |
| AAV variant | 3558 | WO2018071831 SEQ ID NO: 1269 |
| AAV variant | 3559 | WO2018071831 SEQ ID NO: 1270 |
| AAV variant | 3560 | WO2018071831 SEQ ID NO: 1271 |
| AAV variant | 3561 | WO2018071831 SEQ ID NO: 1272 |
| AAV variant | 3562 | WO2018071831 SEQ ID NO: 1273 |
| AAV variant | 3563 | WO2018071831 SEQ ID NO: 1274 |
| AAV variant | 3564 | WO2018071831 SEQ ID NO: 1275 |
| AAV variant | 3565 | WO2018071831 SEQ ID NO: 1276 |
| AAV variant | 3566 | WO2018071831 SEQ ID NO: 1277 |
| AAV variant | 3567 | WO2018071831 SEQ ID NO: 1278 |
| AAV variant | 3568 | WO2018071831 SEQ ID NO: 1279 |
| AAV variant | 3569 | WO2018071831 SEQ ID NO: 1280 |
| AAV variant | 3570 | WO2018071831 SEQ ID NO: 1281 |
| AAV variant | 3571 | WO2018071831 SEQ ID NO: 1282 |
| AAV variant | 3572 | WO2018071831 SEQ ID NO: 1283 |
| AAV variant | 3573 | WO2018071831 SEQ ID NO: 1284 |
| AAV variant | 3574 | WO2018071831 SEQ ID NO: 1285 |
| AAV variant | 3575 | WO2018071831 SEQ ID NO: 1286 |
| AAV variant | 3576 | WO2018071831 SEQ ID NO: 1287 |
| AAV variant | 3577 | WO2018071831 SEQ ID NO: 1288 |
| AAV variant | 3578 | WO2018071831 SEQ ID NO: 1289 |
| AAV variant | 3579 | WO2018071831 SEQ ID NO: 1290 |
| AAV variant | 3580 | WO2018071831 SEQ ID NO: 1291 |
| AAV variant | 3581 | WO2018071831 SEQ ID NO: 1292 |
| AAV variant | 3582 | WO2018071831 SEQ ID NO: 1293 |
| AAV variant | 3583 | WO2018071831 SEQ ID NO: 1294 |
| AAV variant | 3584 | WO2018071831 SEQ ID NO: 1295 |
| AAV variant | 3585 | WO2018071831 SEQ ID NO: 1296 |
| AAV variant | 3586 | WO2018071831 SEQ ID NO: 1297 |
| AAV variant | 3587 | WO2018071831 SEQ ID NO: 1298 |
| AAV variant | 3588 | WO2018071831 SEQ ID NO: 1299 |
| AAV variant | 3589 | WO2018071831 SEQ ID NO: 1300 |
| AAV variant | 3590 | WO2018071831 SEQ ID NO: 1301 |
| AAV variant | 3591 | WO2018071831 SEQ ID NO: 1302 |
| AAV variant | 3592 | WO2018071831 SEQ ID NO: 1303 |
| AAV variant | 3593 | WO2018071831 SEQ ID NO: 1304 |
| AAV variant | 3594 | WO2018071831 SEQ ID NO: 1305 |
| AAV variant | 3595 | WO2018071831 SEQ ID NO: 1306 |
| AAV variant | 3596 | WO2018071831 SEQ ID NO: 1307 |
| AAV variant | 3597 | WO2018071831 SEQ ID NO: 1308 |
| AAV variant | 3598 | WO2018071831 SEQ ID NO: 1309 |
| AAV variant | 3599 | WO2018071831 SEQ ID NO: 1310 |
| AAV variant | 3600 | WO2018071831 SEQ ID NO: 1311 |
| AAV variant | 3601 | WO2018071831 SEQ ID NO: 1312 |
| AAV variant | 3602 | WO2018071831 SEQ ID NO: 1313 |
| AAV variant | 3603 | WO2018071831 SEQ ID NO: 1314 |
| AAV variant | 3604 | WO2018071831 SEQ ID NO: 1315 |
| AAV variant | 3605 | WO2018071831 SEQ ID NO: 1316 |
| AAV variant | 3606 | WO2018071831 SEQ ID NO: 1317 |
| AAV variant | 3607 | WO2018071831 SEQ ID NO: 1318 |
| AAV variant | 3608 | WO2018071831 SEQ ID NO: 1319 |
| AAV variant | 3609 | WO2018071831 SEQ ID NO: 1320 |
| AAV variant | 3610 | WO2018071831 SEQ ID NO: 1321 |
| AAV variant | 3611 | WO2018071831 SEQ ID NO: 1322 |
| AAV variant | 3612 | WO2018071831 SEQ ID NO: 1323 |
| AAV variant | 3613 | WO2018071831 SEQ ID NO: 1324 |
| AAV variant | 3614 | WO2018071831 SEQ ID NO: 1325 |
| AAV variant | 3615 | WO2018071831 SEQ ID NO: 1326 |
| AAV variant | 3616 | WO2018071831 SEQ ID NO: 1327 |
| AAV variant | 3617 | WO2018071831 SEQ ID NO: 1328 |
| AAV variant | 3618 | WO2018071831 SEQ ID NO: 1329 |
| AAV variant | 3619 | WO2018071831 SEQ ID NO: 1330 |
| AAV variant | 3620 | WO2018071831 SEQ ID NO: 1331 |
| AAV variant | 3621 | WO2018071831 SEQ ID NO: 1332 |
| AAV variant | 3622 | WO2018071831 SEQ ID NO: 1333 |
| AAV variant | 3623 | WO2018071831 SEQ ID NO: 1334 |
| AAV variant | 3624 | WO2018071831 SEQ ID NO: 1335 |
| AAV variant | 3625 | WO2018071831 SEQ ID NO: 1336 |
| AAV variant | 3626 | WO2018071831 SEQ ID NO: 1337 |
| AAV variant | 3627 | WO2018071831 SEQ ID NO: 1338 |
| AAV variant | 3628 | WO2018071831 SEQ ID NO: 1339 |
| AAV variant | 3629 | WO2018071831 SEQ ID NO: 1340 |
| AAV variant | 3630 | WO2018071831 SEQ ID NO: 1341 |
| AAV variant | 3631 | WO2018071831 SEQ ID NO: 1342 |
| AAV variant | 3632 | WO2018071831 SEQ ID NO: 1343 |
| AAV variant | 3633 | WO2018071831 SEQ ID NO: 1344 |
| AAV variant | 3634 | WO2018071831 SEQ ID NO: 1345 |
| AAV variant | 3635 | WO2018071831 SEQ ID NO: 1346 |
| AAV variant | 3636 | WO2018071831 SEQ ID NO: 1347 |
| AAV variant | 3637 | WO2018071831 SEQ ID NO: 1348 |
| AAV variant | 3638 | WO2018071831 SEQ ID NO: 1349 |
| AAV variant | 3639 | WO2018071831 SEQ ID NO: 1350 |
| AAV variant | 3640 | WO2018071831 SEQ ID NO: 1351 |
| AAV variant | 3641 | WO2018071831 SEQ ID NO: 1352 |
| AAV variant | 3642 | WO2018071831 SEQ ID NO: 1353 |
| AAV variant | 3643 | WO2018071831 SEQ ID NO: 1354 |
| AAV variant | 3644 | WO2018071831 SEQ ID NO: 1355 |
| AAV variant | 3645 | WO2018071831 SEQ ID NO: 1356 |
| AAV variant | 3646 | WO2018071831 SEQ ID NO: 1357 |
| AAV variant | 3647 | WO2018071831 SEQ ID NO: 1358 |
| AAV variant | 3648 | WO2018071831 SEQ ID NO: 1359 |
| AAV variant | 3649 | WO2018071831 SEQ ID NO: 1360 |
| AAV variant | 3650 | WO2018071831 SEQ ID NO: 1361 |
| AAV variant | 3651 | WO2018071831 SEQ ID NO: 1362 |
| AAV variant | 3652 | WO2018071831 SEQ ID NO: 1363 |
| AAV variant | 3653 | WO2018071831 SEQ ID NO: 1364 |
| AAV variant | 3654 | WO2018071831 SEQ ID NO: 1365 |
| AAV variant | 3655 | WO2018071831 SEQ ID NO: 1366 |
| AAV variant | 3656 | WO2018071831 SEQ ID NO: 1367 |
| AAV variant | 3657 | WO2018071831 SEQ ID NO: 1368 |
| AAV variant | 3658 | WO2018071831 SEQ ID NO: 1369 |
| AAV variant | 3659 | WO2018071831 SEQ ID NO: 1370 |
| AAV variant | 3660 | WO2018071831 SEQ ID NO: 1371 |
| AAV variant | 3661 | WO2018071831 SEQ ID NO: 1372 |
| AAV variant | 3662 | WO2018071831 SEQ ID NO: 1373 |
| AAV variant | 3663 | WO2018071831 SEQ ID NO: 1374 |
| AAV variant | 3664 | WO2018071831 SEQ ID NO: 1375 |
| AAV variant | 3665 | WO2018071831 SEQ ID NO: 1376 |
| AAV variant | 3666 | WO2018071831 SEQ ID NO: 1377 |
| AAV variant | 3667 | WO2018071831 SEQ ID NO: 1378 |
| AAV variant | 3668 | WO2018071831 SEQ ID NO: 1379 |
| AAV variant | 3669 | WO2018071831 SEQ ID NO: 1380 |
| AAV variant | 3670 | WO2018071831 SEQ ID NO: 1381 |
| AAV variant | 3671 | WO2018071831 SEQ ID NO: 1382 |
| AAV variant | 3672 | WO2018071831 SEQ ID NO: 1383 |
| AAV variant | 3673 | WO2018071831 SEQ ID NO: 1384 |
| AAV variant | 3674 | WO2018071831 SEQ ID NO: 1385 |
| AAV variant | 3675 | WO2018071831 SEQ ID NO: 1386 |
| AAV variant | 3676 | WO2018071831 SEQ ID NO: 1387 |
| AAV variant | 3677 | WO2018071831 SEQ ID NO: 1388 |
| AAV variant | 3678 | WO2018071831 SEQ ID NO: 1389 |
| AAV variant | 3679 | WO2018071831 SEQ ID NO: 1390 |
| AAV variant | 3680 | WO2018071831 SEQ ID NO: 1391 |
| AAV variant | 3681 | WO2018071831 SEQ ID NO: 1392 |
| AAV variant | 3682 | WO2018071831 SEQ ID NO: 1393 |
| AAV variant | 3683 | WO2018071831 SEQ ID NO: 1394 |
| AAV variant | 3684 | WO2018071831 SEQ ID NO: 1395 |
| AAV variant | 3685 | WO2018071831 SEQ ID NO: 1396 |
| AAV variant | 3686 | WO2018071831 SEQ ID NO: 1397 |
| AAV variant | 3687 | WO2018071831 SEQ ID NO: 1398 |
| AAV variant | 3688 | WO2018071831 SEQ ID NO: 1399 |
| AAV variant | 3689 | WO2018071831 SEQ ID NO: 1400 |
| AAV variant | 3690 | WO2018071831 SEQ ID NO: 1401 |
| AAV variant | 3691 | WO2018071831 SEQ ID NO: 1402 |
| AAV variant | 3692 | WO2018071831 SEQ ID NO: 1403 |
| AAV variant | 3693 | WO2018071831 SEQ ID NO: 1404 |
| AAV variant | 3694 | WO2018071831 SEQ ID NO: 1405 |
| AAV variant | 3695 | WO2018071831 SEQ ID NO: 1406 |
| AAV variant | 3696 | WO2018071831 SEQ ID NO: 1407 |
| AAV variant | 3697 | WO2018071831 SEQ ID NO: 1408 |
| AAV variant | 3698 | WO2018071831 SEQ ID NO: 1409 |
| AAV variant | 3699 | WO2018071831 SEQ ID NO: 1410 |
| AAV variant | 3700 | WO2018071831 SEQ ID NO: 1411 |
| AAV variant | 3701 | WO2018071831 SEQ ID NO: 1412 |
| AAV variant | 3702 | WO2018071831 SEQ ID NO: 1413 |
| AAV variant | 3703 | WO2018071831 SEQ ID NO: 1414 |
| AAV variant | 3704 | WO2018071831 SEQ ID NO: 1415 |
| AAV variant | 3705 | WO2018071831 SEQ ID NO: 1416 |
| AAV variant | 3706 | WO2018071831 SEQ ID NO: 1417 |
| AAV variant | 3707 | WO2018071831 SEQ ID NO: 1418 |
| AAV variant | 3708 | WO2018071831 SEQ ID NO: 1419 |
| AAV variant | 3709 | WO2018071831 SEQ ID NO: 1420 |
| AAV variant | 3710 | WO2018071831 SEQ ID NO: 1421 |
| AAV variant | 3711 | WO2018071831 SEQ ID NO: 1422 |
| AAV variant | 3712 | WO2018071831 SEQ ID NO: 1423 |
| AAV variant | 3713 | WO2018071831 SEQ ID NO: 1424 |
| AAV variant | 3714 | WO2018071831 SEQ ID NO: 1425 |
| AAV variant | 3715 | WO2018071831 SEQ ID NO: 1426 |
| AAV variant | 3716 | WO2018071831 SEQ ID NO: 1427 |
| AAV variant | 3717 | WO2018071831 SEQ ID NO: 1428 |
| AAV variant | 3718 | WO2018071831 SEQ ID NO: 1429 |
| AAV variant | 3719 | WO2018071831 SEQ ID NO: 1430 |
| AAV variant | 3720 | WO2018071831 SEQ ID NO: 1431 |
| AAV variant | 3721 | WO2018071831 SEQ ID NO: 1432 |
| AAV variant | 3722 | WO2018071831 SEQ ID NO: 1433 |
| AAV variant | 3723 | WO2018071831 SEQ ID NO: 1434 |
| AAV variant | 3724 | WO2018071831 SEQ ID NO: 1435 |
| AAV variant | 3725 | WO2018071831 SEQ ID NO: 1436 |
| AAV variant | 3726 | WO2018071831 SEQ ID NO: 1437 |
| AAV variant | 3727 | WO2018071831 SEQ ID NO: 1438 |
| AAV variant | 3728 | WO2018071831 SEQ ID NO: 1439 |
| AAV variant | 3729 | WO2018071831 SEQ ID NO: 1440 |
| AAV variant | 3730 | WO2018071831 SEQ ID NO: 1441 |
| AAV variant | 3731 | WO2018071831 SEQ ID NO: 1442 |
| AAV variant | 3732 | WO2018071831 SEQ ID NO: 1443 |
| AAV variant | 3733 | WO2018071831 SEQ ID NO: 1444 |
| AAV variant | 3734 | WO2018071831 SEQ ID NO: 1445 |
| AAV variant | 3735 | WO2018071831 SEQ ID NO: 1446 |
| AAV variant | 3736 | WO2018071831 SEQ ID NO: 1447 |
| AAV variant | 3737 | WO2018071831 SEQ ID NO: 1448 |
| AAV variant | 3738 | WO2018071831 SEQ ID NO: 1449 |
| AAV variant | 3739 | WO2018071831 SEQ ID NO: 1450 |
| AAV variant | 3740 | WO2018071831 SEQ ID NO: 1451 |
| AAV variant | 3741 | WO2018071831 SEQ ID NO: 1452 |
| AAV variant | 3742 | WO2018071831 SEQ ID NO: 1453 |
| AAV variant | 3743 | WO2018071831 SEQ ID NO: 1454 |
| AAV variant | 3744 | WO2018071831 SEQ ID NO: 1455 |
| AAV variant | 3745 | WO2018071831 SEQ ID NO: 1456 |
| AAV variant | 3746 | WO2018071831 SEQ ID NO: 1457 |
| AAV variant | 3747 | WO2018071831 SEQ ID NO: 1458 |
| AAV variant | 3748 | WO2018071831 SEQ ID NO: 1459 |
| AAV variant | 3749 | WO2018071831 SEQ ID NO: 1460 |
| AAV variant | 3750 | WO2018071831 SEQ ID NO: 1461 |
| AAV variant | 3751 | WO2018071831 SEQ ID NO: 1462 |
| AAV variant | 3752 | WO2018071831 SEQ ID NO: 1463 |
| AAV variant | 3753 | WO2018071831 SEQ ID NO: 1464 |
| AAV variant | 3754 | WO2018071831 SEQ ID NO: 1465 |
| AAV variant | 3755 | WO2018071831 SEQ ID NO: 1466 |
| AAV variant | 3756 | WO2018071831 SEQ ID NO: 1467 |
| AAV variant | 3757 | WO2018071831 SEQ ID NO: 1468 |
| AAV variant | 3758 | WO2018071831 SEQ ID NO: 1469 |
| AAV variant | 3759 | WO2018071831 SEQ ID NO: 1470 |
| AAV variant | 3760 | WO2018071831 SEQ ID NO: 1471 |
| AAV variant | 3761 | WO2018071831 SEQ ID NO: 1472 |
| AAV variant | 3762 | WO2018071831 SEQ ID NO: 1473 |
| AAV variant | 3763 | WO2018071831 SEQ ID NO: 1474 |
| AAV variant | 3764 | WO2018071831 SEQ ID NO: 1475 |
| AAV variant | 3765 | WO2018071831 SEQ ID NO: 1476 |
| AAV variant | 3766 | WO2018071831 SEQ ID NO: 1477 |
| AAV variant | 3767 | WO2018071831 SEQ ID NO: 1478 |
| AAV variant | 3768 | WO2018071831 SEQ ID NO: 1479 |
| AAV variant | 3769 | WO2018071831 SEQ ID NO: 1480 |
| AAV variant | 3770 | WO2018071831 SEQ ID NO: 1481 |
| AAV variant | 3771 | WO2018071831 SEQ ID NO: 1482 |
| AAV variant | 3772 | WO2018071831 SEQ ID NO: 1483 |
| AAV variant | 3773 | WO2018071831 SEQ ID NO: 1484 |
| AAV variant | 3774 | WO2018071831 SEQ ID NO: 1485 |
| AAV variant | 3775 | WO2018071831 SEQ ID NO: 1486 |
| AAV variant | 3776 | WO2018071831 SEQ ID NO: 1487 |
| AAV variant | 3777 | WO2018071831 SEQ ID NO: 1488 |
| AAV variant | 3778 | WO2018071831 SEQ ID NO: 1489 |
| AAV variant | 3779 | WO2018071831 SEQ ID NO: 1490 |
| AAV variant | 3780 | WO2018071831 SEQ ID NO: 1491 |
| AAV variant | 3781 | WO2018071831 SEQ ID NO: 1492 |
| AAV variant | 3782 | WO2018071831 SEQ ID NO: 1493 |
| AAV variant | 3783 | WO2018071831 SEQ ID NO: 1494 |
| AAV variant | 3784 | WO2018071831 SEQ ID NO: 1495 |
| AAV variant | 3785 | WO2018071831 SEQ ID NO: 1496 |
| AAV variant | 3786 | WO2018071831 SEQ ID NO: 1497 |
| AAV variant | 3787 | WO2018071831 SEQ ID NO: 1498 |
| AAV variant | 3788 | WO2018071831 SEQ ID NO: 1499 |
| AAV variant | 3789 | WO2018071831 SEQ ID NO: 1500 |
| AAV variant | 3790 | WO2018071831 SEQ ID NO: 1501 |
| AAV variant | 3791 | WO2018071831 SEQ ID NO: 1502 |
| AAV variant | 3792 | WO2018071831 SEQ ID NO: 1503 |
| AAV variant | 3793 | WO2018071831 SEQ ID NO: 1504 |
| AAV variant | 3794 | WO2018071831 SEQ ID NO: 1505 |
| AAV variant | 3795 | WO2018071831 SEQ ID NO: 1506 |
| AAV variant | 3796 | WO2018071831 SEQ ID NO: 1507 |
| AAV variant | 3797 | WO2018071831 SEQ ID NO: 1508 |
| AAV variant | 3798 | WO2018071831 SEQ ID NO: 1509 |
| AAV variant | 3799 | WO2018071831 SEQ ID NO: 1510 |
| AAV variant | 3800 | WO2018071831 SEQ ID NO: 1511 |
| AAV variant | 3801 | WO2018071831 SEQ ID NO: 1512 |
| AAV variant | 3802 | WO2018071831 SEQ ID NO: 1513 |
| AAV variant | 3803 | WO2018071831 SEQ ID NO: 1514 |
| AAV variant | 3804 | WO2018071831 SEQ ID NO: 1515 |
| AAV variant | 3805 | WO2018071831 SEQ ID NO: 1516 |
| AAV variant | 3806 | WO2018071831 SEQ ID NO: 1517 |
| AAV variant | 3807 | WO2018071831 SEQ ID NO: 1518 |
| AAV variant | 3808 | WO2018071831 SEQ ID NO: 1519 |
| AAV variant | 3809 | WO2018071831 SEQ ID NO: 1520 |
| AAV variant | 3810 | WO2018071831 SEQ ID NO: 1521 |
| AAV variant | 3811 | WO2018071831 SEQ ID NO: 1522 |
| AAV variant | 3812 | WO2018071831 SEQ ID NO: 1523 |
| AAV variant | 3813 | WO2018071831 SEQ ID NO: 1524 |
| AAV variant | 3814 | WO2018071831 SEQ ID NO: 1525 |
| AAV variant | 3815 | WO2018071831 SEQ ID NO: 1526 |
| AAV variant | 3816 | WO2018071831 SEQ ID NO: 1527 |
| AAV variant | 3817 | WO2018071831 SEQ ID NO: 1528 |
| AAV variant | 3818 | WO2018071831 SEQ ID NO: 1529 |
| AAV variant | 3819 | WO2018071831 SEQ ID NO: 1530 |
| AAV variant | 3820 | WO2018071831 SEQ ID NO: 1531 |
| AAV variant | 3821 | WO2018071831 SEQ ID NO: 1532 |
| AAV variant | 3822 | WO2018071831 SEQ ID NO: 1533 |
| AAV variant | 3823 | WO2018071831 SEQ ID NO: 1534 |
| AAV variant | 3824 | WO2018071831 SEQ ID NO: 1535 |
| AAV variant | 3825 | WO2018071831 SEQ ID NO: 1536 |
| AAV variant | 3826 | WO2018071831 SEQ ID NO: 1537 |
| AAV variant | 3827 | WO2018071831 SEQ ID NO: 1538 |
| AAV variant | 3828 | WO2018071831 SEQ ID NO: 1539 |
| AAV variant | 3829 | WO2018071831 SEQ ID NO: 1540 |
| AAV variant | 3830 | WO2018071831 SEQ ID NO: 1541 |
| AAV variant | 3831 | WO2018071831 SEQ ID NO: 1542 |
| AAV variant | 3832 | WO2018071831 SEQ ID NO: 1543 |
| AAV variant | 3833 | WO2018071831 SEQ ID NO: 1544 |
| AAV variant | 3834 | WO2018071831 SEQ ID NO: 1545 |
| AAV variant | 3835 | WO2018071831 SEQ ID NO: 1546 |
| AAV variant | 3836 | WO2018071831 SEQ ID NO: 1547 |
| AAV variant | 3837 | WO2018071831 SEQ ID NO: 1548 |
| AAV variant | 3838 | WO2018071831 SEQ ID NO: 1549 |
| AAV variant | 3839 | WO2018071831 SEQ ID NO: 1550 |
| AAV variant | 3840 | WO2018071831 SEQ ID NO: 1551 |
| AAV variant | 3841 | WO2018071831 SEQ ID NO: 1552 |
| AAV variant | 3842 | WO2018071831 SEQ ID NO: 1553 |
| AAV variant | 3843 | WO2018071831 SEQ ID NO: 1554 |
| AAV variant | 3844 | WO2018071831 SEQ ID NO: 1555 |
| AAV variant | 3845 | WO2018071831 SEQ ID NO: 1556 |
| AAV variant | 3846 | WO2018071831 SEQ ID NO: 1557 |
| AAV variant | 3847 | WO2018071831 SEQ ID NO: 1558 |
| AAV variant | 3848 | WO2018071831 SEQ ID NO: 1559 |
| AAV variant | 3849 | WO2018071831 SEQ ID NO: 1560 |
| AAV variant | 3850 | WO2018071831 SEQ ID NO: 1561 |
| AAV variant | 3851 | WO2018071831 SEQ ID NO: 1562 |
| AAV variant | 3852 | WO2018071831 SEQ ID NO: 1563 |
| AAV variant | 3853 | WO2018071831 SEQ ID NO: 1564 |
| AAV variant | 3854 | WO2018071831 SEQ ID NO: 1565 |
| AAV variant | 3855 | WO2018071831 SEQ ID NO: 1566 |
| AAV variant | 3856 | WO2018071831 SEQ ID NO: 1567 |
| AAV variant | 3857 | WO2018071831 SEQ ID NO: 1568 |
| AAV variant | 3858 | WO2018071831 SEQ ID NO: 1569 |
| AAV variant | 3859 | WO2018071831 SEQ ID NO: 1570 |
| AAV variant | 3860 | WO2018071831 SEQ ID NO: 1571 |
| AAV variant | 3861 | WO2018071831 SEQ ID NO: 1572 |
| AAV variant | 3862 | WO2018071831 SEQ ID NO: 1573 |
| AAV variant | 3863 | WO2018071831 SEQ ID NO: 1574 |
| AAV variant | 3864 | WO2018071831 SEQ ID NO: 1575 |
| AAV variant | 3865 | WO2018071831 SEQ ID NO: 1576 |
| AAV variant | 3866 | WO2018071831 SEQ ID NO: 1577 |
| AAV variant | 3867 | WO2018071831 SEQ ID NO: 1578 |
| AAV variant | 3868 | WO2018071831 SEQ ID NO: 1579 |
| AAV variant | 3869 | WO2018071831 SEQ ID NO: 1580 |
| AAV variant | 3870 | WO2018071831 SEQ ID NO: 1581 |
| AAV variant | 3871 | WO2018071831 SEQ ID NO: 1582 |
| AAV variant | 3872 | WO2018071831 SEQ ID NO: 1583 |
| AAV variant | 3873 | WO2018071831 SEQ ID NO: 1584 |
| AAV variant | 3874 | WO2018071831 SEQ ID NO: 1585 |
| AAV variant | 3875 | WO2018071831 SEQ ID NO: 1586 |
| AAV variant | 3876 | WO2018071831 SEQ ID NO: 1587 |
| AAV variant | 3877 | WO2018071831 SEQ ID NO: 1588 |
| AAV variant | 3878 | WO2018071831 SEQ ID NO: 1589 |
| AAV variant | 3879 | WO2018071831 SEQ ID NO: 1590 |
| AAV variant | 3880 | WO2018071831 SEQ ID NO: 1591 |
| AAV variant | 3881 | WO2018071831 SEQ ID NO: 1592 |
| AAV variant | 3882 | WO2018071831 SEQ ID NO: 1593 |
| AAV variant | 3883 | WO2018071831 SEQ ID NO: 1594 |
| AAV variant | 3884 | WO2018071831 SEQ ID NO: 1595 |
| AAV variant | 3885 | WO2018071831 SEQ ID NO: 1596 |
| AAV variant | 3886 | WO2018071831 SEQ ID NO: 1597 |
| AAV variant | 3887 | WO2018071831 SEQ ID NO: 1598 |
| AAV variant | 3888 | WO2018071831 SEQ ID NO: 1599 |
| AAV variant | 3889 | WO2018071831 SEQ ID NO: 1600 |
| AAV variant | 3890 | WO2018071831 SEQ ID NO: 1601 |
| AAV variant | 3891 | WO2018071831 SEQ ID NO: 1602 |
| AAV variant | 3892 | WO2018071831 SEQ ID NO: 1603 |
| AAV variant | 3893 | WO2018071831 SEQ ID NO: 1604 |
| AAV variant | 3894 | WO2018071831 SEQ ID NO: 1605 |
| AAV variant | 3895 | WO2018071831 SEQ ID NO: 1606 |
| AAV variant | 3896 | WO2018071831 SEQ ID NO: 1607 |
| AAV variant | 3897 | WO2018071831 SEQ ID NO: 1608 |
| AAV variant | 3898 | WO2018071831 SEQ ID NO: 1609 |
| AAV variant | 3899 | WO2018071831 SEQ ID NO: 1610 |
| AAV variant | 3900 | WO2018071831 SEQ ID NO: 1611 |
| AAV variant | 3901 | WO2018071831 SEQ ID NO: 1612 |
| AAV variant | 3902 | WO2018071831 SEQ ID NO: 1613 |
| AAV variant | 3903 | WO2018071831 SEQ ID NO: 1614 |
| AAV variant | 3904 | WO2018071831 SEQ ID NO: 1615 |
| AAV variant | 3905 | WO2018071831 SEQ ID NO: 1616 |
| AAV variant | 3906 | WO2018071831 SEQ ID NO: 1617 |
| AAV variant | 3907 | WO2018071831 SEQ ID NO: 1618 |
| AAV variant | 3908 | WO2018071831 SEQ ID NO: 1619 |
| AAV variant | 3909 | WO2018071831 SEQ ID NO: 1620 |
| AAV variant | 3910 | WO2018071831 SEQ ID NO: 1621 |
| AAV variant | 3911 | WO2018071831 SEQ ID NO: 1622 |
| AAV variant | 3912 | WO2018071831 SEQ ID NO: 1623 |
| AAV variant | 3913 | WO2018071831 SEQ ID NO: 1624 |
| AAV variant | 3914 | WO2018071831 SEQ ID NO: 1625 |
| AAV variant | 3915 | WO2018071831 SEQ ID NO: 1626 |
| AAV variant | 3916 | WO2018071831 SEQ ID NO: 1627 |
| AAV variant | 3917 | WO2018071831 SEQ ID NO: 1628 |
| AAV variant | 3918 | WO2018071831 SEQ ID NO: 1629 |
| AAV variant | 3919 | WO2018071831 SEQ ID NO: 1630 |
| AAV variant | 3920 | WO2018071831 SEQ ID NO: 1631 |
| AAV variant | 3921 | WO2018071831 SEQ ID NO: 1632 |
| AAV variant | 3922 | WO2018071831 SEQ ID NO: 1633 |
| AAV variant | 3923 | WO2018071831 SEQ ID NO: 1634 |
| AAV variant | 3924 | WO2018071831 SEQ ID NO: 1635 |
| AAV variant | 3925 | WO2018071831 SEQ ID NO: 1636 |
| AAV variant | 3926 | WO2018071831 SEQ ID NO: 1637 |
| AAV variant | 3927 | WO2018071831 SEQ ID NO: 1638 |
| AAV variant | 3928 | WO2018071831 SEQ ID NO: 1639 |
| AAV variant | 3929 | WO2018071831 SEQ ID NO: 1640 |
| AAV variant | 3930 | WO2018071831 SEQ ID NO: 1641 |
| AAV variant | 3931 | WO2018071831 SEQ ID NO: 1642 |
| AAV variant | 3932 | WO2018071831 SEQ ID NO: 1643 |
| AAV variant | 3933 | WO2018071831 SEQ ID NO: 1644 |
| AAV variant | 3934 | WO2018071831 SEQ ID NO: 1645 |
| AAV variant | 3935 | WO2018071831 SEQ ID NO: 1646 |
| AAV variant | 3936 | WO2018071831 SEQ ID NO: 1647 |
| AAV variant | 3937 | WO2018071831 SEQ ID NO: 1648 |
| AAV variant | 3938 | WO2018071831 SEQ ID NO: 1649 |
| AAV variant | 3939 | WO2018071831 SEQ ID NO: 1650 |
| AAV variant | 3940 | WO2018071831 SEQ ID NO: 1651 |
| AAV variant | 3941 | WO2018071831 SEQ ID NO: 1652 |
| AAV variant | 3942 | WO2018071831 SEQ ID NO: 1653 |
| AAV variant | 3943 | WO2018071831 SEQ ID NO: 1654 |
| AAV variant | 3944 | WO2018071831 SEQ ID NO: 1655 |
| AAV variant | 3945 | WO2018071831 SEQ ID NO: 1656 |
| AAV variant | 3946 | WO2018071831 SEQ ID NO: 1657 |
| AAV variant | 3947 | WO2018071831 SEQ ID NO: 1658 |
| AAV variant | 3948 | WO2018071831 SEQ ID NO: 1659 |
| AAV variant | 3949 | WO2018071831 SEQ ID NO: 1660 |
| AAV variant | 3950 | WO2018071831 SEQ ID NO: 1661 |
| AAV variant | 3951 | WO2018071831 SEQ ID NO: 1662 |
| AAV variant | 3952 | WO2018071831 SEQ ID NO: 1663 |
| AAV variant | 3953 | WO2018071831 SEQ ID NO: 1664 |
| AAV variant | 3954 | WO2018071831 SEQ ID NO: 1665 |
| AAV variant | 3955 | WO2018071831 SEQ ID NO: 1666 |
| AAV variant | 3956 | WO2018071831 SEQ ID NO: 1667 |
| AAV variant | 3957 | WO2018071831 SEQ ID NO: 1668 |
| AAV variant | 3958 | WO2018071831 SEQ ID NO: 1669 |
| AAV variant | 3959 | WO2018071831 SEQ ID NO: 1670 |
| AAV variant | 3960 | WO2018071831 SEQ ID NO: 1671 |
| AAV variant | 3961 | WO2018071831 SEQ ID NO: 1672 |
| AAV variant | 3962 | WO2018071831 SEQ ID NO: 1673 |
| AAV variant | 3963 | WO2018071831 SEQ ID NO: 1674 |
| AAV variant | 3964 | WO2018071831 SEQ ID NO: 1675 |
| AAV variant | 3965 | WO2018071831 SEQ ID NO: 1676 |
| AAV variant | 3966 | WO2018071831 SEQ ID NO: 1677 |
| AAV variant | 3967 | WO2018071831 SEQ ID NO: 1678 |
| AAV variant | 3968 | WO2018071831 SEQ ID NO: 1679 |
| AAV variant | 3969 | WO2018071831 SEQ ID NO: 1680 |
| AAV variant | 3970 | WO2018071831 SEQ ID NO: 1681 |
| AAV variant | 3971 | WO2018071831 SEQ ID NO: 1682 |
| AAV variant | 3972 | WO2018071831 SEQ ID NO: 1683 |
| AAV variant | 3973 | WO2018071831 SEQ ID NO: 1684 |
| AAV variant | 3974 | WO2018071831 SEQ ID NO: 1685 |
| AAV variant | 3975 | WO2018071831 SEQ ID NO: 1686 |
| AAV variant | 3976 | WO2018071831 SEQ ID NO: 1687 |
| AAV variant | 3977 | WO2018071831 SEQ ID NO: 1688 |
| AAV variant | 3978 | WO2018071831 SEQ ID NO: 1689 |
| AAV variant | 3979 | WO2018071831 SEQ ID NO: 1690 |
| AAV variant | 3980 | WO2018071831 SEQ ID NO: 1691 |
| AAV variant | 3981 | WO2018071831 SEQ ID NO: 1692 |
| AAV variant | 3982 | WO2018071831 SEQ ID NO: 1693 |
| AAV variant | 3983 | WO2018071831 SEQ ID NO: 1694 |
| AAV variant | 3984 | WO2018071831 SEQ ID NO: 1695 |
| AAV variant | 3985 | WO2018071831 SEQ ID NO: 1696 |
| AAV variant | 3986 | WO2018071831 SEQ ID NO: 1697 |
| AAV variant | 3987 | WO2018071831 SEQ ID NO: 1698 |
| AAV variant | 3988 | WO2018071831 SEQ ID NO: 1699 |
| AAV variant | 3989 | WO2018071831 SEQ ID NO: 1700 |
| AAV variant | 3990 | WO2018071831 SEQ ID NO: 1701 |
| AAV variant | 3991 | WO2018071831 SEQ ID NO: 1702 |
| AAV variant | 3992 | WO2018071831 SEQ ID NO: 1703 |
| AAV variant | 3993 | WO2018071831 SEQ ID NO: 1704 |
| AAV variant | 3994 | WO2018071831 SEQ ID NO: 1705 |
| AAV variant | 3995 | WO2018071831 SEQ ID NO: 1706 |
| AAV variant | 3996 | WO2018071831 SEQ ID NO: 1707 |
| AAV variant | 3997 | WO2018071831 SEQ ID NO: 1708 |
| AAV variant | 3998 | WO2018071831 SEQ ID NO: 1709 |
| AAV variant | 3999 | WO2018071831 SEQ ID NO: 1710 |
| AAV variant | 4000 | WO2018071831 SEQ ID NO: 1711 |
| AAV variant | 4001 | WO2018071831 SEQ ID NO: 1712 |
| AAV variant | 4002 | WO2018071831 SEQ ID NO: 1713 |
| AAV variant | 4003 | WO2018071831 SEQ ID NO: 1714 |
| AAV variant | 4004 | WO2018071831 SEQ ID NO: 1715 |
| AAV variant | 4005 | WO2018071831 SEQ ID NO: 1716 |
| AAV variant | 4006 | WO2018071831 SEQ ID NO: 1717 |
| AAV variant | 4007 | WO2018071831 SEQ ID NO: 1718 |
| AAV2 variant | 4008 | WO2018071831 SEQ ID NO: 1726 |
| AAV2 variant | 4009 | WO2018071831 SEQ ID NO: 1727 |
| AAV2 variant | 4010 | WO2018071831 SEQ ID NO: 1728 |
| AAV2 variant | 4011 | WO2018071831 SEQ ID NO: 1729 |
| AAV2 variant | 4012 | WO2018071831 SEQ ID NO: 1730 |
| AAV2 variant | 4013 | WO2018071831 SEQ ID NO: 1731 |
| AAV2 variant | 4014 | WO2018071831 SEQ ID NO: 1732 |
| AAV2 variant | 4015 | WO2018071831 SEQ ID NO: 1733 |
| AAV2 variant | 4016 | WO2018071831 SEQ ID NO: 1734 |
| AAV2 variant | 4017 | WO2018071831 SEQ ID NO: 1735 |
| AAV2 variant | 4018 | WO2018071831 SEQ ID NO: 1736 |
| AAV2 variant | 4019 | WO2018071831 SEQ ID NO: 1737 |
| AAV2 variant | 4020 | WO2018071831 SEQ ID NO: 1738 |
| AAV2 variant | 4021 | WO2018071831 SEQ ID NO: 1739 |
| AAV2 variant | 4022 | WO2018071831 SEQ ID NO: 1740 |
| AAV2 variant | 4023 | WO2018071831 SEQ ID NO: 1741 |
| AAV2 variant | 4024 | WO2018071831 SEQ ID NO: 1742 |
| AAV2 variant | 4025 | WO2018071831 SEQ ID NO: 1743 |
| AAV2 variant | 4026 | WO2018071831 SEQ ID NO: 1744 |
| AAV2 variant | 4027 | WO2018071831 SEQ ID NO: 1745 |
| AAV2 variant | 4028 | WO2018071831 SEQ ID NO: 1746 |
| AAV2 variant | 4029 | WO2018071831 SEQ ID NO: 1747 |
| AAV2 variant | 4030 | WO2018071831 SEQ ID NO: 1748 |
| AAV2 variant | 4031 | WO2018071831 SEQ ID NO: 1749 |
| AAV2 variant | 4032 | WO2018071831 SEQ ID NO: 1750 |
| AAV2 variant | 4033 | WO2018071831 SEQ ID NO: 1751 |
| AAV2 variant | 4034 | WO2018071831 SEQ ID NO: 1752 |
| AAV2 variant | 4035 | WO2018071831 SEQ ID NO: 1753 |
| AAV2 variant | 4036 | WO2018071831 SEQ ID NO: 1754 |
| AAV2 variant | 4037 | WO2018071831 SEQ ID NO: 1755 |
| AAV2 variant | 4038 | WO2018071831 SEQ ID NO: 1756 |
| AAV2 variant | 4039 | WO2018071831 SEQ ID NO: 1757 |
| AAV2 variant | 4040 | WO2018071831 SEQ ID NO: 1758 |
| AAV2 variant | 4041 | WO2018071831 SEQ ID NO: 1759 |
| AAV2 variant | 4042 | WO2018071831 SEQ ID NO: 1760 |
| AAV2 variant | 4043 | WO2018071831 SEQ ID NO: 1761 |
| AAV2 variant | 4044 | WO2018071831 SEQ ID NO: 1762 |
| AAV2 variant | 4045 | WO2018071831 SEQ ID NO: 1763 |
| AAV2 variant | 4046 | WO2018071831 SEQ ID NO: 1764 |
| AAV2 variant | 4047 | WO2018071831 SEQ ID NO: 1765 |
| AAV2 variant | 4048 | WO2018071831 SEQ ID NO: 1766 |
| AAV2 variant | 4049 | WO2018071831 SEQ ID NO: 1767 |
| AAV2 variant | 4050 | WO2018071831 SEQ ID NO: 1768 |
| AAV2 variant | 4051 | WO2018071831 SEQ ID NO: 1769 |
| AAV2 variant | 4052 | WO2018071831 SEQ ID NO: 1770 |
| AAV2 variant | 4053 | WO2018071831 SEQ ID NO: 1771 |
| AAV2 variant | 4054 | WO2018071831 SEQ ID NO: 1772 |
| AAV2 variant | 4055 | WO2018071831 SEQ ID NO: 1773 |
| AAV2 variant | 4056 | WO2018071831 SEQ ID NO: 1774 |
| AAV2 variant | 4057 | WO2018071831 SEQ ID NO: 1775 |
| AAV2 variant | 4058 | WO2018071831 SEQ ID NO: 1776 |
| AAV2 variant | 4059 | WO2018071831 SEQ ID NO: 1777 |
| AAV2 variant | 4060 | WO2018071831 SEQ ID NO: 1778 |
| AAV2 variant | 4061 | WO2018071831 SEQ ID NO: 1779 |
| AAV2 variant | 4062 | WO2018071831 SEQ ID NO: 1780 |
| AAV2 variant | 4063 | WO2018071831 SEQ ID NO: 1781 |
| AAV2 variant | 4064 | WO2018071831 SEQ ID NO: 1782 |
| AAV2 variant | 4065 | WO2018071831 SEQ ID NO: 1783 |
| AAV2 variant | 4066 | WO2018071831 SEQ ID NO: 1784 |
| AAV2 variant | 4067 | WO2018071831 SEQ ID NO: 1785 |
| AAV2 variant | 4068 | WO2018071831 SEQ ID NO: 1786 |
| AAV2 variant | 4069 | WO2018071831 SEQ ID NO: 1787 |
| AAV2 variant | 4070 | WO2018071831 SEQ ID NO: 1788 |
| AAV2 variant | 4071 | WO2018071831 SEQ ID NO: 1789 |
| AAV2 variant | 4072 | WO2018071831 SEQ ID NO: 1790 |
| AAV2 variant | 4073 | WO2018071831 SEQ ID NO: 1791 |
| AAV2 variant | 4074 | WO2018071831 SEQ ID NO: 1792 |
| AAV2 variant | 4075 | WO2018071831 SEQ ID NO: 1793 |
| AAV2 variant | 4076 | WO2018071831 SEQ ID NO: 1794 |
| AAV2 variant | 4077 | WO2018071831 SEQ ID NO: 1795 |
| AAV2 variant | 4078 | WO2018071831 SEQ ID NO: 1796 |
| AAV2 variant | 4079 | WO2018071831 SEQ ID NO: 1797 |
| AAV2 variant | 4080 | WO2018071831 SEQ ID NO: 1798 |
| AAV2 variant | 4081 | WO2018071831 SEQ ID NO: 1799 |
| AAV2 variant | 4082 | WO2018071831 SEQ ID NO: 1800 |
| AAV2 variant | 4083 | WO2018071831 SEQ ID NO: 1801 |
| AAV2 variant | 4084 | WO2018071831 SEQ ID NO: 1802 |
| AAV2 variant | 4085 | WO2018071831 SEQ ID NO: 1803 |
| AAV2 variant | 4086 | WO2018071831 SEQ ID NO: 1804 |
| AAV2 variant | 4087 | WO2018071831 SEQ ID NO: 1805 |
| AAV2 variant | 4088 | WO2018071831 SEQ ID NO: 1806 |
| AAV2 variant | 4089 | WO2018071831 SEQ ID NO: 1807 |
| AAV2 variant | 4090 | WO2018071831 SEQ ID NO: 1808 |
| AAV2 variant | 4091 | WO2018071831 SEQ ID NO: 1809 |
| AAV2 variant | 4092 | WO2018071831 SEQ ID NO: 1810 |
| AAV2 variant | 4093 | WO2018071831 SEQ ID NO: 1811 |
| AAV2 variant | 4094 | WO2018071831 SEQ ID NO: 1812 |
| AAV2 variant | 4095 | WO2018071831 SEQ ID NO: 1813 |
| AAV2 variant | 4096 | WO2018071831 SEQ ID NO: 1814 |
| AAV2/3 variant | 4097 | WO2018071831 SEQ ID NO: 1815 |
| AAV2/3 variant | 4098 | WO2018071831 SEQ ID NO: 1816 |
| AAV2/3 variant | 4099 | WO2018071831 SEQ ID NO: 1817 |
| AAV2/3 variant | 4100 | WO2018071831 SEQ ID NO: 1818 |
| AAV2/3 variant | 4101 | WO2018071831 SEQ ID NO: 1819 |
| AAV2/3 variant | 4102 | WO2018071831 SEQ ID NO: 1820 |
| AAV2/3 variant | 4103 | WO2018071831 SEQ ID NO: 1821 |
| AAV2/3 variant | 4104 | WO2018071831 SEQ ID NO: 1822 |
| AAV2/3 variant | 4105 | WO2018071831 SEQ ID NO: 1823 |
| AAV2/3 variant | 4106 | WO2018071831 SEQ ID NO: 1824 |
| AAV2/3 variant | 4107 | WO2018071831 SEQ ID NO: 1825 |
| AAV2/3 variant | 4108 | WO2018071831 SEQ ID NO: 1826 |
| AAV2/3 variant | 4109 | WO2018071831 SEQ ID NO: 1827 |
| AAV2/3 variant | 4110 | WO2018071831 SEQ ID NO: 1828 |
| AAV2/3 variant | 4111 | WO2018071831 SEQ ID NO: 1829 |
| AAV2/3 variant | 4112 | WO2018071831 SEQ ID NO: 1830 |
| AAV2/3 variant | 4113 | WO2018071831 SEQ ID NO: 1831 |
| AAV2/3 variant | 4114 | WO2018071831 SEQ ID NO: 1832 |
| AAV2/3 variant | 4115 | WO2018071831 SEQ ID NO: 1833 |
| AAV2/3 variant | 4116 | WO2018071831 SEQ ID NO: 1834 |
| AAV2/3 variant | 4117 | WO2018071831 SEQ ID NO: 1835 |
| AAV2/3 variant | 4118 | WO2018071831 SEQ ID NO: 1836 |
| AAV2/3 variant | 4119 | WO2018071831 SEQ ID NO: 1837 |
| AAV2/3 variant | 4120 | WO2018071831 SEQ ID NO: 1838 |
| AAV2/3 variant | 4121 | WO2018071831 SEQ ID NO: 1839 |
| AAV2/3 variant | 4122 | WO2018071831 SEQ ID NO: 1840 |
| AAV2/3 variant | 4123 | WO2018071831 SEQ ID NO: 1841 |
| AAV2/3 variant | 4124 | WO2018071831 SEQ ID NO: 1842 |
| AAV2/3 variant | 4125 | WO2018071831 SEQ ID NO: 1843 |
| AAV2/3 variant | 4126 | WO2018071831 SEQ ID NO: 1844 |
| AAV2/3 variant | 4127 | WO2018071831 SEQ ID NO: 1845 |
| AAV2/3 variant | 4128 | WO2018071831 SEQ ID NO: 1846 |
| AAV2/3 variant | 4129 | WO2018071831 SEQ ID NO: 1847 |
| AAV2/3 variant | 4130 | WO2018071831 SEQ ID NO: 1848 |
| AAV2/3 variant | 4131 | WO2018071831 SEQ ID NO: 1849 |
| AAV2/3 variant | 4132 | WO2018071831 SEQ ID NO: 1850 |
| AAV2/3 variant | 4133 | WO2018071831 SEQ ID NO: 1851 |
| AAV2/3 variant | 4134 | WO2018071831 SEQ ID NO: 1852 |
| AAV2/3 variant | 4135 | WO2018071831 SEQ ID NO: 1853 |
| AAV2/3 variant | 4136 | WO2018071831 SEQ ID NO: 1854 |
| AAV2/3 variant | 4137 | WO2018071831 SEQ ID NO: 1855 |
| AAV2/3 variant | 4138 | WO2018071831 SEQ ID NO: 1856 |
| AAV2/3 variant | 4139 | WO2018071831 SEQ ID NO: 1857 |
| AAV2/3 variant | 4140 | WO2018071831 SEQ ID NO: 1858 |
| AAV2/3 variant | 4141 | WO2018071831 SEQ ID NO: 1859 |
| AAV2/3 variant | 4142 | WO2018071831 SEQ ID NO: 1860 |
| AAV2/3 variant | 4143 | WO2018071831 SEQ ID NO: 1861 |
| AAV2/3 variant | 4144 | WO2018071831 SEQ ID NO: 1862 |
| AAV2/3 variant | 4145 | WO2018071831 SEQ ID NO: 1863 |
| AAV2/3 variant | 4146 | WO2018071831 SEQ ID NO: 1864 |
| AAV2/3 variant | 4147 | WO2018071831 SEQ ID NO: 1865 |
| AAV2/3 variant | 4148 | WO2018071831 SEQ ID NO: 1866 |
| AAV2/3 variant | 4149 | WO2018071831 SEQ ID NO: 1867 |
| AAV2/3 variant | 4150 | WO2018071831 SEQ ID NO: 1868 |
| AAV2/3 variant | 4151 | WO2018071831 SEQ ID NO: 1869 |
| AAV2/3 variant | 4152 | WO2018071831 SEQ ID NO: 1870 |
| AAV2/3 variant | 4153 | WO2018071831 SEQ ID NO: 1871 |
| AAV2/3 variant | 4154 | WO2018071831 SEQ ID NO: 1872 |
| AAV2/3 variant | 4155 | WO2018071831 SEQ ID NO: 1873 |
| AAV2/3 variant | 4156 | WO2018071831 SEQ ID NO: 1874 |
| AAV2/3 variant | 4157 | WO2018071831 SEQ ID NO: 1875 |
| AAV2/3 variant | 4158 | WO2018071831 SEQ ID NO: 1876 |
| AAV2/3 variant | 4159 | WO2018071831 SEQ ID NO: 1877 |
| AAV2/3 variant | 4160 | WO2018071831 SEQ ID NO: 1878 |
| AAV2/3 variant | 4161 | WO2018071831 SEQ ID NO: 1879 |
| AAV2/3 variant | 4162 | WO2018071831 SEQ ID NO: 1880 |
| AAV2/3 variant | 4163 | WO2018071831 SEQ ID NO: 1881 |
| AAV2/3 variant | 4164 | WO2018071831 SEQ ID NO: 1882 |
| AAV2/3 variant | 4165 | WO2018071831 SEQ ID NO: 1883 |
| AAV2/3 variant | 4166 | WO2018071831 SEQ ID NO: 1884 |
| AAV2/3 variant | 4167 | WO2018071831 SEQ ID NO: 1885 |
| AAV2/3 variant | 4168 | WO2018071831 SEQ ID NO: 1886 |
| AAV2/3 variant | 4169 | WO2018071831 SEQ ID NO: 1887 |
| AAV2/3 variant | 4170 | WO2018071831 SEQ ID NO: 1888 |
| AAV2/3 variant | 4171 | WO2018071831 SEQ ID NO: 1889 |
| AAV2/3 variant | 4172 | WO2018071831 SEQ ID NO: 1890 |
| AAV2/3 variant | 4173 | WO2018071831 SEQ ID NO: 1891 |
| AAV2/3 variant | 4174 | WO2018071831 SEQ ID NO: 1892 |
| AAV2/3 variant | 4175 | WO2018071831 SEQ ID NO: 1893 |
| AAV2/3 variant | 4176 | WO2018071831 SEQ ID NO: 1894 |
| AAV2/3 variant | 4177 | WO2018071831 SEQ ID NO: 1895 |
| AAV2/3 variant | 4178 | WO2018071831 SEQ ID NO: 1896 |
| AAV2/3 variant | 4179 | WO2018071831 SEQ ID NO: 1897 |
| AAV2/3 variant | 4180 | WO2018071831 SEQ ID NO: 1898 |
| AAV2/3 variant | 4181 | WO2018071831 SEQ ID NO: 1899 |
| AAV2/3 variant | 4182 | WO2018071831 SEQ ID NO: 1900 |
| AAV2/3 variant | 4183 | WO2018071831 SEQ ID NO: 1901 |
| AAV2/3 variant | 4184 | WO2018071831 SEQ ID NO: 1902 |
| AAV2/3 variant | 4185 | WO2018071831 SEQ ID NO: 1903 |
| AAV2/3 variant | 4186 | WO2018071831 SEQ ID NO: 1904 |
| AAV2/3 variant | 4187 | WO2018071831 SEQ ID NO: 1905 |
| AAV2/3 variant | 4188 | WO2018071831 SEQ ID NO: 1906 |
| AAV2/3 variant | 4189 | WO2018071831 SEQ ID NO: 1907 |
| AAV2/3 variant | 4190 | WO2018071831 SEQ ID NO: 1908 |
| AAV2/3 variant | 4191 | WO2018071831 SEQ ID NO: 1909 |
| AAV2/3 variant | 4192 | WO2018071831 SEQ ID NO: 1910 |
| AAV2/3 variant | 4193 | WO2018071831 SEQ ID NO: 1911 |
| AAV2/3 variant | 4194 | WO2018071831 SEQ ID NO: 1912 |
| AAV2/3 variant | 4195 | WO2018071831 SEQ ID NO: 1913 |
| AAV2/3 variant | 4196 | WO2018071831 SEQ ID NO: 1914 |
| AAV2/3 variant | 4197 | WO2018071831 SEQ ID NO: 1915 |
| AAV2/3 variant | 4198 | WO2018071831 SEQ ID NO: 1916 |
| AAV2/3 variant | 4199 | WO2018071831 SEQ ID NO: 1917 |
| AAV2/3 variant | 4200 | WO2018071831 SEQ ID NO: 1918 |
| AAV2/3 variant | 4201 | WO2018071831 SEQ ID NO: 1919 |
| AAV2/3 variant | 4202 | WO2018071831 SEQ ID NO: 1920 |
| AAV2/3 variant | 4203 | WO2018071831 SEQ ID NO: 1921 |
| AAV2/3 variant | 4204 | WO2018071831 SEQ ID NO: 1922 |
| AAV2/3 variant | 4205 | WO2018071831 SEQ ID NO: 1923 |
| AAV2/3 variant | 4206 | WO2018071831 SEQ ID NO: 1924 |
| AAV2/3 variant | 4207 | WO2018071831 SEQ ID NO: 1925 |
| AAV2/3 variant | 4208 | WO2018071831 SEQ ID NO: 1926 |
| AAV2/3 variant | 4209 | WO2018071831 SEQ ID NO: 1927 |
| AAV2/3 variant | 4210 | WO2018071831 SEQ ID NO: 1928 |
| AAV2/3 variant | 4211 | WO2018071831 SEQ ID NO: 1929 |
| AAV2/3 variant | 4212 | WO2018071831 SEQ ID NO: 1930 |
| AAV2/3 variant | 4213 | WO2018071831 SEQ ID NO: 1931 |
| AAV2/3 variant | 4214 | WO2018071831 SEQ ID NO: 1932 |
| AAV2/3 variant | 4215 | WO2018071831 SEQ ID NO: 1933 |
| AAV2/3 variant | 4216 | WO2018071831 SEQ ID NO: 1934 |
| AAV2/3 variant | 4217 | WO2018071831 SEQ ID NO: 1935 |
| AAV2/3 variant | 4218 | WO2018071831 SEQ ID NO: 1936 |
| AAV2/3 variant | 4219 | WO2018071831 SEQ ID NO: 1937 |
| AAV2/3 variant | 4220 | WO2018071831 SEQ ID NO: 1938 |
| AAV2/3 variant | 4221 | WO2018071831 SEQ ID NO: 1939 |
| AAV2/3 variant | 4222 | WO2018071831 SEQ ID NO: 1940 |
| AAV2/3 variant | 4223 | WO2018071831 SEQ ID NO: 1941 |
| AAV2/3 variant | 4224 | WO2018071831 SEQ ID NO: 1942 |
| AAV2/3 variant | 4225 | WO2018071831 SEQ ID NO: 1943 |
| AAV2/3 variant | 4226 | WO2018071831 SEQ ID NO: 1944 |
| AAV2/3 variant | 4227 | WO2018071831 SEQ ID NO: 1945 |
| AAV2/3 variant | 4228 | WO2018071831 SEQ ID NO: 1946 |
| AAV2/3 variant | 4229 | WO2018071831 SEQ ID NO: 1947 |
| AAV2/3 variant | 4230 | WO2018071831 SEQ ID NO: 1948 |
| AAV2/3 variant | 4231 | WO2018071831 SEQ ID NO: 1949 |
| AAV2/3 variant | 4232 | WO2018071831 SEQ ID NO: 1950 |
| AAV2/3 variant | 4233 | WO2018071831 SEQ ID NO: 1951 |
| AAV2/3 variant | 4234 | WO2018071831 SEQ ID NO: 1952 |
| AAV2/3 variant | 4235 | WO2018071831 SEQ ID NO: 1953 |
| AAV2/3 variant | 4236 | WO2018071831 SEQ ID NO: 1954 |
| AAV2/3 variant | 4237 | WO2018071831 SEQ ID NO: 1955 |
| AAV2/3 variant | 4238 | WO2018071831 SEQ ID NO: 1956 |
| AAV2/3 variant | 4239 | WO2018071831 SEQ ID NO: 1957 |
| AAV2/3 variant | 4240 | WO2018071831 SEQ ID NO: 1958 |
| AAV2/3 variant | 4241 | WO2018071831 SEQ ID NO: 1959 |
| AAV2/3 variant | 4242 | WO2018071831 SEQ ID NO: 1960 |
| AAV2/3 variant | 4243 | WO2018071831 SEQ ID NO: 1961 |
| AAV2/3 variant | 4244 | WO2018071831 SEQ ID NO: 1962 |
| AAV2/3 variant | 4245 | WO2018071831 SEQ ID NO: 1963 |
| AAV2/3 variant | 4246 | WO2018071831 SEQ ID NO: 1964 |
| AAV2/3 variant | 4247 | WO2018071831 SEQ ID NO: 1965 |
| AAV2/3 variant | 4248 | WO2018071831 SEQ ID NO: 1966 |
| AAV2/3 variant | 4249 | WO2018071831 SEQ ID NO: 1967 |
| AAV2/3 variant | 4250 | WO2018071831 SEQ ID NO: 1968 |
| AAV2/3 variant | 4251 | WO2018071831 SEQ ID NO: 1969 |
| AAV2/3 variant | 4252 | WO2018071831 SEQ ID NO: 1970 |
| AAV2/3 variant | 4253 | WO2018071831 SEQ ID NO: 1971 |
| AAV2/3 variant | 4254 | WO2018071831 SEQ ID NO: 1972 |
| AAV2/3 variant | 4255 | WO2018071831 SEQ ID NO: 1973 |
| AAV2/3 variant | 4256 | WO2018071831 SEQ ID NO: 1974 |
| AAV2/3 variant | 4257 | WO2018071831 SEQ ID NO: 1975 |
| AAV2/3 variant | 4258 | WO2018071831 SEQ ID NO: 1976 |
| AAV2/3 variant | 4259 | WO2018071831 SEQ ID NO: 1977 |
| AAV2/3 variant | 4260 | WO2018071831 SEQ ID NO: 1978 |
| AAV2/3 variant | 4261 | WO2018071831 SEQ ID NO: 1979 |
| AAV2/3 variant | 4262 | WO2018071831 SEQ ID NO: 1980 |
| AAV2/3 variant | 4263 | WO2018071831 SEQ ID NO: 1981 |
| AAV2/3 variant | 4264 | WO2018071831 SEQ ID NO: 1982 |
| AAV2/3 variant | 4265 | WO2018071831 SEQ ID NO: 1983 |
| AAV2/3 variant | 4266 | WO2018071831 SEQ ID NO: 1984 |
| AAV2/3 variant | 4267 | WO2018071831 SEQ ID NO: 1985 |
| AAV2/3 variant | 4268 | WO2018071831 SEQ ID NO: 1986 |
| AAV2/3 variant | 4269 | WO2018071831 SEQ ID NO: 1987 |
| AAV2/3 variant | 4270 | WO2018071831 SEQ ID NO: 1988 |
| AAV2 variant | 4271 | WO2018071831 SEQ ID NO: 1989 |
| AAV2 variant | 4272 | WO2018071831 SEQ ID NO: 1990 |
| AAV2 variant | 4273 | WO2018071831 SEQ ID NO: 1991 |
| AAV2 variant | 4274 | WO2018071831 SEQ ID NO: 1992 |
| AAV2 variant | 4275 | WO2018071831 SEQ ID NO: 1993 |
| AAV2 variant | 4276 | WO2018071831 SEQ ID NO: 1994 |
| AAV2 variant | 4277 | WO2018071831 SEQ ID NO: 1995 |
| AAV2 variant | 4278 | WO2018071831 SEQ ID NO: 1996 |
| AAV2 variant | 4279 | WO2018071831 SEQ ID NO: 1997 |
| AAV2 variant | 4280 | WO2018071831 SEQ ID NO: 1998 |
| AAV2 variant | 4281 | WO2018071831 SEQ ID NO: 1999 |
| AAV2 variant | 4282 | WO2018071831 SEQ ID NO: 2000 |
| AAV2 variant | 4283 | WO2018071831 SEQ ID NO: 2001 |
| AAV2 variant | 4284 | WO2018071831 SEQ ID NO: 2002 |
| AAV2 variant | 4285 | WO2018071831 SEQ ID NO: 2003 |
| AAV2 variant | 4286 | WO2018071831 SEQ ID NO: 2004 |
| AAV2 variant | 4287 | WO2018071831 SEQ ID NO: 2005 |
| AAV2 variant | 4288 | WO2018071831 SEQ ID NO: 2006 |
| AAV2 variant | 4289 | WO2018071831 SEQ ID NO: 2007 |
| AAV2 variant | 4290 | WO2018071831 SEQ ID NO: 2008 |
| AAV2 variant | 4291 | WO2018071831 SEQ ID NO: 2009 |
| AAV2 variant | 4292 | WO2018071831 SEQ ID NO: 2010 |
| AAV2 variant | 4293 | WO2018071831 SEQ ID NO: 2011 |
| AAV2 variant | 4294 | WO2018071831 SEQ ID NO: 2012 |
| AAV2 variant | 4295 | WO2018071831 SEQ ID NO: 2013 |
| AAV2 variant | 4296 | WO2018071831 SEQ ID NO: 2014 |
| AAV2 variant | 4297 | WO2018071831 SEQ ID NO: 2015 |
| AAV2 variant | 4298 | WO2018071831 SEQ ID NO: 2016 |
| AAV2 variant | 4299 | WO2018071831 SEQ ID NO: 2017 |
| AAV2 variant | 4300 | WO2018071831 SEQ ID NO: 2018 |
| AAV2 variant | 4301 | WO2018071831 SEQ ID NO: 2019 |
| AAV2 variant | 4302 | WO2018071831 SEQ ID NO: 2020 |
| AAV2 variant | 4303 | WO2018071831 SEQ ID NO: 2021 |
| AAV2 variant | 4304 | WO2018071831 SEQ ID NO: 2022 |
| AAV2 variant | 4305 | WO2018071831 SEQ ID NO: 2023 |
| AAV2 variant | 4306 | WO2018071831 SEQ ID NO: 2024 |
| AAV2 variant | 4307 | WO2018071831 SEQ ID NO: 2025 |
| AAV2 variant | 4308 | WO2018071831 SEQ ID NO: 2026 |
| AAV2 variant | 4309 | WO2018071831 SEQ ID NO: 2027 |
| AAV2 variant | 4310 | WO2018071831 SEQ ID NO: 2028 |
| AAV2 variant | 4311 | WO2018071831 SEQ ID NO: 2029 |
| AAV2 variant | 4312 | WO2018071831 SEQ ID NO: 2030 |
| AAV2 variant | 4313 | WO2018071831 SEQ ID NO: 2031 |
| AAV2 variant | 4314 | WO2018071831 SEQ ID NO: 2032 |
| AAV2 variant | 4315 | WO2018071831 SEQ ID NO: 2033 |
| AAV2 variant | 4316 | WO2018071831 SEQ ID NO: 2034 |
| AAV2 variant | 4317 | WO2018071831 SEQ ID NO: 2035 |
| AAV2 variant | 4318 | WO2018071831 SEQ ID NO: 2036 |
| AAV2 variant | 4319 | WO2018071831 SEQ ID NO: 2037 |
| AAV2 variant | 4320 | WO2018071831 SEQ ID NO: 2038 |
| AAV2 variant | 4321 | WO2018071831 SEQ ID NO: 2039 |
| AAV2 variant | 4322 | WO2018071831 SEQ ID NO: 2040 |
| AAV2 variant | 4323 | WO2018071831 SEQ ID NO: 2041 |
| AAV2 variant | 4324 | WO2018071831 SEQ ID NO: 2042 |
| AAV2 variant | 4325 | WO2018071831 SEQ ID NO: 2043 |
| AAV2 variant | 4326 | WO2018071831 SEQ ID NO: 2044 |
| AAV2 variant | 4327 | WO2018071831 SEQ ID NO: 2045 |
| AAV2 variant | 4328 | WO2018071831 SEQ ID NO: 2046 |
| AAV2 variant | 4329 | WO2018071831 SEQ ID NO: 2047 |
| AAV2 variant | 4330 | WO2018071831 SEQ ID NO: 2048 |
| AAV2 variant | 4331 | WO2018071831 SEQ ID NO: 2049 |
| AAV2 variant | 4332 | WO2018071831 SEQ ID NO: 2050 |
| AAV2 variant | 4333 | WO2018071831 SEQ ID NO: 2051 |
| AAV2 variant | 4334 | WO2018071831 SEQ ID NO: 2052 |
| AAV2 variant | 4335 | WO2018071831 SEQ ID NO: 2053 |
| AAV2 variant | 4336 | WO2018071831 SEQ ID NO: 2054 |
| AAV2 variant | 4337 | WO2018071831 SEQ ID NO: 2055 |
| AAV2 variant | 4338 | WO2018071831 SEQ ID NO: 2056 |
| AAV2 variant | 4339 | WO2018071831 SEQ ID NO: 2057 |
| AAV2 variant | 4340 | WO2018071831 SEQ ID NO: 2058 |
| AAV2 variant | 4341 | WO2018071831 SEQ ID NO: 2059 |
| AAV2 variant | 4342 | WO2018071831 SEQ ID NO: 2060 |
| AAV2 variant | 4343 | WO2018071831 SEQ ID NO: 2061 |
| AAV2 variant | 4344 | WO2018071831 SEQ ID NO: 2062 |
| AAV2 variant | 4345 | WO2018071831 SEQ ID NO: 2063 |
| AAV2 variant | 4346 | WO2018071831 SEQ ID NO: 2064 |
| AAV2 variant | 4347 | WO2018071831 SEQ ID NO: 2065 |
| AAV2 variant | 4348 | WO2018071831 SEQ ID NO: 2066 |
| AAV2 variant | 4349 | WO2018071831 SEQ ID NO: 2067 |
| AAV2 variant | 4350 | WO2018071831 SEQ ID NO: 2068 |
| AAV2 variant | 4351 | WO2018071831 SEQ ID NO: 2069 |
| AAV2 variant | 4352 | WO2018071831 SEQ ID NO: 2070 |
| AAV2 variant | 4353 | WO2018071831 SEQ ID NO: 2071 |
| AAV2 variant | 4354 | WO2018071831 SEQ ID NO: 2072 |
| AAV2 variant | 4355 | WO2018071831 SEQ ID NO: 2073 |
| AAV2 variant | 4356 | WO2018071831 SEQ ID NO: 2074 |
| AAV2 variant | 4357 | WO2018071831 SEQ ID NO: 2075 |
| AAV2 variant | 4358 | WO2018071831 SEQ ID NO: 2076 |
| AAV2 variant | 4359 | WO2018071831 SEQ ID NO: 2077 |
| AAV2/3 variant | 4360 | WO2018071831 SEQ ID NO: 2078 |
| AAV2/3 variant | 4361 | WO2018071831 SEQ ID NO: 2079 |
| AAV2/3 variant | 4362 | WO2018071831 SEQ ID NO: 2080 |
| AAV2/3 variant | 4363 | WO2018071831 SEQ ID NO: 2081 |
| AAV2/3 variant | 4364 | WO2018071831 SEQ ID NO: 2082 |
| AAV2/3 variant | 4365 | WO2018071831 SEQ ID NO: 2083 |
| AAV2/3 variant | 4366 | WO2018071831 SEQ ID NO: 2084 |
| AAV2/3 variant | 4367 | WO2018071831 SEQ ID NO: 2085 |
| AAV2/3 variant | 4368 | WO2018071831 SEQ ID NO: 2086 |
| AAV2/3 variant | 4369 | WO2018071831 SEQ ID NO: 2087 |
| AAV2/3 variant | 4370 | WO2018071831 SEQ ID NO: 2088 |
| AAV2/3 variant | 4371 | WO2018071831 SEQ ID NO: 2089 |
| AAV2/3 variant | 4372 | WO2018071831 SEQ ID NO: 2090 |
| AAV2/3 variant | 4373 | WO2018071831 SEQ ID NO: 2091 |
| AAV2/3 variant | 4374 | WO2018071831 SEQ ID NO: 2092 |
| AAV2/3 variant | 4375 | WO2018071831 SEQ ID NO: 2093 |
| AAV2/3 variant | 4376 | WO2018071831 SEQ ID NO: 2094 |
| AAV2/3 variant | 4377 | WO2018071831 SEQ ID NO: 2095 |
| AAV2/3 variant | 4378 | WO2018071831 SEQ ID NO: 2096 |
| AAV2/3 variant | 4379 | WO2018071831 SEQ ID NO: 2097 |
| AAV2/3 variant | 4380 | WO2018071831 SEQ ID NO: 2098 |
| AAV2/3 variant | 4381 | WO2018071831 SEQ ID NO: 2099 |
| AAV2/3 variant | 4382 | WO2018071831 SEQ ID NO: 2100 |
| AAV2/3 variant | 4383 | WO2018071831 SEQ ID NO: 2101 |
| AAV2/3 variant | 4384 | WO2018071831 SEQ ID NO: 2102 |
| AAV2/3 variant | 4385 | WO2018071831 SEQ ID NO: 2103 |
| AAV2/3 variant | 4386 | WO2018071831 SEQ ID NO: 2104 |
| AAV2/3 variant | 4387 | WO2018071831 SEQ ID NO: 2105 |
| AAV2/3 variant | 4388 | WO2018071831 SEQ ID NO: 2106 |
| AAV2/3 variant | 4389 | WO2018071831 SEQ ID NO: 2107 |
| AAV2/3 variant | 4390 | WO2018071831 SEQ ID NO: 2108 |
| AAV2/3 variant | 4391 | WO2018071831 SEQ ID NO: 2109 |
| AAV2/3 variant | 4392 | WO2018071831 SEQ ID NO: 2110 |
| AAV2/3 variant | 4393 | WO2018071831 SEQ ID NO: 2111 |
| AAV2/3 variant | 4394 | WO2018071831 SEQ ID NO: 2112 |
| AAV2/3 variant | 4395 | WO2018071831 SEQ ID NO: 2113 |
| AAV2/3 variant | 4396 | WO2018071831 SEQ ID NO: 2114 |
| AAV2/3 variant | 4397 | WO2018071831 SEQ ID NO: 2115 |
| AAV2/3 variant | 4398 | WO2018071831 SEQ ID NO: 2116 |
| AAV2/3 variant | 4399 | WO2018071831 SEQ ID NO: 2117 |
| AAV2/3 variant | 4400 | WO2018071831 SEQ ID NO: 2118 |
| AAV2/3 variant | 4401 | WO2018071831 SEQ ID NO: 2119 |
| AAV2/3 variant | 4402 | WO2018071831 SEQ ID NO: 2120 |
| AAV2/3 variant | 4403 | WO2018071831 SEQ ID NO: 2121 |
| AAV2/3 variant | 4404 | WO2018071831 SEQ ID NO: 2122 |
| AAV2/3 variant | 4405 | WO2018071831 SEQ ID NO: 2123 |
| AAV2/3 variant | 4406 | WO2018071831 SEQ ID NO: 2124 |
| AAV2/3 variant | 4407 | WO2018071831 SEQ ID NO: 2125 |
| AAV2/3 variant | 4408 | WO2018071831 SEQ ID NO: 2126 |
| AAV2/3 variant | 4409 | WO2018071831 SEQ ID NO: 2127 |
| AAV2/3 variant | 4410 | WO2018071831 SEQ ID NO: 2128 |
| AAV2/3 variant | 4411 | WO2018071831 SEQ ID NO: 2129 |
| AAV2/3 variant | 4412 | WO2018071831 SEQ ID NO: 2130 |
| AAV2/3 variant | 4413 | WO2018071831 SEQ ID NO: 2131 |
| AAV2/3 variant | 4414 | WO2018071831 SEQ ID NO: 2132 |
| AAV2/3 variant | 4415 | WO2018071831 SEQ ID NO: 2133 |
| AAV2/3 variant | 4416 | WO2018071831 SEQ ID NO: 2134 |
| AAV2/3 variant | 4417 | WO2018071831 SEQ ID NO: 2135 |
| AAV2/3 variant | 4418 | WO2018071831 SEQ ID NO: 2136 |
| AAV2/3 variant | 4419 | WO2018071831 SEQ ID NO: 2137 |
| AAV2/3 variant | 4420 | WO2018071831 SEQ ID NO: 2138 |
| AAV2/3 variant | 4421 | WO2018071831 SEQ ID NO: 2139 |
| AAV2/3 variant | 4422 | WO2018071831 SEQ ID NO: 2140 |
| AAV2/3 variant | 4423 | WO2018071831 SEQ ID NO: 2141 |
| AAV2/3 variant | 4424 | WO2018071831 SEQ ID NO: 2142 |
| AAV2/3 variant | 4425 | WO2018071831 SEQ ID NO: 2143 |
| AAV2/3 variant | 4426 | WO2018071831 SEQ ID NO: 2144 |
| AAV2/3 variant | 4427 | WO2018071831 SEQ ID NO: 2145 |
| AAV2/3 variant | 4428 | WO2018071831 SEQ ID NO: 2146 |
| AAV2/3 variant | 4429 | WO2018071831 SEQ ID NO: 2147 |
| AAV2/3 variant | 4430 | WO2018071831 SEQ ID NO: 2148 |
| AAV2/3 variant | 4431 | WO2018071831 SEQ ID NO: 2149 |
| AAV2/3 variant | 4432 | WO2018071831 SEQ ID NO: 2150 |
| AAV2/3 variant | 4433 | WO2018071831 SEQ ID NO: 2151 |
| AAV2/3 variant | 4434 | WO2018071831 SEQ ID NO: 2152 |
| AAV2/3 variant | 4435 | WO2018071831 SEQ ID NO: 2153 |
| AAV2/3 variant | 4436 | WO2018071831 SEQ ID NO: 2154 |
| AAV2/3 variant | 4437 | WO2018071831 SEQ ID NO: 2155 |
| AAV2/3 variant | 4438 | WO2018071831 SEQ ID NO: 2156 |
| AAV2/3 variant | 4439 | WO2018071831 SEQ ID NO: 2157 |
| AAV2/3 variant | 4440 | WO2018071831 SEQ ID NO: 2158 |
| AAV2/3 variant | 4441 | WO2018071831 SEQ ID NO: 2159 |
| AAV2/3 variant | 4442 | WO2018071831 SEQ ID NO: 2160 |
| AAV2/3 variant | 4443 | WO2018071831 SEQ ID NO: 2161 |
| AAV2/3 variant | 4444 | WO2018071831 SEQ ID NO: 2162 |
| AAV2/3 variant | 4445 | WO2018071831 SEQ ID NO: 2163 |
| AAV2/3 variant | 4446 | WO2018071831 SEQ ID NO: 2164 |
| AAV2/3 variant | 4447 | WO2018071831 SEQ ID NO: 2165 |
| AAV2/3 variant | 4448 | WO2018071831 SEQ ID NO: 2166 |
| AAV2/3 variant | 4449 | WO2018071831 SEQ ID NO: 2167 |
| AAV2/3 variant | 4450 | WO2018071831 SEQ ID NO: 2168 |
| AAV2/3 variant | 4451 | WO2018071831 SEQ ID NO: 2169 |
| AAV2/3 variant | 4452 | WO2018071831 SEQ ID NO: 2170 |
| AAV2/3 variant | 4453 | WO2018071831 SEQ ID NO: 2171 |
| AAV2/3 variant | 4454 | WO2018071831 SEQ ID NO: 2172 |
| AAV2/3 variant | 4455 | WO2018071831 SEQ ID NO: 2173 |
| AAV2/3 variant | 4456 | WO2018071831 SEQ ID NO: 2174 |
| AAV2/3 variant | 4457 | WO2018071831 SEQ ID NO: 2175 |
| AAV2/3 variant | 4458 | WO2018071831 SEQ ID NO: 2176 |
| AAV2/3 variant | 4459 | WO2018071831 SEQ ID NO: 2177 |
| AAV2/3 variant | 4460 | WO2018071831 SEQ ID NO: 2178 |
| AAV2/3 variant | 4461 | WO2018071831 SEQ ID NO: 2179 |
| AAV2/3 variant | 4462 | WO2018071831 SEQ ID NO: 2180 |
| AAV2/3 variant | 4463 | WO2018071831 SEQ ID NO: 2181 |
| AAV2/3 variant | 4464 | WO2018071831 SEQ ID NO: 2182 |
| AAV2/3 variant | 4465 | WO2018071831 SEQ ID NO: 2183 |
| AAV2/3 variant | 4466 | WO2018071831 SEQ ID NO: 2184 |
| AAV2/3 variant | 4467 | WO2018071831 SEQ ID NO: 2185 |
| AAV2/3 variant | 4468 | WO2018071831 SEQ ID NO: 2186 |
| AAV2/3 variant | 4469 | WO2018071831 SEQ ID NO: 2187 |
| AAV2/3 variant | 4470 | WO2018071831 SEQ ID NO: 2188 |
| AAV2/3 variant | 4471 | WO2018071831 SEQ ID NO: 2189 |
| AAV2/3 variant | 4472 | WO2018071831 SEQ ID NO: 2190 |
| AAV2/3 variant | 4473 | WO2018071831 SEQ ID NO: 2191 |
| AAV2/3 variant | 4474 | WO2018071831 SEQ ID NO: 2192 |
| AAV2/3 variant | 4475 | WO2018071831 SEQ ID NO: 2193 |
| AAV2/3 variant | 4476 | WO2018071831 SEQ ID NO: 2194 |
| AAV2/3 variant | 4477 | WO2018071831 SEQ ID NO: 2195 |
| AAV2/3 variant | 4478 | WO2018071831 SEQ ID NO: 2196 |
| AAV2/3 variant | 4479 | WO2018071831 SEQ ID NO: 2197 |
| AAV2/3 variant | 4480 | WO2018071831 SEQ ID NO: 2198 |
| AAV2/3 variant | 4481 | WO2018071831 SEQ ID NO: 2199 |
| AAV2/3 variant | 4482 | WO2018071831 SEQ ID NO: 2200 |
| AAV2/3 variant | 4483 | WO2018071831 SEQ ID NO: 2201 |
| AAV2/3 variant | 4484 | WO2018071831 SEQ ID NO: 2202 |
| AAV2/3 variant | 4485 | WO2018071831 SEQ ID NO: 2203 |
| AAV2/3 variant | 4486 | WO2018071831 SEQ ID NO: 2204 |
| AAV2/3 variant | 4487 | WO2018071831 SEQ ID NO: 2205 |
| AAV2/3 variant | 4488 | WO2018071831 SEQ ID NO: 2206 |
| AAV2/3 variant | 4489 | WO2018071831 SEQ ID NO: 2207 |
| AAV2/3 variant | 4490 | WO2018071831 SEQ ID NO: 2208 |
| AAV2/3 variant | 4491 | WO2018071831 SEQ ID NO: 2209 |
| AAV2/3 variant | 4492 | WO2018071831 SEQ ID NO: 2210 |
| AAV2/3 variant | 4493 | WO2018071831 SEQ ID NO: 2211 |
| AAV2/3 variant | 4494 | WO2018071831 SEQ ID NO: 2212 |
| AAV2/3 variant | 4495 | WO2018071831 SEQ ID NO: 2213 |
| AAV2/3 variant | 4496 | WO2018071831 SEQ ID NO: 2214 |
| AAV2/3 variant | 4497 | WO2018071831 SEQ ID NO: 2215 |
| AAV2/3 variant | 4498 | WO2018071831 SEQ ID NO: 2216 |
| AAV2/3 variant | 4499 | WO2018071831 SEQ ID NO: 2217 |
| AAV2/3 variant | 4500 | WO2018071831 SEQ ID NO: 2218 |
| AAV2/3 variant | 4501 | WO2018071831 SEQ ID NO: 2219 |
| AAV2/3 variant | 4502 | WO2018071831 SEQ ID NO: 2220 |
| AAV2/3 variant | 4503 | WO2018071831 SEQ ID NO: 2221 |
| AAV2/3 variant | 4504 | WO2018071831 SEQ ID NO: 2222 |
| AAV2/3 variant | 4505 | WO2018071831 SEQ ID NO: 2223 |
| AAV2/3 variant | 4506 | WO2018071831 SEQ ID NO: 2224 |
| AAV2/3 variant | 4507 | WO2018071831 SEQ ID NO: 2225 |
| AAV2/3 variant | 4508 | WO2018071831 SEQ ID NO: 2226 |
| AAV2/3 variant | 4509 | WO2018071831 SEQ ID NO: 2227 |
| AAV2/3 variant | 4510 | WO2018071831 SEQ ID NO: 2228 |
| AAV2/3 variant | 4511 | WO2018071831 SEQ ID NO: 2229 |
| AAV2/3 variant | 4512 | WO2018071831 SEQ ID NO: 2230 |
| AAV2/3 variant | 4513 | WO2018071831 SEQ ID NO: 2231 |
| AAV2/3 variant | 4514 | WO2018071831 SEQ ID NO: 2232 |
| AAV2/3 variant | 4515 | WO2018071831 SEQ ID NO: 2233 |
| AAV2/3 variant | 4516 | WO2018071831 SEQ ID NO: 2234 |
| AAV2/3 variant | 4517 | WO2018071831 SEQ ID NO: 2235 |
| AAV2/3 variant | 4518 | WO2018071831 SEQ ID NO: 2236 |
| AAV2/3 variant | 4519 | WO2018071831 SEQ ID NO: 2237 |
| AAV2/3 variant | 4520 | WO2018071831 SEQ ID NO: 2238 |
| AAV2/3 variant | 4521 | WO2018071831 SEQ ID NO: 2239 |
| AAV2/3 variant | 4522 | WO2018071831 SEQ ID NO: 2240 |
| AAV2/3 variant | 4523 | WO2018071831 SEQ ID NO: 2241 |
| AAV2/3 variant | 4524 | WO2018071831 SEQ ID NO: 2242 |
| AAV2/3 variant | 4525 | WO2018071831 SEQ ID NO: 2243 |
| AAV2/3 variant | 4526 | WO2018071831 SEQ ID NO: 2244 |
| AAV2/3 variant | 4527 | WO2018071831 SEQ ID NO: 2245 |
| AAV2/3 variant | 4528 | WO2018071831 SEQ ID NO: 2246 |
| AAV2/3 variant | 4529 | WO2018071831 SEQ ID NO: 2247 |
| AAV2/3 variant | 4530 | WO2018071831 SEQ ID NO: 2248 |
| AAV2/3 variant | 4531 | WO2018071831 SEQ ID NO: 2249 |
| AAV2/3 variant | 4532 | WO2018071831 SEQ ID NO: 2250 |
| AAV2/3 variant | 4533 | WO2018071831 SEQ ID NO: 2251 |

[0084] In some embodiments, the AAV serotype may be, or may have a sequence as described in International Patent Publication WO2015038958, the contents of which are herein incorporated by reference in their entirety, such as, but not limited to, AAV9 (SEQ ID NO: 2 and 11 of WO2015038958 or SEQ ID NO: 137 and 138 respectively herein), PHP.B (SEQ ID NO: 8 and 9 of WO2015038958, herein SEQ ID NO: 5 and 6), G2B-13 (SEQ ID NO: 12 of WO2015038958, herein SEQ ID NO: 7), G2B-26 (SEQ ID NO: 13 of WO2015038958, herein SEQ ID NO: 5), TH1.1-32 (SEQ ID NO: 14 of WO2015038958, herein SEQ ID NO: 8), TH1.1-35 (SEQ ID NO: 15 of WO2015038958, herein SEQ ID NO: 9) or variants thereof. Further, any of the targeting peptides or amino acid inserts described in WO2015038958, may be inserted into any parent AAV serotype, such as, but not limited to, AAV9 (SEQ ID NO: 137 for the DNA sequence and SEQ ID NO: 138 for the amino acid sequence). In some embodiments, the amino acid insert is inserted between amino acids 586-592 of the parent AAV (e.g., AAV9). In another embodiment, the amino acid insert is inserted between amino acids 588-589 of the parent AAV sequence. The amino acid insert may be, but is not limited to, any of the following amino acid sequences, TLAVPFK (SEQ ID NO: 1 of WO2015038958; herein SEQ ID NO: 1262), KFPVALT (SEQ ID NO: 3 of WO2015038958; herein SEQ ID NO: 1263), LAVPFK (SEQ ID NO: 31 of WO2015038958; herein SEQ ID NO: 1264), AVPFK (SEQ ID NO: 32 of WO2015038958; herein SEQ ID NO: 1265), VPFK (SEQ ID NO: 33 of WO2015038958; herein SEQ ID NO: 1266), TLAVPF (SEQ ID NO: 34 of WO2015038958; herein SEQ ID NO: 1267), TLAVP (SEQ ID NO: 35 of WO2015038958; herein SEQ ID NO: 1268), TLAV (SEQ ID NO: 36 of WO2015038958; herein SEQ ID NO: 1269), SVSKPFL (SEQ ID NO: 28 of WO2015038958; herein SEQ ID NO: 1270), FTLTTPK (SEQ ID NO: 29 of WO2015038958; herein SEQ ID NO: 1271), MNATKNV (SEQ ID NO: 30 of WO2015038958; herein SEQ ID NO: 1272), QSSQTPR (SEQ ID NO: 54 of WO2015038958; herein SEQ ID NO: 1273), ILGTGTS (SEQ ID NO: 55 of WO2015038958; herein SEQ ID NO: 1274), TRTNPEA (SEQ ID NO: 56 of WO2015038958; herein SEQ ID NO: 1275), NGGTSSS (SEQ ID NO: 58 of WO2015038958; herein SEQ ID NO: 1276), or YTLSQGW (SEQ ID NO: 60 of WO2015038958; herein SEQ ID NO: 1277). Non-limiting examples of nucleotide sequences that may encode the amino acid inserts include the following, AAGTTTCCTGTGGCGTTGACT (for SEQ ID NO: 3 of WO2015038958; herein SEQ ID NO: 1278), ACTTTGGCGGTGCCTTTTAAG (SEQ ID NO: 24 and 49 of WO2015038958; herein SEQ ID NO: 1279), AGTGTGAGTAAGCCTTTTTTG (SEQ ID NO: 25 of WO2015038958; herein SEQ ID NO: 1280), TTTACGTTGACGACGCCTAAG (SEQ ID NO: 26 of WO2015038958; herein SEQ ID NO: 1281), ATGAATGCTACGAAGAATGTG (SEQ ID NO: 27 of WO2015038958; herein SEQ ID NO: 1282), CAGTCGTCGCAGACGCCTAGG (SEQ ID NO: 48 of WO2015038958; herein SEQ ID NO: 1283), ATTCTGGGGACTGGTACTTCG (SEQ ID NO: 50 and 52 of WO2015038958; herein SEQ ID NO: 1284). ACGCGGACTAATCCTGAGGCT (SEQ ID NO: 51 of WO2015038958; herein SEQ ID NO: 1285). AATGGGGGGACTAGTAGTTCT (SEQ ID NO: 53 of WO2015038958; herein SEQ ID NO: 1286), or TATACTTTGTCGCAGGGTTGG (SEQ ID NO: 59 of WO2015038958; herein SEQ ID NO: 1287).

[0085] In some embodiments, the AAV serotype may be, or may have a sequence as described in International Patent Publication WO2017100671, the contents of which are herein incorporated by reference in their entirety, such as, but not limited to, AAV9 (SEQ ID NO: 45 of WO2017100671, herein SEQ ID NO: 11). PHP.N (SEQ ID NO: 46 of WO2017100671, herein SEQ ID NO: 4), PHP.S (SEQ ID NO: 47 of WO2017100671, herein SEQ ID NO: 10), or variants thereof. Further, any of the targeting peptides or amino acid inserts described in WO2017100671 may be inserted into any parent AAV serotype, such as, but not limited to, AAV9. In some embodiments, the amino acid insert is inserted between amino acids 586-592 of the parent AAV (e.g., AAV9). In another embodiment, the amino acid insert is inserted between amino acids 588-589 of the parent AAV sequence. The amino acid insert may be, but is not limited to, any of the following amino acid sequences, AQTLAVPFKAQ (SEQ ID NO: 1 of WO2017100671; herein SEQ ID NO: 1288), AQSVSKPFLAQ (SEQ ID NO: 2 of WO2017100671; herein SEQ ID NO: 1289), AQFTLTTPKAQ (SEQ ID NO: 3 in the sequence listing of WO2017100671; herein SEQ ID NO: 1290), DGTLAVPFKAQ (SEQ ID NO: 4 in the sequence listing of WO2017100671; herein SEQ ID NO: 1291), ESTLAVPFKAQ (SEQ ID NO: 5 of WO2017100671; herein SEQ ID NO: 1292), GGTLAVPFKAQ (SEQ ID NO: 6 of WO2017100671; herein SEQ ID NO: 1293), AQTLATPFKAQ (SEQ ID NO: 7 and 33 of WO2017100671; herein SEQ ID NO: 1294), ATTLATPFKAQ (SEQ ID NO: 8 of WO2017100671; herein SEQ ID NO: 1295), DGTLATPFKAQ (SEQ ID NO: 9 of WO2017100671; herein SEQ ID NO: 1296), GGTLATPFKAQ (SEQ ID NO: 10 of WO2017100671; herein SEQ ID NO: 1297), SGSLAVPFKAQ (SEQ ID NO: 11 of WO2017100671; herein SEQ ID NO: 1298), AQTLAQPFKAQ (SEQ ID NO: 12 of WO2017100671; herein SEQ ID NO: 1299), AQTLQQPFKAQ (SEQ ID NO: 13 of WO2017100671; herein SEQ ID NO: 1300), AQTLSNPFKAQ (SEQ ID NO: 14 of WO2017100671; herein SEQ ID NO: 1301), AQTLAVPFSNP (SEQ ID NO: 15 of WO2017100671; herein SEQ ID NO: 1302), QGTLAVPFKAQ (SEQ ID NO: 16 of WO2017100671; herein SEQ ID NO: 1303), NQTLAVPFKAQ (SEQ ID NO: 17 of WO2017100671; herein SEQ ID NO: 1304), EGSLAVPFKAQ (SEQ ID NO: 18 of WO2017100671; herein SEQ ID NO: 1305), SGNLAVPFKAQ (SEQ ID NO: 19 of WO2017100671; herein SEQ ID NO: 1306), EGTLAVPFKAQ (SEQ ID NO: 20 of WO2017100671; herein SEQ ID NO: 1307), DSTLAVPFKAQ (SEQ ID NO: 21 in Table 1 of WO2017100671; herein SEQ ID NO: 1308), AVTLAVPFKAQ (SEQ ID NO: 22 of WO2017100671; herein SEQ ID NO: 1309), AQTLSTPFKAQ (SEQ ID NO: 23 of WO2017100671; herein SEQ ID NO: 1310), AQTLPQPFKAQ (SEQ ID NO: 24 and 32 of WO2017100671; herein SEQ ID NO: 1311), AQTLSQPFKAQ (SEQ ID NO: 25 of WO2017100671; herein SEQ ID NO: 1312), AQTLQLPFKAQ (SEQ ID NO: 26 of WO2017100671; herein SEQ ID NO: 1313), AQTLTMPFKAQ (SEQ ID NO: 27, and 34 of WO2017100671 and SEQ ID NO: 35 in the sequence listing of WO2017100671; herein SEQ ID NO: 1314), AQTLTTPFKAQ (SEQ ID NO: 28 of WO2017100671; herein SEQ ID NO: 1315), AQYTLSQGWAQ (SEQ ID NO: 29 of WO2017100671; herein SEQ ID NO: 1316), AQMNATKNVAQ (SEQ ID NO: 30 of WO2017100671; herein SEQ ID NO: 1317), AQVSGGHHSAQ (SEQ ID NO: 31 of WO2017100671; herein SEQ ID NO: 1318), AQTLTAPFKAQ (SEQ ID NO: 35 in Table 1 of WO2017100671; herein SEQ ID NO: 1319), AQTLSKPFKAQ (SEQ ID NO: 36 of WO2017100671; herein SEQ ID NO: 1320), QAVRTSL (SEQ ID NO: 37 of WO2017100671; herein SEQ ID NO: 1321), YTLSQGW (SEQ ID NO: 38 of WO2017100671; herein SEQ ID NO: 1277), LAKERLS (SEQ ID NO: 39 of WO2017100671; herein SEQ ID NO: 1322), TLAVPFK (SEQ ID NO: 40 in the sequence listing of WO2017100671; herein SEQ ID NO: 1262), SVSKPFL (SEQ ID NO: 41 of WO2017100671; herein SEQ ID NO: 1270), FTLTTPK (SEQ ID NO: 42 of WO2017100671; herein SEQ ID NO: 1271), MNSTKNV (SEQ ID NO: 43 of WO2017100671; herein SEQ ID NO: 1323), VSGGHHS (SEQ ID NO: 44 of WO2017100671, herein SEQ ID NO: 1324), SAQTLAVPFKAQAQ (SEQ ID NO: 48 of WO2017100671; herein SEQ ID NO: 1325), SXXXLAVPFKAQAQ (SEQ ID NO: 49 of WO2017100671 wherein X may be any amino acid; herein SEQ ID NO: 1326), SAQXXXVPFKAQAQ (SEQ ID NO: 50 of WO2017100671 wherein X may be any amino acid; herein SEQ ID NO: 1327), SAQTLXXXFKAQAQ (SEQ ID NO: 51 of WO2017100671 wherein X may be any amino acid; herein SEQ ID NO: 1328), SAQTLAVXXXAQAQ (SEQ ID NO: 52 of WO2017100671 wherein X may be any amino acid; herein SEQ ID NO: 1329). SAQTLAVPFXXXAQ (SEQ ID NO: 53 of WO2017100671 wherein X may be any amino acid; herein SEQ ID NO: 1330), TNHQSAQ (SEQ ID NO: 65 of WO2017100671; herein SEQ ID NO: 1331), AQAQTGW (SEQ ID NO: 66 of WO2017100671; herein SEQ ID NO: 1332), DGTLATPFK (SEQ ID NO: 67 of WO2017100671; herein SEQ ID NO: 1333), DGTLATPFKXX (SEQ ID NO: 68 of WO2017100671 wherein X may be any amino acid; herein SEQ ID NO: 1334), LAVPFKAQ (SEQ ID NO: 80 of WO2017100671; herein SEQ ID NO: 1335), VPFKAQ (SEQ ID NO: 81 of WO2017100671; herein SEQ ID NO: 1336), FKAQ (SEQ ID NO: 82 of WO2017100671; herein SEQ ID NO: 1337), AQTLAV (SEQ ID NO: 83 of WO2017100671; herein SEQ ID NO: 1338), AQTLAVPF (SEQ ID NO: 84 of WO2017100671; herein SEQ ID NO: 1339). QAVR (SEQ ID NO: 85 of WO2017100671; herein SEQ ID NO: 1340), AVRT (SEQ ID NO: 86 of WO2017100671; herein SEQ ID NO: 1341), VRTS (SEQ ID NO: 87 of WO2017100671; herein SEQ ID NO: 1342), RTSL (SEQ ID NO: 88 of WO2017100671; herein SEQ ID NO: 1343), QAVRT (SEQ ID NO: 89 of WO2017100671; herein SEQ ID NO: 1344), AVRTS (SEQ ID NO: 90 of WO2017100671; herein SEQ ID NO: 1345). VRTSL (SEQ ID NO: 91 of WO2017100671; herein SEQ ID NO: 1346), QAVRTS (SEQ ID NO: 92 of WO2017100671; herein SEQ ID NO: 1347), or AVRTSL (SEQ ID NO: 93 of WO2017100671; herein SEQ ID NO: 1348).

[0086] Non-limiting examples of nucleotide sequences that may encode the amino acid inserts include the following, GATGGGACTTTGGCGGTGCCTITTAAGGCACAG (SEQ ID NO: 54 of WO2017100671; herein SEQ ID NO: 1349), GATGGGACGTTGGCGGTGCCTITTAAGGCACAG (SEQ ID NO: 55 of WO2017100671; herein SEQ ID NO: 1350), CAGGCGGTTAGGACGTCTTTG (SEQ ID NO: 56 of WO2017100671; herein SEQ ID NO: 1351), CAGGTCTTCACGGACTCAGACTATCAG (SEQ ID NO: 57 and 78 of WO2017100671; herein SEQ ID NO: 1352), CAAGTAAAACCTCTACAAATGTGGTAAAATCG (SEQ ID NO: 58 of WO2017100671; herein SEQ ID NO: 1353), ACTCATCGACCAATACTTGTACTATCTCTCTAGAAC (SEQ ID NO: 59 of WO2017100671; herein SEQ ID NO: 1354), GGAAGTATTCCTTGGTTTTGAACCCA (SEQ ID NO: 60 of WO2017100671; herein SEQ ID NO: 1355), GGTCGCGGTTCTTGTTTGTGGAT (SEQ ID NO: 61 of WO2017100671; herein SEQ ID NO: 1356), CGACCTTGAAGCGCATGAACTCCT (SEQ ID NO: 62 of WO2017100671; herein SEQ ID NO: 1357), GTATTCCTTGGTTTTGAACCCAACCGGTCTGCGCCTGTGCMNNMNNMNNMNNMNNMN NMNNTTGGGCACTCTGGTGGTTTGTC (SEQ ID NO: 63 of WO2017100671 wherein N may be A, C, T. or G; herein SEQ ID NO: 1358), GTATTCCTTGGTTTTGAACCCAACCGGTCTGCGCMNNMNNMNNAAAAGGCACCGCCAA AGTTTG (SEQ ID NO: 69 of WO2017100671 wherein N may be A, C, T, or G; herein SEQ ID NO: 1359), GTATTCCTTGGTTTTGAACCCAACCGGTCTGCGCCTGTGCMNNMNNMNNCACCGCCAA AGTTTGGGCACT (SEQ ID NO: 70 of WO2017100671 wherein N may be A, C, T, or G; herein SEQ ID NO: 1360), GTATTCCTTGGTTTTGAACCCAACCGGTCTGCGCCTGTGCCTTAAAMNNMNNMNNCAAA GTTTGGGCACTCTGGTGG (SEQ ID NO: 71 of WO2017100671 wherein N may be A, C, T, or G; herein SEQ ID NO: 1361), GTATTCCTTGGTTTTGAACCCAACCGGTCTGCGCCTGTGCCTTAAAAGGCACMNNMNNM NNTTGGGCACTCTGGTGGTTTGTG (SEQ ID NO: 72 of WO2017100671 wherein N may be A, C, T, or G; herein SEQ ID NO: 1362), ACTTTGGCGGTGCCTTTTAAG (SEQ ID NO: 74 of WO2017100671; herein SEQ ID NO: 1279), AGTGTGAGTAAGCCTTTTTTG (SEQ ID NO: 75 of WO2017100671; herein SEQ ID NO: 1280), TTTACGTTGACGACGCCTAAG (SEQ ID NO: 76 of WO2017100671; herein SEQ ID NO: 1281), TATACTTTGTCGCAGGGTTGG (SEQ ID NO: 77 of WO2017100671; herein SEQ ID NO: 1287), or CTTGCGAAGGAGCGGCTTTCG (SEQ ID NO: 79 of WO2017100671; herein SEQ ID NO: 1363).

[0087] In some embodiments, the AAV serotype may be, or may have a sequence as described in U.S. Pat. No. 9,624,274, the contents of which are herein incorporated by reference in their entirety, such as, but not limited to, AAV1 (SEQ ID NO: 181 of U.S. Pat. No. 9,624,274), AAV6 (SEQ ID NO: 182 of U.S. Pat. No. 9,624,274), AAV2 (SEQ ID NO: 183 of U.S. Pat. No. 9,624,274), AAV3b (SEQ ID NO: 184 of U.S. Pat. No. 9,624,274), AAV7 (SEQ ID NO: 185 of U.S. Pat. No. 9,624,274), AAV8 (SEQ ID NO: 186 of U.S. Pat. No. 9,624,274), AAV10 (SEQ ID NO: 187 of U.S. Pat. No. 9,624,274), AAV4 (SEQ ID NO: 188 of U.S. Pat. No. 9,624,274), AAV11 (SEQ ID NO: 189 of U.S. Pat. No. 9,624,274), bAAV (SEQ ID NO: 190 of U.S. Pat. No. 9,624,274), AAV5 (SEQ ID NO: 191 of U.S. Pat. No. 9,624,274), GPV (SEQ ID NO: 192 of U.S. Pat. No. 9,624,274; herein SEQ ID NO: 879), B19 (SEQ ID NO: 193 of U.S. Pat. No. 9,624,274; herein SEQ ID NO: 880), MVM (SEQ ID NO: 194 of U.S. Pat. No. 9,624,274; herein SEQ ID NO: 881), FPV (SEQ ID NO: 195 of U.S. Pat. No. 9,624,274; herein SEQ ID NO: 882), CPV (SEQ ID NO: 196 of U.S. Pat. No. 9,624,274; herein SEQ ID NO: 883) or variants thereof. Further, any of the structural protein inserts described in U.S. Pat. No. 9,624,274, may be inserted into, but not limited to, 1-453 and 1-587 of any parent AAV serotype, such as, but not limited to, AAV2 (SEQ ID NO: 183 of U.S. Pat. No. 9,624,274). The amino acid insert may be, but is not limited to, any of the following amino acid sequences, VNLTWSRASG (SEQ ID NO: 50 of U.S. Pat. No. 9,624,274; herein SEQ ID NO: 1364), EFCINHRGYWVCGD (SEQ ID NO:55 of U.S. Pat. No. 9,624,274; herein SEQ ID NO: 1365), EDGQVMDVDLS (SEQ ID NO: 85 of U.S. Pat. No. 9,624,274; herein SEQ ID NO: 1366), EKQRNGTLT (SEQ ID NO: 86 of U.S. Pat. No. 9,624,274; herein SEQ ID NO: 1367), TYQCRVTHPHLPRALMR (SEQ ID NO: 87 of U.S. Pat. No. 9,624,274; herein SEQ ID NO: 1368), RHSTTQPRKTKGSG (SEQ ID NO: 88 of U.S. Pat. No. 9,624,274; herein SEQ ID NO: 1369), DSNPRGVSAYLSR (SEQ ID NO: 89 of U.S. Pat. No. 9,624,274; herein SEQ ID NO: 1370), TITCLWDLAPSK (SEQ ID NO: 90 of U.S. Pat. No. 9,624,274; herein SEQ ID NO: 1371), KTKGSGFFVF (SEQ ID NO: 91 of U.S. Pat. No. 9,624,274; herein SEQ ID NO: 1372), THPHLPRALMRS (SEQ ID NO: 92 of U.S. Pat. No. 9,624,274; herein SEQ ID NO: 1373), GETYQCRVTHPHLPRALMRSTTK (SEQ ID NO: 93 of U.S. Pat. No. 9,624,274; herein SEQ ID NO: 1374), LPRALMRS (SEQ ID NO: 94 of U.S. Pat. No. 9,624,274; herein SEQ ID NO: 1375), INHRGYWV (SEQ ID NO: 95 of U.S. Pat. No. 9,624,274; herein SEQ ID NO: 1376), CDAGSVRTNAPD (SEQ ID NO: 60 of U.S. Pat. No. 9,624,274; herein SEQ ID NO: 1377), AKAVSNLTESRSESLQS (SEQ ID NO: 96 of U.S. Pat. No. 9,624,274; herein SEQ ID NO: 1378), SLTGDEFKKVLET (SEQ ID NO: 97 of U.S. Pat. No. 9,624,274; herein SEQ ID NO: 1379), REAVAYRFEED (SEQ ID NO: 98 of U.S. Pat. No. 9,624,274; herein SEQ ID NO: 1380), INPEIITLDG (SEQ ID NO: 99 of U.S. Pat. No. 9,624,274; herein SEQ ID NO: 1381), DISVTGAPVITATYL (SEQ ID NO: 100 of U.S. Pat. No. 9,624,274; herein SEQ ID NO: 1382), DISVTGAPVITA (SEQ ID NO: 101 of U.S. Pat. No. 9,624,274; herein SEQ ID NO: 1383), PKTVSNLTESSSESVQS (SEQ ID NO: 102 of U.S. Pat. No. 9,624,274; herein SEQ ID NO: 1384), SLMGDEFKAVLET (SEQ ID NO: 103 of U.S. Pat. No. 9,624,274; herein SEQ ID NO: 1385). QHSVAYTFEED (SEQ ID NO: 104 of U.S. Pat. No. 9,624,274; herein SEQ ID NO: 1386), INPEIITRDG (SEQ ID NO: 105 of U.S. Pat. No. 9,624,274; herein SEQ ID NO: 1387), DISLTGDPVITASYL (SEQ ID NO: 106 of U.S. Pat. No. 9,624,274; herein SEQ ID NO: 1388), DISLTGDPVITA (SEQ ID NO: 107 of U.S. Pat. No. 9,624,274; herein SEQ ID NO: 1389), DQSIDFEIDSA (SEQ ID NO: 108 of U.S. Pat. No. 9,624,274; herein SEQ ID NO: 1390), KNVSEDLPLPTFSPTLLGDS (SEQ ID NO: 109 of U.S. Pat. No. 9,624,274; herein SEQ ID NO: 1391), KNVSEDLPLPT (SEQ ID NO: 110 of U.S. Pat. No. 9,624,274; herein SEQ ID NO: 1392), CDSGRVRTDAPD (SEQ ID NO: 111 of U.S. Pat. No. 9,624,274; herein SEQ ID NO: 1393), FPEHLLVDFLQSLS (SEQ ID NO: 112 of U.S. Pat. No. 9,624,274; herein SEQ ID NO: 1394), DAEFRHDSG (SEQ ID NO: 65 of U.S. Pat. No. 9,624,274; herein SEQ ID NO: 1395), HYAAAQWDFGNTMCQL (SEQ ID NO: 113 of U.S. Pat. No. 9,624,274; herein SEQ ID NO: 1396), YAAQWDFGNTMCQ (SEQ ID NO: 114 of U.S. Pat. No. 9,624,274; herein SEQ ID NO: 1397), RSQKEGLHYT (SEQ ID NO: 115 of U.S. Pat. No. 9,624,274; herein SEQ ID NO: 1398), SSRTPSDKPVAHWANPQAE (SEQ ID NO: 116 of U.S. Pat. No. 9,624,274; herein SEQ ID NO: 1399), SRTPSDKPVAHWANP (SEQ ID NO: 117 of U.S. Pat. No. 9,624,274; herein SEQ ID NO: 1400), SSRTPSDKP (SEQ ID NO: 118 of U.S. Pat. No. 9,624,274; herein SEQ ID NO: 1401), NADGNVDYHMNSVP (SEQ ID NO: 119 of U.S. Pat. No. 9,624,274; herein SEQ ID NO: 1402), DGNVDYHMNSV (SEQ ID NO: 120 of U.S. Pat. No. 9,624,274; herein SEQ ID NO: 1403), RSFKEFLQSSLRALRQ (SEQ ID NO: 121 of U.S. Pat. No. 9,624,274; herein SEQ ID NO: 1404); FKEFLQSSLRA (SEQ ID NO: 122 of U.S. Pat. No. 9,624,274; herein SEQ ID NO: 1405), or QMWAPQWGPD (SEQ ID NO: 123 of U.S. Pat. No. 9,624,274; herein SEQ ID NO: 1406).

[0088] In some embodiments, the AAV serotype may be, or may have a sequence as described in U.S. Pat. No. 9,475,845, the contents of which are herein incorporated by reference in their entirety, such as, but not limited to, AAV capsid proteins comprising modification of one or more amino acids at amino acid positions 585 to 590 of the native AAV2 capsid protein. Further the modification may result in, but not be limited to, the amino acid sequence RGNRQA (SEQ ID NO: 3 of U.S. Pat. No. 9,475,845; herein SEQ ID NO: 1407), SSSTDP (SEQ ID NO: 4 of U.S. Pat. No. 9,475,845; herein SEQ ID NO: 1408). SSNTAP (SEQ ID NO: 5 of U.S. Pat. No. 9,475,845; herein SEQ ID NO: 1409), SNSNLP (SEQ ID NO: 6 of U.S. Pat. No. 9,475,845; herein SEQ ID NO: 1410), SSTTAP (SEQ ID NO: 7 of U.S. Pat. No. 9,475,845; herein SEQ ID NO: 1411), AANTAA (SEQ ID NO: 8 of U.S. Pat. No. 9,475,845; herein SEQ ID NO: 1412), QQNTAP (SEQ ID NO: 9 of U.S. Pat. No. 9,475,845; herein SEQ ID NO: 1413), SAQAQA (SEQ ID NO: 10 of U.S. Pat. No. 9,475,845; herein SEQ ID NO: 1414), QANTGP (SEQ ID NO: 11 of U.S. Pat. No. 9,475,845; herein SEQ ID NO: 1415), NATTAP (SEQ ID NO: 12 of U.S. Pat. No. 9,475,845; herein SEQ ID NO: 1416), SSTAGP (SEQ ID NO: 13 and 20 of U.S. Pat. No. 9,475,845; herein SEQ ID NO: 1417), QQNTAA (SEQ ID NO: 14 of U.S. Pat. No. 9,475,845; herein SEQ ID NO: 1418), PSTAGP (SEQ ID NO: 15 of U.S. Pat. No. 9,475,845; herein SEQ ID NO: 1419), NQNTAP (SEQ ID NO: 16 of U.S. Pat. No. 9,475,845; herein SEQ ID NO: 1420), QAANAP (SEQ ID NO: 17 of U.S. Pat. No. 9,475,845; herein SEQ ID NO: 1421), SIVGLP (SEQ ID NO: 18 of U.S. Pat. No. 9,475,845; herein SEQ ID NO: 1422), AASTAA (SEQ ID NO: 19, and 27 of U.S. Pat. No. 9,475,845; herein SEQ ID NO: 1423), SQNTTA (SEQ ID NO: 21 of U.S. Pat. No. 9,475,845; herein SEQ ID NO: 1424), QQDTAP (SEQ ID NO: 22 of U.S. Pat. No. 9,475,845; herein SEQ ID NO: 1425), QTNTGP (SEQ ID NO: 23 of U.S. Pat. No. 9,475,845; herein SEQ ID NO: 1426), QTNGAP (SEQ ID NO: 24 of U.S. Pat. No. 9,475,845; herein SEQ ID NO: 1427), QQNAAP (SEQ ID NO: 25 of U.S. Pat. No. 9,475,845; herein SEQ ID NO: 1428), or AANTQA (SEQ ID NO: 26 of U.S. Pat. No. 9,475,845; herein SEQ ID NO: 1429). In some embodiments, the amino acid modification is a substitution at amino acid positions 262 through 265 in the native AAV2 capsid protein or the corresponding position in the capsid protein of another AAV with a targeting sequence. The targeting sequence may be, but is not limited to, any of the amino acid sequences, NGRAHA (SEQ ID NO: 38 of U.S. Pat. No. 9,475,845; herein SEQ ID NO: 1430), QPEHSST (SEQ ID NO: 39 and 50 of U.S. Pat. No. 9,475,845; herein SEQ ID NO: 1431). VNTANST (SEQ ID NO: 40 of U.S. Pat. No. 9,475,845; herein SEQ ID NO: 1432), HGPMQKS (SEQ ID NO: 41 of U.S. Pat. No. 9,475,845; herein SEQ ID NO: 1433). PHKPPLA (SEQ ID NO: 42 of U.S. Pat. No. 9,475,845; herein SEQ ID NO: 1434), IKNNEMW (SEQ ID NO: 43 of U.S. Pat. No. 9,475,845; herein SEQ ID NO: 1435), RNLDTPM (SEQ ID NO: 44 of U.S. Pat. No. 9,475,845; herein SEQ ID NO: 1436), VDSHRQS (SEQ ID NO: 45 of U.S. Pat. No. 9,475,845; herein SEQ ID NO: 1437), YDSKTKT (SEQ ID NO: 46 of U.S. Pat. No. 9,475,845; herein SEQ ID NO: 1438), SQLPHQK (SEQ ID NO: 47 of U.S. Pat. No. 9,475,845; herein SEQ ID NO: 1439), STMQQNT (SEQ ID NO: 48 of U.S. Pat. No. 9,475,845; herein SEQ ID NO: 1440), TERYMTQ (SEQ ID NO: 49 of U.S. Pat. No. 9,475,845; herein SEQ ID NO: 1441), DASLSTS (SEQ ID NO: 51 of U.S. Pat. No. 9,475,845; herein SEQ ID NO: 1442), DLPNKKT (SEQ ID NO: 52 of U.S. Pat. No. 9,475,845; herein SEQ ID NO: 1443), DLTAARL (SEQ ID NO: 53 of U.S. Pat. No. 9,475,845; hercin SEQ ID NO: 1444), EPHQFNY (SEQ ID NO: 54 of U.S. Pat. No. 9,475,845; herein SEQ ID NO: 1445), EPQSNHT (SEQ ID NO: 55 of U.S. Pat. No. 9,475,845; herein SEQ ID NO: 1446), MSSWPSQ (SEQ ID NO: 56 of U.S. Pat. No. 9,475,845; herein SEQ ID NO: 1447), NPKHNAT (SEQ ID NO: 57 of U.S. Pat. No. 9,475,845; herein SEQ ID NO: 1448), PDGMRTT (SEQ ID NO: 58 of U.S. Pat. No. 9,475,845; herein SEQ ID NO: 1449), PNNNKTT (SEQ ID NO: 59 of U.S. Pat. No. 9,475,845; herein SEQ ID NO: 1450), QSTTHDS (SEQ ID NO: 60 of U.S. Pat. No. 9,475,845; herein SEQ ID NO: 1451), TGSKQKQ (SEQ ID NO: 61 of U.S. Pat. No. 9,475,845; herein SEQ ID NO: 1452), SLKHQAL (SEQ ID NO: 62 of U.S. Pat. No. 9,475,845; herein SEQ ID NO: 1453), SPIDGEQ (SEQ ID NO: 63 of U.S. Pat. No. 9,475,845; herein SEQ ID NO: 1454), WIFPWIQL (SEQ ID NO: 64 and 112 of U.S. Pat. No. 9,475,845; herein SEQ ID NO: 1455), CDCRGDCFC (SEQ ID NO: 65 of U.S. Pat. No. 9,475,845; herein SEQ ID NO: 1456), CNGRC (SEQ ID NO: 66 of U.S. Pat. No. 9,475,845; herein SEQ ID NO: 1457), CPRECES (SEQ ID NO: 67 of U.S. Pat. No. 9,475,845; herein SEQ ID NO: 1458), CTTHWGFTLC (SEQ ID NO: 68 and 123 of U.S. Pat. No. 9,475,845; herein SEQ ID NO: 1459), CGRRAGGSC (SEQ ID NO: 69 of U.S. Pat. No. 9,475,845; herein SEQ ID NO: 1460), CKGGRAKDC (SEQ ID NO: 70 of U.S. Pat. No. 9,475,845; herein SEQ ID NO: 1461), CVPELGHEC (SEQ ID NO: 71 and 115 of U.S. Pat. No. 9,475,845; herein SEQ ID NO: 1462), CRRETAWAK (SEQ ID NO: 72 of U.S. Pat. No. 9,475,845; herein SEQ ID NO: 1463), VSWFSHRYSPFAVS (SEQ ID NO: 73 of U.S. Pat. No. 9,475,845; herein SEQ ID NO: 1464), GYRDGYAGPILYN (SEQ ID NO: 74 of U.S. Pat. No. 9,475,845; herein SEQ ID NO: 1465). XXXYXXX (SEQ ID NO: 75 of U.S. Pat. No. 9,475,845; herein SEQ ID NO: 1466), YXNW (SEQ ID NO: 76 of U.S. Pat. No. 9,475,845; herein SEQ ID NO: 1467), RPLPPLP (SEQ ID NO: 77 of U.S. Pat. No. 9,475,845; herein SEQ ID NO: 1468), APPLPPR (SEQ ID NO: 78 of U.S. Pat. No. 9,475,845; herein SEQ ID NO: 1469), DVFYPYPYASGS (SEQ ID NO: 79 of U.S. Pat. No. 9,475,845; herein SEQ ID NO: 1470), MYWYPY (SEQ ID NO: 80 of U.S. Pat. No. 9,475,845; herein SEQ ID NO: 1471), DITWDQLWDLMK (SEQ ID NO: 81 of U.S. Pat. No. 9,475,845; herein SEQ ID NO: 1472), CWDDXWLC (SEQ ID NO: 82 of U.S. Pat. No. 9,475,845; herein SEQ ID NO: 1473), EWCEYLGGYLRCYA (SEQ ID NO: 83 of U.S. Pat. No. 9,475,845; herein SEQ ID NO: 1474), YXCXXGPXTWXCXP (SEQ ID NO: 84 of U.S. Pat. No. 9,475,845; herein SEQ ID NO: 1475), IEGPTLRQWLAARA (SEQ ID NO: 85 of U.S. Pat. No. 9,475,845; herein SEQ ID NO: 1476), LWXXX (SEQ ID NO: 86 of U.S. Pat. No. 9,475,845; herein SEQ ID NO: 1477), XFXXYLW (SEQ ID NO: 87 of U.S. Pat. No. 9,475,845; herein SEQ ID NO: 1478), SSIISHFRWGLCD (SEQ ID NO: 88 of U.S. Pat. No. 9,475,845; herein SEQ ID NO: 1479), MSRPACPPNDKYE (SEQ ID NO: 89 of U.S. Pat. No. 9,475,845; herein SEQ ID NO: 1480), CLRSGRGC (SEQ ID NO: 90 of U.S. Pat. No. 9,475,845; herein SEQ ID NO: 1481), CHWMFSPWC (SEQ ID NO: 91 of U.S. Pat. No. 9,475,845; herein SEQ ID NO: 1482), WXXF (SEQ ID NO: 92 of U.S. Pat. No. 9,475,845; herein SEQ ID NO: 1483), CSSRLDAC (SEQ ID NO: 93 of U.S. Pat. No. 9,475,845; herein SEQ ID NO: 1484), CLPVASC (SEQ ID NO: 94 of U.S. Pat. No. 9,475,845; herein SEQ ID NO: 1485), CGFECVRQCPERC (SEQ ID NO: 95 of U.S. Pat. No. 9,475,845; herein SEQ ID NO: 1486), CVALCREACGEGC (SEQ ID NO: 96 of U.S. Pat. No. 9,475,845; herein SEQ ID NO: 1487), SWCEPGWCR (SEQ ID NO: 97 of U.S. Pat. No. 9,475,845; herein SEQ ID NO: 1488), YSGKWGW (SEQ ID NO: 98 of U.S. Pat. No. 9,475,845; herein SEQ ID NO: 1489), GLSGGRS (SEQ ID NO: 99 of U.S. Pat. No. 9,475,845; herein SEQ ID NO: 1490). LMLPRAD (SEQ ID NO: 100 of U.S. Pat. No. 9,475,845; herein SEQ ID NO: 1491). CSCFRDVCC (SEQ ID NO: 101 of U.S. Pat. No. 9,475,845; herein SEQ ID NO: 1492), CRDVVSVIC (SEQ ID NO: 102 of U.S. Pat. No. 9,475,845; herein SEQ ID NO: 1493), MARSGL (SEQ ID NO: 103 of U.S. Pat. No. 9,475,845; herein SEQ ID NO: 1494), MARAKE (SEQ ID NO: 104 of U.S. Pat. No. 9,475,845; herein SEQ ID NO: 1495), MSRTMS (SEQ ID NO: 105 of U.S. Pat. No. 9,475,845; herein SEQ ID NO: 1496, KCCYSL (SEQ ID NO: 106 of U.S. Pat. No. 9,475,845; herein SEQ ID NO: 1497), MYWGDSHWLQYWYE (SEQ ID NO: 107 of U.S. Pat. No. 9,475,845; herein SEQ ID NO: 1498), MQLPLAT (SEQ ID NO: 108 of U.S. Pat. No. 9,475,845; herein SEQ ID NO: 1499), EWLS (SEQ ID NO: 109 of U.S. Pat. No. 9,475,845; herein SEQ ID NO: 1500), SNEW (SEQ ID NO: 110 of U.S. Pat. No. 9,475,845; herein SEQ ID NO: 1501), TNYL (SEQ ID NO: 111 of U.S. Pat. No. 9,475,845; herein SEQ ID NO: 1502), WDLAWMFRLPVG (SEQ ID NO: 113 of U.S. Pat. No. 9,475,845; herein SEQ ID NO: 1503), CTVALPGGYVRVC (SEQ ID NO: 114 of U.S. Pat. No. 9,475,845; herein SEQ ID NO: 1504), CVAYCIEHHCWTC (SEQ ID NO: 116 of U.S. Pat. No. 9,475,845; herein SEQ ID NO: 1505), CVFAHNYDYLVC (SEQ ID NO: 117 of U.S. Pat. No. 9,475,845; herein SEQ ID NO: 1506), CVFTSNYAFC (SEQ ID NO: 118 of U.S. Pat. No. 9,475,845; herein SEQ ID NO: 1507), VHSPNKK (SEQ ID NO: 119 of U.S. Pat. No. 9,475,845; herein SEQ ID NO: 1508), CRGDGWC (SEQ ID NO: 120 of U.S. Pat. No. 9,475,845; herein SEQ ID NO: 1509), XRGCDX (SEQ ID NO: 121 of U.S. Pat. No. 9,475,845; herein SEQ ID NO: 1510). PXXX (SEQ ID NO: 122 of U.S. Pat. No. 9,475,845; herein SEQ ID NO: 1511). SGKGPRQITAL (SEQ ID NO: 124 of U.S. Pat. No. 9,475,845; herein SEQ ID NO: 1512), AAAAAAAAAXXXXX (SEQ ID NO: 125 of U.S. Pat. No. 9,475,845; herein SEQ ID NO: 1513), VYMSPF (SEQ ID NO: 126 of U.S. Pat. No. 9,475,845; herein SEQ ID NO: 1514), ATWLPPR (SEQ ID NO: 127 of U.S. Pat. No. 9,475,845; herein SEQ ID NO: 1515), HTMYYHHYQHHL (SEQ ID NO: 128 of U.S. Pat. No. 9,475,845; herein SEQ ID NO: 1516), SEVGCRAGPLQWLCEKYFG (SEQ ID NO: 129 of U.S. Pat. No. 9,475,845; herein SEQ ID NO: 1517), CGLLPVGRPDRNVWRWLC (SEQ ID NO: 130 of U.S. Pat. No. 9,475,845; herein SEQ ID NO: 1518), CKGQCDRFKGLPWEC (SEQ ID NO: 131 of U.S. Pat. No. 9,475,845; herein SEQ ID NO: 1519), SGRSA (SEQ ID NO: 132 of U.S. Pat. No. 9,475,845; herein SEQ ID NO: 1520). WGFP (SEQ ID NO: 133 of U.S. Pat. No. 9,475,845; herein SEQ ID NO: 1521), AEPMPHSLNFSQYLWYT (SEQ ID NO: 134 of U.S. Pat. No. 9,475,845; herein SEQ ID NO: 1522), WAYXSP (SEQ ID NO: 135 of U.S. Pat. No. 9,475,845; herein SEQ ID NO: 1523), IELLQAR (SEQ ID NO: 136 of U.S. Pat. No. 9,475,845; herein SEQ ID NO: 1524), AYTKCSRQWRTCMTTH (SEQ ID NO: 137 of U.S. Pat. No. 9,475,845; herein SEQ ID NO: 1525), PQNSKIPGPTFLDPH (SEQ ID NO: 138 of U.S. Pat. No. 9,475,845; herein SEQ ID NO: 1526), SMEPALPDWWWKMFK (SEQ ID NO: 139 of U.S. Pat. No. 9,475,845; herein SEQ ID NO: 1527), ANTPCGPYTHDCPVKR (SEQ ID NO: 140 of U.S. Pat. No. 9,475,845; herein SEQ ID NO: 1528), TACHQHVRMVRP (SEQ ID NO: 141 of U.S. Pat. No. 9,475,845; herein SEQ ID NO: 1529), VPWMEPAYQRFL (SEQ ID NO: 142 of U.S. Pat. No. 9,475,845; herein SEQ ID NO: 1530), DPRATPGS (SEQ ID NO: 143 of U.S. Pat. No. 9,475,845; herein SEQ ID NO: 1531), FRPNRAQDYNTN (SEQ ID NO: 144 of U.S. Pat. No. 9,475,845; herein SEQ ID NO: 1532), CTKNSYLMC (SEQ ID NO: 145 of U.S. Pat. No. 9,475,845; herein SEQ ID NO: 1533), CXXTXXXGXGC (SEQ ID NO: 146 of U.S. Pat. No. 9,475,845; herein SEQ ID NO: 1534), CPIEDRPMC (SEQ ID NO: 147 of U.S. Pat. No. 9,475,845; herein SEQ ID NO: 1535), HEWSYLAPYPWF (SEQ ID NO: 148 of U.S. Pat. No. 9,475,845; herein SEQ ID NO: 1536), MCPKHPLGC (SEQ ID NO: 149 of U.S. Pat. No. 9,475,845; herein SEQ ID NO: 1537), RMWPSSTVNLSAGRR (SEQ ID NO: 150 of U.S. Pat. No. 9,475,845; herein SEQ ID NO: 1538), SAKTAVSQRVWLPSHRGGEP (SEQ ID NO: 151 of U.S. Pat. No. 9,475,845; herein SEQ ID NO: 1539), KSREHVNNSACPSKRITAAL (SEQ ID NO: 152 of U.S. Pat. No. 9,475,845; herein SEQ ID NO: 1540), EGFR (SEQ ID NO: 153 of U.S. Pat. No. 9,475,845; herein SEQ ID NO: 1541), AGLGVR (SEQ ID NO: 154 of U.S. Pat. No. 9,475,845; herein SEQ ID NO: 1542), GTRQGHTMRLGVSDG (SEQ ID NO: 155 of U.S. Pat. No. 9,475,845; herein SEQ ID NO: 1543), IAGLATPGWSHWLAL (SEQ ID NO: 156 of U.S. Pat. No. 9,475,845; herein SEQ ID NO: 1544), SMSIARL (SEQ ID NO: 157 of U.S. Pat. No. 9,475,845; herein SEQ ID NO: 1545), HTFEPGV (SEQ ID NO: 158 of U.S. Pat. No. 9,475,845; herein SEQ ID NO: 1546). NTSLKRISNKRIRRK (SEQ ID NO: 159 of U.S. Pat. No. 9,475,845; herein SEQ ID NO: 1547). LRIKRKRRKRKKTRK (SEQ ID NO: 160 of U.S. Pat. No. 9,475,845; herein SEQ ID NO: 1548), GGG, GFS, LWS, EGG, LLV, LSP, LBS, AGG, GRR, GGH and GTV.

[0089] In some embodiments, the AAV serotype may be, or may have a sequence as described in United States Publication No. US 20160369298, the contents of which are herein incorporated by reference in their entirety, such as, but not limited to, site-specific mutated capsid protein of AAV2 (SEQ ID NO: 97 of US 20160369298; herein SEQ ID NO: 1549) or variants thereof, wherein the specific site is at least one site selected from sites R447. G453, S578, N587, N587+1, S662 of VP1 or fragment thereof.

[0090] Further, any of the mutated sequences described in US 20160369298, may be or may have, but not limited to, any of the following sequences SDSGASN (SEQ ID NO: 1 and SEQ ID NO: 231 of US20160369298; herein SEQ ID NO: 1550), SPSGASN (SEQ ID NO: 2 of US20160369298; herein SEQ ID NO: 1551), SHSGASN (SEQ ID NO: 3 of US20160369298; herein SEQ ID NO: 1552), SRSGASN (SEQ ID NO: 4 of US20160369298; herein SEQ ID NO: 1553), SKSGASN (SEQ ID NO: 5 of US20160369298; herein SEQ ID NO: 1554), SNSGASN (SEQ ID NO: 6 of US20160369298; herein SEQ ID NO: 1555), SGSGASN (SEQ ID NO: 7 of US20160369298; herein SEQ ID NO: 1556), SASGASN (SEQ ID NO: 8, 175, and 221 of US20160369298; herein SEQ ID NO: 1557), SESGTSN (SEQ ID NO: 9 of US20160369298; herein SEQ ID NO: 1558), STTGGSN (SEQ ID NO: 10 of US20160369298; herein SEQ ID NO: 1559), SSAGSTN (SEQ ID NO: 11 of US20160369298; herein SEQ ID NO: 1560), NNDSQA (SEQ ID NO: 12 of US20160369298; herein SEQ ID NO: 1561), NNRNQA (SEQ ID NO: 13 of US20160369298; herein SEQ ID NO: 1562), NNNKQA (SEQ ID NO: 14 of US20160369298; herein SEQ ID NO: 1563). NAKRQA (SEQ ID NO: 15 of US20160369298; herein SEQ ID NO: 1564), NDEHQA (SEQ ID NO: 16 of US20160369298; herein SEQ ID NO: 1565), NTSQKA (SEQ ID NO: 17 of US20160369298; herein SEQ ID NO: 1566), YYLSRTNTPSGTDTQSRLVFSQAGA (SEQ ID NO: 18 of US20160369298; herein SEQ ID NO: 1567), YYLSRTNTDSGTETQSGLDFSQAGA (SEQ ID NO: 19 of US20160369298; herein SEQ ID NO: 1568), YYLSRTNTESGTPTQSALEFSQAGA (SEQ ID NO: 20 of US20160369298; herein SEQ ID NO: 1569), YYLSRTNTHSGTHTQSPLHFSQAGA (SEQ ID NO: 21 of US20160369298; herein SEQ ID NO: 1570), YYLSRTNTSSGTITISHLIFSQAGA (SEQ ID NO: 22 of US20160369298; herein SEQ ID NO: 1571), YYLSRTNTRSGIMTKSSLMFSQAGA (SEQ ID NO: 23 of US20160369298; herein SEQ ID NO: 1572), YYLSRTNTKSGRKTLSNLSFSQAGA (SEQ ID NO: 24 of US20160369298; herein SEQ ID NO: 1573), YYLSRTNDGSGPVTPSKLRFSQRGA (SEQ ID NO: 25 of US20160369298; herein SEQ ID NO: 1574), YYLSRTNAASGHATHSDLKFSQPGA (SEQ ID NO: 26 of US20160369298; herein SEQ ID NO: 1575), YYLSRTNGQAGSLTMSELGFSQVGA (SEQ ID NO: 27 of US20160369298; herein SEQ ID NO: 1576), YYLSRTNSTGGNQTTSQLLFSQLSA (SEQ ID NO: 28 of US20160369298; herein SEQ ID NO: 1577), YFLSRTNNNTGLNTNSTLNFSQGRA (SEQ ID NO: 29 of US20160369298; herein SEQ ID NO: 1578), SKTGADNNNSEYSWTG (SEQ ID NO: 30 of US20160369298; herein SEQ ID NO: 1579), SKTDADNNNSEYSWTG (SEQ ID NO: 31 of US20160369298; herein SEQ ID NO: 1580), SKTEADNNNSEYSWTG (SEQ ID NO: 32 of US20160369298; herein SEQ ID NO: 1581), SKTPADNNNSEYSWTG (SEQ ID NO: 33 of US20160369298; herein SEQ ID NO: 1582), SKTHADNNNSEYSWTG (SEQ ID NO: 34 of US20160369298; herein SEQ ID NO: 1583), SKTQADNNNSEYSWTG (SEQ ID NO: 35 of US20160369298; herein SEQ ID NO: 1584), SKTIADNNNSEYSWTG (SEQ ID NO: 36 of US20160369298; herein SEQ ID NO: 1585), SKTMADNNNSEYSWTG (SEQ ID NO: 37 of US20160369298; herein SEQ ID NO: 1586), SKTRADNNNSEYSWTG (SEQ ID NO: 38 of US20160369298; herein SEQ ID NO: 1587), SKTNADNNNSEYSWTG (SEQ ID NO: 39 of US20160369298; herein SEQ ID NO: 1588). SKTVGRNNNSEYSWTG (SEQ ID NO: 40 of US20160369298; herein SEQ ID NO: 1589), SKTADRNNNSEYSWTG (SEQ ID NO: 41 of US20160369298; herein SEQ ID NO: 1590), SKKLSQNNNSKYSWQG (SEQ ID NO: 42 of US20160369298; herein SEQ ID NO: 1591), SKPTTGNNNSDYSWPG (SEQ ID NO: 43 of US20160369298; herein SEQ ID NO: 1592), STQKNENNNSNYSWPG (SEQ ID NO: 44 of US20160369298; herein SEQ ID NO: 1593), HKDDEGKF (SEQ ID NO: 45 of US20160369298; herein SEQ ID NO: 1594), HKDDNRKF (SEQ ID NO: 46 of US20160369298; herein SEQ ID NO: 1595), HKDDTNKF (SEQ ID NO: 47 of US20160369298; herein SEQ ID NO: 1596), HEDSDKNF (SEQ ID NO: 48 of US20160369298; herein SEQ ID NO: 1597), HRDGADSF (SEQ ID NO: 49 of US20160369298; herein SEQ ID NO: 1598), HGDNKSRF (SEQ ID NO: 50 of US20160369298; herein SEQ ID NO: 1599), KQGSEKTNVDFEEV (SEQ ID NO: 51 of US20160369298; herein SEQ ID NO: 1600), KQGSEKTNVDSEEV (SEQ ID NO: 52 of US20160369298; herein SEQ ID NO: 1601), KQGSEKTNVDVEEV (SEQ ID NO: 53 of US20160369298; herein SEQ ID NO: 1602), KQGSDKTNVDDAGV (SEQ ID NO: 54 of US20160369298; herein SEQ ID NO: 1603), KQGSSKTNVDPREV (SEQ ID NO: 55 of US20160369298; herein SEQ ID NO: 1604), KQGSRKTNVDHKQV (SEQ ID NO: 56 of US20160369298; herein SEQ ID NO: 1605), KQGSKGGNVDTNRV (SEQ ID NO: 57 of US20160369298; herein SEQ ID NO: 1606), KQGSGEANVDNGDV (SEQ ID NO: 58 of US20160369298; herein SEQ ID NO: 1607), KQDAAADNIDYDHV (SEQ ID NO: 59 of US20160369298; herein SEQ ID NO: 1608), KQSGTRSNAAASSV (SEQ ID NO: 60 of US20160369298; herein SEQ ID NO: 1609), KENTNTNDTELTNV (SEQ ID NO: 61 of US20160369298; herein SEQ ID NO: 1610), QRGNNVAATADVNT (SEQ ID NO: 62 of US20160369298; herein SEQ ID NO: 1611). QRGNNEAATADVNT (SEQ ID NO: 63 of US20160369298; herein SEQ ID NO: 1612), QRGNNPAATADVNT (SEQ ID NO: 64 of US20160369298; herein SEQ ID NO: 1613), QRGNNHAATADVNT (SEQ ID NO: 65 of US20160369298; herein SEQ ID NO: 1614), QEENNIAATPGVNT (SEQ ID NO: 66 of US20160369298; herein SEQ ID NO: 1615). QPPNNMAATHEVNT (SEQ ID NO: 67 of US20160369298; herein SEQ ID NO: 1616), QHHNNSAATTIVNT (SEQ ID NO: 68 of US20160369298; herein SEQ ID NO: 1617), QTTNNRAAFNMVET (SEQ ID NO: 69 of US20160369298; herein SEQ ID NO: 1618), QKKNNNAASKKVAT (SEQ ID NO: 70 of US20160369298; herein SEQ ID NO: 1619), QGGNNKAADDAVKT (SEQ ID NO: 71 of US20160369298; herein SEQ ID NO: 1620), QAAKGGAADDAVKT (SEQ ID NO: 72 of US20160369298; herein SEQ ID NO: 1621), QDDRAAAANESVDT (SEQ ID NO: 73 of US20160369298; herein SEQ ID NO: 1622), QQQHDDAAYQRVHT (SEQ ID NO: 74 of US20160369298; herein SEQ ID NO: 1623), QSSSSLAAVSTVQT (SEQ ID NO: 75 of US20160369298; herein SEQ ID NO: 1624), QNNQTTAAIRNVTT (SEQ ID NO: 76 of US20160369298; herein SEQ ID NO: 1625), NYNKKSDNVDFT (SEQ ID NO: 77 of US20160369298; herein SEQ ID NO: 1626), NYNKKSENVDFT (SEQ ID NO: 78 of US20160369298; herein SEQ ID NO: 1627), NYNKKSLNVDFT (SEQ ID NO: 79 of US20160369298; herein SEQ ID NO: 1628), NYNKKSPNVDFT (SEQ ID NO: 80 of US20160369298; herein SEQ ID NO: 1629), NYSKKSHCVDFT (SEQ ID NO: 81 of US20160369298; herein SEQ ID NO: 1630), NYRKTIYVDFT (SEQ ID NO: 82 of US20160369298; herein SEQ ID NO: 1631), NYKEKKDVHFT (SEQ ID NO: 83 of US20160369298; herein SEQ ID NO: 1632), NYGHRAIVQFT (SEQ ID NO: 84 of US20160369298; herein SEQ ID NO: 1633), NYANHQFVVCT (SEQ ID NO: 85 of US20160369298; herein SEQ ID NO: 1634), NYDDDPTGVLLT (SEQ ID NO: 86 of US20160369298; herein SEQ ID NO: 1635), NYDDPTGVLLT (SEQ ID NO: 87 of US20160369298; herein SEQ ID NO: 1636), NFEQQNSVEWT (SEQ ID NO: 88 of US20160369298; herein SEQ ID NO: 1637), SQSGASN (SEQ ID NO: 89 and SEQ ID NO: 241 of US20160369298; herein SEQ ID NO: 1638), NNGSQA (SEQ ID NO: 90 of US20160369298; herein SEQ ID NO: 1639), YYLSRTNTPSGTTTWSRLQFSQAGA (SEQ ID NO: 91 of US20160369298; herein SEQ ID NO: 1640), SKTSADNNNSEYSWTG (SEQ ID NO: 92 of US20160369298; herein SEQ ID NO: 1641), HKDDEEKF (SEQ ID NO: 93, 209, 214, 219, 224, 234, 239, and 244 of US20160369298; herein SEQ ID NO: 1642), KQGSEKTNVDIEEV (SEQ ID NO: 94 of US20160369298; herein SEQ ID NO: 1643), QRGNNQAATADVNT (SEQ ID NO: 95 of US20160369298; herein SEQ ID NO: 1644), NYNKKSVNVDFT (SEQ ID NO: 96 of US20160369298; herein SEQ ID NO: 1645), SQSGASNYNTPSGTTTQSRLQFSTSADNNNSEYSWTGATKYH (SEQ ID NO: 106 of US20160369298; herein SEQ ID NO: 1646), SASGASNFNSEGGSLTQSSLGFSTDGENNNSDFSWTGATKYH (SEQ ID NO: 107 of US20160369298; herein SEQ ID NO: 1647), SQSGASNYNTPSGTTTQSRLQFSTDGENNNSDFSWTGATKYH (SEQ ID NO: 108 of US20160369298; herein SEQ ID NO: 1648), SASGASNYNTPSGTTTQSRLQFSTSADNNNSEFSWPGATTYH (SEQ ID NO: 109 of US20160369298; herein SEQ ID NO: 1649), SQSGASNFNSEGGSLTQSSLGFSTDGENNNSDFSWTGATKYH (SEQ ID NO: 110 of US20160369298; herein SEQ ID NO: 1650), SASGASNYNTPSGSLTQSSLGFSTDGENNNSDFSWTGATKYH (SEQ ID NO: 111 of US20160369298; herein SEQ ID NO: 1651), SQSGASNYNTPSGTTTQSRLQFSTSADNNNSDFSWTGATKYH (SEQ ID NO: 112 of US20160369298; herein SEQ ID NO: 1652), SGAGASNFNSEGGSLTQSSLGFSTDGENNNSDFSWTGATKYH (SEQ ID NO: 113 of US20160369298; herein SEQ ID NO: 1653), SGAGASN (SEQ ID NO: 176 of US20160369298; herein SEQ ID NO: 1654), NSEGGSLTQSSLGFS (SEQ ID NO: 177, 185, 193 and 202 of US20160369298; herein SEQ ID NO: 1655), TDGENNNSDFS (SEQ ID NO: 178 of US20160369298; herein SEQ ID NO: 1656), SEFSWPGATT (SEQ ID NO: 179 of US20160369298; herein SEQ ID NO: 1657), TSADNNNSDFSWT (SEQ ID NO: 180 of US20160369298; herein SEQ ID NO: 1658), SQSGASNY (SEQ ID NO: 181, 187, and 198 of US20160369298; herein SEQ ID NO: 1659), NTPSGTTTQSRLQFS (SEQ ID NO: 182, 188, 191, and 199 of US20160369298; herein SEQ ID NO: 1660), TSADNNNSEYSWTGATKYH (SEQ ID NO: 183 of US20160369298; herein SEQ ID NO: 1661), SASGASNF (SEQ ID NO: 184 of US20160369298; herein SEQ ID NO: 1662), TDGENNNSDFSWTGATKYH (SEQ ID NO: 186, 189, 194, 197, and 203 of US20160369298; herein SEQ ID NO: 1663). SASGASNY (SEQ ID NO: 190 and SEQ ID NO: 195 of US20160369298; herein SEQ ID NO: 1664), TSADNNNSEFSWPGATTYH (SEQ ID NO: 192 of US20160369298; herein SEQ ID NO: 1665), NTPSGSLTQSSLGFS (SEQ ID NO: 196 of US20160369298; herein SEQ ID NO: 1666), TSADNNNSDFSWTGATKYH (SEQ ID NO: 200 of US20160369298; herein SEQ ID NO: 1667), SGAGASNF (SEQ ID NO: 201 of US20160369298; herein SEQ ID NO: 1668), CTCCAGVVSVVSMRSRVCVNSGCAGCTDHCVVSRNSGTCVMSACACAA (SEQ ID NO: 204 of US20160369298; herein SEQ ID NO: 1669), CTCCAGAGAGGCAACAGACAAGCAGCTACCGCAGATGTCAACACACAA (SEQ ID NO: 205 of US20160369298; herein SEQ ID NO: 1670), SAAGASN (SEQ ID NO: 206 of US20160369298; herein SEQ ID NO: 1671), YFLSRTNTESGSTTQSTLRFSQAG (SEQ ID NO: 207 of US20160369298; herein SEQ ID NO: 1672), SKTSADNNNSDFS (SEQ ID NO: 208, 228, and 253 of US20160369298; herein SEQ ID NO: 1673), KQGSEKTDVDIDKV (SEQ ID NO: 210 of US20160369298; herein SEQ ID NO: 1674). STAGASN (SEQ ID NO: 211 of US20160369298; herein SEQ ID NO: 1675), YFLSRTNTTSGIETQSTLRFSQAG (SEQ ID NO: 212 and SEQ ID NO: 247 of US20160369298; herein SEQ ID NO: 1676), SKTDGENNNSDFS (SEQ ID NO: 213 and SEQ ID NO: 248 of US20160369298; herein SEQ ID NO: 1677), KQGAAADDVEIDGV (SEQ ID NO: 215 and SEQ ID NO: 250 of US20160369298; herein SEQ ID NO: 1678), SEAGASN (SEQ ID NO: 216 of US20160369298; herein SEQ ID NO: 1679), YYLSRTNTPSGTTTQSRLQFSQAG (SEQ ID NO: 217, 232 and 242 of US20160369298; herein SEQ ID NO: 1680), SKTSADNNNSEYS (SEQ ID NO: 218, 233, 238, and 243 of US20160369298; herein SEQ ID NO: 1681), KQGSEKTNVDIEKV (SEQ ID NO: 220, 225 and 245 of US20160369298; herein SEQ ID NO: 1682), YFLSRTNDASGSDTKSTLLFSQAG (SEQ ID NO: 222 of US20160369298; herein SEQ ID NO: 1683), STTPSENNNSEYS (SEQ ID NO: 223 of US20160369298; herein SEQ ID NO: 1684), SAAGATN (SEQ ID NO: 226 and SEQ ID NO: 251 of US20160369298; herein SEQ ID NO: 1685), YFLSRTNGEAGSATLSELRFSQAG (SEQ ID NO: 227 of US20160369298; herein SEQ ID NO: 1686), HGDDADRF (SEQ ID NO: 229 and SEQ ID NO: 254 of US20160369298; herein SEQ ID NO: 1687), KQGAEKSDVEVDRV (SEQ ID NO: 230 and SEQ ID NO: 255 of US20160369298; herein SEQ ID NO: 1688), KQDSGGDNIDIDQV (SEQ ID NO: 235 of US20160369298; herein SEQ ID NO: 1689), SDAGASN (SEQ ID NO: 236 of US20160369298; herein SEQ ID NO: 1690), YFLSRTNTEGGHDTQSTLRFSQAG (SEQ ID NO: 237 of US20160369298; herein SEQ ID NO: 1691), KEDGGGSDVAIDEV (SEQ ID NO: 240 of US20160369298; herein SEQ ID NO: 1692), SNAGASN (SEQ ID NO: 246 of US20160369298; herein SEQ ID NO: 1693), and YFLSRTNGEAGSATLSELRFSQPG (SEQ ID NO: 252 of US20160369298; herein SEQ ID NO: 1694). Non-limiting examples of nucleotide sequences that may encode the amino acid mutated sites include the following, AGCVVMDCAGGARSCASCAAC (SEQ ID NO: 97 of US20160369298; herein SEQ ID NO: 1695), AACRACRRSMRSMAGGCA (SEQ ID NO: 98 of US20160369298; herein SEQ ID NO: 1696), CACRRGGACRRCRMSRRSARSTTT (SEQ ID NO: 99 of US20160369298; herein SEQ ID NO: 1697), TATTTCTTGAGCAGAACAAACRVCVVSRSCGGAMNCVHSACGMHSTCAVVSCTTVDSTT TTCTCAGSBCRGSGCG (SEQ ID NO: 100 of US20160369298; herein SEQ ID NO: 1698), TCAAMAMMAVNSRVCSRSAACAACAACAGTRASTTCTCGTGGMMAGGA (SEQ ID NO: 101 of US20160369298; herein SEQ ID NO: 1699), AAGSAARRCRSCRVSRVARVCRATRYCGMSNHCRVMVRSGTC (SEQ ID NO: 102 of US20160369298; herein SEQ ID NO: 1700), CAGVVSVVSMRSRVCVNSGCAGCTDHCVVSRNSGTCVMSACA (SEQ ID NO: 103 of US20160369298; herein SEQ ID NO: 1701), AACTWCRVSVASMVSVHSDDTGTGSWSTKSACT (SEQ ID NO: 104 of US20160369298; herein SEQ ID NO: 1702). TTGTTGAACATCACCACGTGACGCACGTTC (SEQ ID NO: 256 of US20160369298; herein SEQ ID NO: 1703), TCCCCGTGGTTCTACTACATAATGTGGCCG (SEQ ID NO: 257 of US20160369298; herein SEQ ID NO: 1704), TTCCACACTCCGTTTTGGATAATGTTGAAC (SEQ ID NO: 258 of US20160369298; herein SEQ ID NO: 1705), AGGGACATCCCCAGCTCCATGCTGTGGTCG (SEQ ID NO: 259 of US20160369298; herein SEQ ID NO: 1706), AGGGACAACCCCTCCGACTCGCCCTAATCC (SEQ ID NO: 260 of US20160369298; herein SEQ ID NO: 1707), TCCTAGTAGAAGACACCCTCTCACTGCCCG (SEQ ID NO: 261 of US20160369298; herein SEQ ID NO: 1708), AGTACCATGTACACCCACTCTCCCAGTGCC (SEQ ID NO: 262 of US20160369298; herein SEQ ID NO: 1709), ATATGGACGTTCATGCTGATCACCATACCG (SEQ ID NO: 263 of US20160369298; herein SEQ ID NO: 1710), AGCAGGAGCTCCTTGGCCTCAGCGTGCGAG (SEQ ID NO: 264 of US20160369298; herein SEQ ID NO: 1711), ACAAGCAGCTTCACTATGACAACCACTGAC (SEQ ID NO: 265 of US20160369298; herein SEQ ID NO: 1712), CAGCCTAGGAACTGGCTTCCTGGACCCTGTTACCGCCAGCAGAGAGTCTCAAMAMMAV NSRVCSRSAACAACAACAGTRASTTCTCCTGGMMAGGAGCTACCAAGTACCACCTCAAT GGCAGAGACTCTCTGGTGAATCCCGGACCAGCTATGGCAAGCCACRRGGACRRCRMSRR SARSTTTTTTCCTCAGAGCGGGGTTCTCATCTTTGGGAAGSAARRCRSCRVSRVARVCRAT RYCGMSNHCRVMVRSGTCATGATTACAGACGAAGAGGAGATCTGGAC (SEQ ID NO: 266 of US20160369298; herein SEQ ID NO: 1713), TGGGACAATGGCGGTCGTCTCTCAGAGTTKTKKT (SEQ ID NO: 267 of US20160369298; herein SEQ ID NO: 1714), AGAGGACCKKTCCTCGATGGTTCATGGTGGAGTTA (SEQ ID NO: 268 of US20160369298; herein SEQ ID NO: 1715), CCACTTAGGGCCTGGTCGATACCGTTCGGTG (SEQ ID NO: 269 of US20160369298; herein SEQ ID NO: 1716), and TCTCGCCCCAAGAGTAGAAACCCTTCSTTYYG (SEQ ID NO: 270 of US20160369298; herein SEQ ID NO: 1717).

[0091] In some embodiments, the AAV serotype may comprise an ocular cell targeting peptide as described in International Patent Publication WO2016134375, the contents of which are herein incorporated by reference in their entirety, such as, but not limited to SEQ ID NO: 9, and SEQ ID NO:10 of WO2016134375. Further, any of the ocular cell targeting peptides or amino acids described in WO2016134375, may be inserted into any parent AAV serotype, such as, but not limited to, AAV2 (SEQ ID NO:8 of WO2016134375; herein SEQ ID NO: 1718), or AAV9 (SEQ ID NO: 11 of WO2016134375; herein SEQ ID NO: 1719). In some embodiments, modifications, such as insertions are made in AAV2 proteins at P34-A35, T138-A139, A139-P140, G453-T454, N587-R588, and/or R588-Q589. In certain embodiments, insertions are made at D384, G385, 1560, T561, N562, E563, E564, E565, N704, and/or Y705 of AAV9. The ocular cell targeting peptide may be, but is not limited to, any of the following amino acid sequences, GSTPPPM (SEQ ID NO: 1 of WO2016134375; herein SEQ ID NO: 1720), or GETRAPL (SEQ ID NO: 4 of WO2016134375; herein SEQ ID NO: 1721).

[0092] In some embodiments, the AAV serotype may be modified as described in the United States Publication US 20170145405 the contents of which are herein incorporated by reference in their entirety. AAV serotypes may include, modified AAV2 (e.g., modifications at Y444F. Y500F. Y730F and/or S662V), modified AAV3 (e.g., modifications at Y705F, Y731F and/or T492V), and modified AAV6 (e.g., modifications at S663V and/or T492V).

[0093] In some embodiments, the AAV serotype may be modified as described in the International Publication WO2017083722 the contents of which are herein incorporated by reference in their entirety. AAV serotypes may include, AAV1 (Y705+731F+T492V), AAV2 (Y444+500+730F+T491V), AAV3 (Y705+731F), AAV5, AAV 5(Y436+693+719F), AAV6 (VP3 variant Y705F/Y731F/T492V), AAV8 (Y733F), AAV9, AAV9 (VP3 variant Y731F), and AAV10 (Y733F).

[0094] In some embodiments, the AAV serotype may comprise, as described in International Patent Publication WO2017015102, the contents of which are herein incorporated by reference in their entirety, an engineered epitope comprising the amino acids SPAKFA (SEQ ID NO: 24 of WO2017015102; herein SEQ ID NO: 1722) or NKDKLN (SEQ ID NO:2 of WO2017015102; herein SEQ ID NO: 1723). The epitope may be inserted in the region of amino acids 665 to 670 based on the numbering of the VP1 capsid of AAV8 (SEQ ID NO: 3 of WO2017015102) and/or residues 664 to 668 of AAV3B (SEQ ID NO: 3).

[0095] In some embodiments, the AAV serotype may be, or may have a sequence as described in International Patent Publication WO2017058892, the contents of which are herein incorporated by reference in their entirety, such as, but not limited to, AAV variants with capsid proteins that may comprise a substitution at one or more (e.g., 2, 3, 4, 5, 6, or 7) of amino acid residues 262-268, 370-379,451-459, 472-473,493-500, 528-534, 547-552, 588-597, 709-710, 716-722 of AAV1, in any combination, or the equivalent amino acid residues in AAV2, AAV3, AAV4, AAV5, AAV6, AAV7, AAV8, AAV9, AAV10, AAV11, AAV12, AAVrh8, AAVrh10, AAVrh32.33, bovine AAV or avian AAV. The amino acid substitution may be, but is not limited to, any of the amino acid sequences described in WO2017058892. In some embodiments, the AAV may comprise an amino acid substitution at residues 256L, 258K, 259Q, 261S, 263A, 264S, 265T, 266G, 272H, 385S, 386Q, S472R, V473D, N500E 547S, 709A, 710N, 716D, 717N, 718N, 720L, A456T, Q457T, N458Q, K459S, T492S, K493A, S586R, S587G, S588N, T589R and/or 722T of AAV1 (SEQ ID NO: 1 of WO2017058892) in any combination, 244N, 246Q, 248R, 249E, 250I, 251K, 252S, 253G, 254S, 255V, 256D, 263Y, 377E, 378N, 453L, 456R, 532Q, 533P, 535N, 536P, 537G, 538T, 539T, 540A, 541T, 542Y, 543L, 546N, 653V, 654P, 656S, 697Q, 698F, 704D, 7055, 706T, 707G, 708E, 709Y and/or 710R of AAV5 (SEQ ID NO:5 of WO2017058892) in any combination, 248R, 316V, 317Q, 318D, 319S, 443N, 530N, 531S, 532Q 533P, 534A, 535N, 540A, 541 T, 542Y, 543L, 545G, 546N, 697Q, 704D, 706T, 708E, 709Y and/or 710R of AAV5 (SEQ ID NO: 5 of WO2017058892) in any combination, 264S, 266G, 269N, 272H, 457Q, 588S and/or 5891 of AAV6 (SEQ ID NO:6 WO2017058892) in any combination, 457T, 459N, 496G, 499N, 500N, 589Q, 590N and/or 592A of AAV8 (SEQ ID NO: 8 WO2017058892) in any combination, 4511, 452N, 453G, 454S, 455G, 456Q, 457N and/or 458Q of AAV9 (SEQ ID NO: 9 WO2017058892) in any combination.

[0096] In some embodiments, the AAV may include a sequence of amino acids at positions 155, 156 and 157 of VP1 or at positions 17, 18, 19 and 20 of VP2, as described in International Publication No. WO 2017066764, the contents of which are herein incorporated by reference in their entirety. The sequences of amino acid may be, but not limited to, N-S-S, S-X-S, S-S-Y, N-X-S, N-S-Y, S-X-Y and N-X-Y, where N, X and Y are, but not limited to, independently non-serine, or non-threonine amino acids, wherein the AAV may be, but not limited to AAV1, AAV2, AAV3, AAV4, AAV5, AAV6, AAV7, AAV8, AAV9, AAV10, AAV11 and AAV12. In some embodiments, the AAV may include a deletion of at least one amino acid at positions 156, 157 or 158 of VP1 or at positions 19, 20 or 21 of VP2, wherein the AAV may be, but not limited to AAV1, AAV2, AAV3, AAV4, AAV5, AAV6, AAV7, AAV8, AAV9, AAV10, AAV11 and AAV12.

[0097] In some embodiments, the AAV may be a serotype generated by Cre-recombination-based AAV targeted evolution (CREATE) as described by Deverman et al., (Nature Biotechnology 34(2):204-209 (2016)), the contents of which are herein incorporated by reference in their entirety. In some embodiments, AAV serotypes generated in this manner have improved CNS transduction and/or neuronal and astrocytic tropism, as compared to other AAV serotypes. As non-limiting examples, the AAV serotype may include a peptide such as, but not limited to, PHP.B, PHP.B2, PHP.B3, PHP.A, PHP.S, G2A12, G2A15, G2A3, G2B4, and G2B5. In some embodiments, these AAV serotypes may be AAV9 (SEQ ID NO: 11 or 138) derivatives with a 7-amino acid insert between amino acids 588-589. Non-limiting examples of these 7-amino acid inserts include TLAVPFK (PHP.B; SEQ ID NO: 1262), SVSKPFL (PHP.B2; SEQ ID NO: 1270), FTLTTPK (PHP.B3; SEQ ID NO: 1271), YTLSQGW (PHP.A; SEQ ID NO: 1277), QAVRTSL (PHP.S; SEQ ID NO: 1321), LAKERLS (G2A3; SEQ ID NO: 1322), MNSTKNV (G2B4; SEQ ID NO: 1323), and/or VSGGHHS (G2B5; SEQ ID NO: 1324).

[0098] In some embodiments, the AAV serotype may be as described in Jackson et al (Frontiers in Molecular Neuroscience 9:154 (2016)), the contents of which are herein incorporated by reference in their entirety. In some embodiments, the AAV serotype is PHP.B or AAV9. In some embodiments, the AAV serotype is paired with a synapsin promoter to enhance neuronal transduction, as compared to when more ubiquitous promoters are used (i.e., CBA or CMV).

[0099] In some embodiments, the AAV serotype is a serotype comprising the AAVPHP.N (PHP.N) peptide, or a variant thereof.

[0100] In some embodiments the AAV serotype is a serotype comprising the AAVPHP.B (PHP.B) peptide, or a variant thereof.

[0101] In some embodiments, the AAV serotype is a serotype comprising the AAVPHP.A (PHP.A) peptide, or a variant thereof.

[0102] In some embodiments, the AAV serotype is a serotype comprising the PHP.S peptide, or a variant thereof.

[0103] In some embodiments, the AAV serotype is a serotype comprising the PHP.B2 peptide, or a variant thereof.

[0104] In some embodiments, the AAV serotype is a serotype comprising the PHP.B3 peptide, or a variant thereof.

[0105] In some embodiments, the AAV serotype is a serotype comprising the G2B4 peptide, or a variant thereof.

[0106] In some embodiments, the AAV serotype is a serotype comprising the G2B5 peptide, or a variant thereof.

[0107] In some embodiments the AAV serotype is VOY101, or a variant thereof. In some embodiments, the VOY101 capsid comprises the amino acid sequence SEQ ID NO: 1. In some embodiments, the VOY101 amino acid sequence is encoded by a nucleotide sequence comprising SEQ ID NO: 2. In some embodiments, the VOY101 capsid comprises an amino acid sequence at least 70% identical to SEQ ID NO: 1, such as, 70%, 75%, 80%, 85%, 90%, 91%, 92%, 93%, 94%, 95%, 96%, 97%, 98%, 99%, or greater than 99%. In some embodiments, the VOY101 capsid comprises a nucleotide sequence at least 70% identical to SEQ ID NO: 2, such as, 70%, 75%, 80%, 85%, 90%, 91%, 92%, 93%, 94%, 95%, 96%, 97%, 98%, 99%, or greater than 99%.

[0108] In some embodiments, the AAV serotype is VOY201, or a variant thereof. In some embodiments, the VOY201 capsid comprises the amino acid sequence SEQ ID NO: 4534. In some embodiments, the VOY201 amino acid sequence is encoded by a nucleotide sequence comprising SEQ ID NO: 3. In some embodiments, the VOY201 capsid comprises an amino acid sequence at least 70% identical to SEQ ID NO: 4534, such as, 70%, 75%, 80%, 85%, 90%, 91%, 92%, 93%, 94%, 95%, 96%, 97%, 98%, 99%, or greater than 99%. In some embodiments, the VOY201 capsid comprises a nucleotide sequence at least 70% identical to SEQ ID NO: 3, such as, 70%, 75%, 80%, 85%, 90%, 91%, 92%, 93%, 94%, 95%, 96%, 97%, 98%, 99%, or greater than 99%.

[0109] In some embodiments, the AAV serotype is PHP.B, or a variant thereof. In some embodiments, the PHP.B capsid comprises the amino acid sequence SEQ ID NO: 5. In some embodiments, the PHP.B amino acid sequence is encoded by a nucleotide sequence comprising SEQ ID NO: 6. In some embodiments, the PHP.B capsid comprises an amino acid sequence at least 70% identical to SEQ ID NO: 5, such as, 70%, 75%, 80%, 85/6, 90%, 91%, 92%, 93%, 94%, 95%, 96%, 97%, 98%, 99%, or greater than 99%. In some embodiments, the PHP.B capsid comprises a nucleotide sequence at least 70% identical to SEQ ID NO: 6, such as, 70%, 75%, 80%, 85%, 90%, 91%, 92%, 93%, 94%, 95%, 96%, 97%, 98%, 99%, or greater than 99%.

[0110] In some embodiments, the AAV serotype is PHP.N, or a variant thereof. In some embodiments, the PHP.N capsid comprises the amino acid sequence SEQ ID NO: 4. In some embodiments, the PHP.N capsid comprises an amino acid sequence at least 70% identical to SEQ ID NO: 4, such as, 70%, 75%, 80%, 85%, 90%, 91%, 92%, 93%, 94%, 95%, 96%, 97%, 98%, 99%, or greater than 99%.

[0111] In some embodiments the AAV serotype is AAV9, or a variant thereof. In some embodiments, the AAV9 capsid comprises the amino acid sequence SEQ ID NO: 138. In some embodiments, the AAV9 amino acid sequence is encoded by a nucleotide sequence comprising SEQ ID NO: 137. In some embodiments, the AAV9 capsid comprises an amino acid sequence at least 70% identical to SEQ ID NO: 138, such as, 70%, 75%, 80%, 85%, 90%, 91%, 92%, 93%, 94%, 95%, 96%, 97%, 98%, 99%, or greater than 99%. In some embodiments, the AAV9 capsid comprises a nucleotide sequence at least 70% identical to SEQ ID NO: 137, such as, 70%, 75%, 80%, 85%, 90%, 91%, 92%, 93%, 94%, 95%, 96%, 97%, 98%, 99%, or greater than 99%.

[0112] In some embodiments, the AAV serotype is AAV9K449R, or a variant thereof. In some embodiments, the AAV9K449R capsid comprises the amino acid sequence SEQ ID NO: 11. In some embodiments, the AAV9K449R capsid comprises an amino acid sequence at least 70% identical to SEQ ID NO: 11, such as, 70%, 75%, 80%, 85%, 90%, 91%, 92%, 93%, 94%, 95%, 96%, 97%, 98%, 99%, or greater than 99%.

[0113] In some embodiments, the AAV capsid allows for blood brain barrier penetration following intravenous administration. Non-limiting examples of such AAV capsids include AAV9, AAV9K449R, VOY101, VOY201, or AAV capsids comprising a peptide insert such as, but not limited to, AAVPHP.N (PHP.N), AAVPHP.B (PHP.B), PHP.S, G2A3, G2B4, G2B5, G2A12, G2A15, PHP.B2, PHP.B3, or AAVPHP.A (PHP.A).

[0114] In some embodiments, the AAV capsid is suitable for intramuscular administration and/or transduction of muscle fibers. Non-limiting examples of such AAV capsids include AAV2, AAV3, AAV8 and variants thereof such as, but not limited to, AAV2 variants, AAV2/3 variants, AAV8 variants, and/or AAV2/3/8 variants.

[0115] In some embodiments, the AAV serotype is an AAV2 variant. As a non-limiting example, the AAV serotype is an AAV2 variant comprising SEQ ID NO: 2679 or a fragment or variant thereof. As a non-limiting example, the AAV serotype is at least 70% identical to SEQ ID NO: 2679, such as, 70%, 75%, 80%, 85%, 90%, 91%, 92%, 93%, 94%, 95%, 96%, 97%, 98%, 99%, or greater than 99%.

[0116] In some embodiments, the AAV serotype is an AAV2/3 variant. As a non-limiting example, the AAV serotype is an AAV2/3 variant comprising SEQ ID NO: 2809 or a fragment or variant thereof. As a non-limiting example, the AAV serotype is an AAV2/3 variant which is at least 70% identical to SEQ ID NO: 2809, such as, 70%, 75%, 80%, 85%, 90%, 91%, 92%, 93%, 94%, 95%, 96%, 97%, 98%, 99%, or greater than 99%. As a non-limiting example, the AAV serotype is an AAV2/3 variant comprising SEQ ID NO: 2871 or a fragment or variant thereof. As a non-limiting example, the AAV serotype is an AAV2/3 variant which is at least 70% identical to SEQ ID NO: 2871, such as, 70%, 75%, 80%, 85%, 90%, 91%, 92%, 93%, 94%, 95%, 96%, 97%, 98%, 99%, or greater than 99%.

[0117] In some embodiments, the AAV serotype may comprise a capsid amino acid sequence with 50%, 51%, 52%, 53%, 54%, 55%, 56%, 57%, 58%, 59%, 60%, 61%, 62%, 63%, 64%, 65%, 66%, 67%, 68%, 69%, 70%, 71%, 72%, 73%, 74%, 75%, 76%, 77%, 78%, 79%, 80%, 81%, 82%, 83%, 84%, 85%, 86%, 87%, 88%, 89%, 90%, 91%, 92%, 93%, 94%, 95%, 96%, 97%, 98%, 99%, or 100% identity to any of those described herein.

[0118] In some embodiments, the AAV serotype may be encoded by a capsid nucleic acid sequence with 50%, 51%, 52%, 53%, 54%, 55%, 56%, 57%, 58%, 59%, 60%, 61%, 62%, 63%, 64%, 65%, 66%, 67%, 68%, 69%, 70%, 71%, 72%, 73%, 74%, 75%, 76%, 77%, 78%, 79%, 80%, 81%, 82%, 83%, 84%, 85%, 86%, 87%, 88%, 89%, 90%, 91%, 92%, 93%, 94%, 95%, 96%, 97%, 98%, 99%, or 100% identity to any of those described herein.

[0119] In some embodiments, the AAV serotype is selected for use due to its tropism for cells of the central nervous system. In some embodiments, the cells of the central nervous system are neurons. In another embodiment, the cells of the central nervous system are astrocytes.

[0120] In some embodiments, the AAV serotype is selected for use due to its tropism for cells of the muscle(s).

[0121] In some embodiments, the initiation codon for translation of the AAV VP1 capsid protein may be CTG, TTG, or GTG as described in U.S. Pat. No. 8,163,543, the contents of which are herein incorporated by reference in its entirety.

[0122] The present disclosure refers to structural capsid proteins (including VP1, VP2 and VP3) which are encoded by capsid (Cap) genes. These capsid proteins form an outer protein structural shell (i.e. capsid) of a viral vector such as AAV. VP capsid proteins synthesized from Cap polynucleotides generally include a methionine as the first amino acid in the peptide sequence (Met1), which is associated with the start codon (AUG or ATG) in the corresponding Cap nucleotide sequence. However, it is common for a first-methionine (Met1) residue or generally any first amino acid (AA1) to be cleaved off after or during polypeptide synthesis by protein processing enzymes such as Met-aminopeptidases. This “Met/AA-clipping” process often correlates with a corresponding acetylation of the second amino acid in the polypeptide sequence (e.g., alanine, valine, serine, threonine, etc.). Met-clipping commonly occurs with VP1 and VP3 capsid proteins but can also occur with VP2 capsid proteins.

[0123] Where the Met/AA-clipping is incomplete, a mixture of one or more (one, two or three) VP capsid proteins comprising the viral capsid may be produced, some of which may include a Met1/AA1 amino acid (Met+/AA+) and some of which may lack a Met1/AA1 amino acid as a result of Met/AA-clipping (Met−/AA−). For further discussion regarding Met/AA-clipping in capsid proteins, see Jin, et al. Direct Liquid Chromatography/Mass Spectrometry Analysis for Complete Characterization of Recombinant Adeno-Associated Virus Capsid Proteins. Hum Gene Ther Methods. 2017 Oct. 28(5):255-267; Hwang, et al. N-Terminal Acetylation of Cellular Proteins Creates Specific Degradation Signals. Science. 2010 Feb. 19. 327(5968): 973-977; the contents of which are each incorporated herein by reference in its entirety.

[0124] According to the present disclosure, references to capsid proteins is not limited to either clipped (Met−/AA−) or unclipped (Met+/AA+) and may, in context, refer to independent capsid proteins, viral capsids comprised of a mixture of capsid proteins, and/or polynucleotide sequences (or fragments thereof) which encode, describe, produce or result in capsid proteins of the present disclosure. A direct reference to a “capsid protein” or “capsid polypeptide” (such as VP1, VP2 or VP2) may also comprise VP capsid proteins which include a Met1/AA1 amino acid (Met+/AA+) as well as corresponding VP capsid proteins which lack the Met1/AA1 amino acid as a result of Met/AA-clipping (Met−/AA−).

[0125] Further according to the present disclosure, a reference to a specific SEQ ID NO: (whether a protein or nucleic acid) which comprises or encodes, respectively, one or more capsid proteins which include a Met1/AA1 amino acid (Met+/AA+) should be understood to teach the VP capsid proteins which lack the Met1/AA1 amino acid as upon review of the sequence, it is readily apparent any sequence which merely lacks the first listed amino acid (whether or not Met1/AA1).

[0126] As a non-limiting example, reference to a VP1 polypeptide sequence which is 736 amino acids in length and which includes a “Met1” amino acid (Met+) encoded by the AUG/ATG start codon may also be understood to teach a VP1 polypeptide sequence which is 735 amino acids in length and which does not include the “Met1” amino acid (Met−) of the 736 amino acid Met+ sequence. As a second non-limiting example, reference to a VP1 polypeptide sequence which is 736 amino acids in length and which includes an “AA1” amino acid (AA1+) encoded by any NNN initiator codon may also be understood to teach a VP1 polypeptide sequence which is 735 amino acids in length and which does not include the “AA1” amino acid (AA1−) of the 736 amino acid AA1+ sequence.

[0127] References to viral capsids formed from VP capsid proteins (such as reference to specific AAV capsid serotypes), can incorporate VP capsid proteins which include a Met1/AA1 amino acid (Met+/AA1+), corresponding VP capsid proteins which lack the Met1/AA1 amino acid as a result of Met/AA1-clipping (Met−/AA1−), and combinations thereof (Met+/AA1+ and Met−/AA1−).

[0128] As a non-limiting example, an AAV capsid serotype can include VP1 (Met+/AA1+), VP1 (Met−/AA1−), or a combination of VP1 (Met+/AA1+) and VP1 (Met−/AA1−). An AAV capsid serotype can also include VP3 (Met+/AA1+), VP3 (Met−/AA1−), or a combination of VP3 (Met+/AA1+) and VP3 (Met−/AA1−); and can also include similar optional combinations of VP2 (Met+/AA1) and VP2 (Met−/AA1−).

### Viral Genome Component: Inverted Terminal Repeals (ITRs)

[0129] The AAV particles of the present disclosure comprise a viral genome with at least one ITR region and a payload region. In some embodiments, the viral genome has two ITRs. These two ITRs flank the payload region at the 5′ and 3′ ends. The ITRs function as origins of replication comprising recognition sites for replication. ITRs comprise sequence regions which can be complementary and symmetrically arranged. ITRs incorporated into viral genomes may be comprised of naturally occurring polynucleotide sequences or recombinantly derived polynucleotide sequences.

[0130] The ITRs may be derived from the same serotype as the capsid, selected from any of the serotypes listed in Table 1, or a derivative thereof. The ITR may be of a different serotype than the capsid. In some embodiments, the AAV particle has more than one ITR. In a non-limiting example, the AAV particle has a viral genome comprising two ITRs. In some embodiments, the ITRs are of the same serotype as one another. In another embodiment, the ITRs are of different serotypes. Non-limiting examples include zero, one or both of the ITRs having the same serotype as the capsid. In some embodiments both ITRs of the viral genome of the AAV particle are AAV2 ITRs.

[0131] Independently, each ITR may be about 100 to about 150 nucleotides in length. An ITR may be about 100-105 nucleotides in length, 106-110 nucleotides in length, 111-115 nucleotides in length, 116-120 nucleotides in length, 121-125 nucleotides in length, 126-130 nucleotides in length, 131-135 nucleotides in length, 136-140 nucleotides in length, 141-145 nucleotides in length or 146-150 nucleotides in length. In some embodiments, the ITRs are 140-142 nucleotides in length. Non-limiting examples of ITR length are 102, 130, 140, 141, 142, 145 nucleotides in length, and those having at least 95% identity thereto.

[0132] In some embodiments, each ITR may be 141 nucleotides in length.

[0133] In some embodiments, each ITR may be 130 nucleotides in length.

[0134] In some embodiments, the AAV particles comprise two ITRs and one ITR is 141 nucleotides in length and the other ITR is 130 nucleotides in length.

### Viral Genome Component: Promoters

[0135] In some embodiments, the payload region of the viral genome comprises at least one element to enhance the transgene target specificity and expression (See e.g., Powell et al. Viral Expression Cassette Elements to Enhance Transgene Target Specificity and Expression in Gene Therapy, 2015; the contents of which are herein incorporated by reference in its entirety). Non-limiting examples of elements to enhance the transgene target specificity and expression include promoters, endogenous miRNAs, post-transcriptional regulatory elements (PREs), polyadenylation (PolyA) signal sequences and upstream enhancers (USEs), CMV enhancers and introns.

[0136] A person skilled in the art may recognize that expression of the polypeptides in a target cell may require a specific promoter, including but not limited to, a promoter that is species specific, inducible, tissue-specific, or cell cycle-specific (Parr et al., Nat. Med 3:1145-9 (1997); the contents of which are herein incorporated by reference in their entirety).

[0137] In some embodiments, the promoter is deemed to be efficient when it drives expression of the polypeptide(s) encoded in the payload region of the viral genome of the AAV particle.

[0138] In some embodiments, the promoter is a promoter deemed to be efficient when it drives expression in the cell being targeted.

[0139] In some embodiments, the promoter drives expression of the polypeptides (e.g., a functional antibody) for a period of time in targeted tissues. Expression driven by a promoter may be for a period of 1 hour, 2, hours, 3 hours, 4 hours, 5 hours, 6 hours, 7 hours, 8 hours, 9 hours, 10 hours, 11 hours, 12 hours, 13 hours, 14 hours, 15 hours, 16 hours, 17 hours, 18 hours, 19 hours, 20 hours, 21 hours, 22 hours, 23 hours, 1 day, 2 days, 3 days, 4 days, 5 days, 6 days, 1 week, 8 days, 9 days, 10 days, 11 days, 12 days, 13 days, 2 weeks, 15 days, 16 days, 17 days, 18 days, 19 days, 20 days, 3 weeks, 22 days, 23 days, 24 days, 25 days, 26 days, 27 days, 28 days, 29 days, 30 days, 31 days, 1 month, 2 months, 3 months, 4 months, 5 months, 6 months, 7 months, 8 months, 9 months, 10 months, 11 months, 1 year, 13 months, 14 months, 15 months, 16 months, 17 months, 18 months, 19 months, 20 months, 21 months, 22 months, 23 months, 2 years, 3 years, 4 years, 5 years, 6 years, 7 years, 8 years, 9 years, 10 years or more than 10 years. Expression may be for 1-5 hours, 1-12 hours, 1-2 days, 1-5 days, 1-2 weeks, 1-3 weeks, 1-4 weeks, 1-2 months, 1-4 months, 1-6 months, 2-6 months, 3-6 months, 3-9 months, 4-8 months, 6-12 months, 1-2 years, 1-5 years, 2-5 years, 3-6 years, 3-8 years, 4-8 years, or 5-10 years.

[0140] In some embodiments, the promoter drives expression of the polypeptides (e.g., a functional antibody) for at least 1 month, 2 months, 3 months, 4 months, 5 months, 6 months, 7 months, 8 months, 9 months, 10 months, 11 months, 1 year, 2 years, 3 years 4 years, 5 years, 6 years, 7 years, 8 years, 9 years, 10 years, 1 years, 12 years, 13 years, 14 years, 15 years, 16 years, 17 years, 18 years, 19 years, 20 years, 21 years, 22 years, 23 years, 24 years, 25 years, 26 years, 27 years, 28 years, 29 years, 30 years, 31 years, 32 years, 33 years, 34 years, 35 years, 36 years, 37 years, 38 years, 39 years, 40 years, 41 years, 42 years, 43 years, 44 years, 45 years, 46 years, 47 years, 48 years, 49 years, 50 years, 55 years, 60 years, 65 years, or more than 65 years.

[0141] Promoters may be naturally occurring or non-naturally occurring. Non-limiting examples of promoters include viral promoters, plant promoters and mammalian promoters. In some embodiments, the promoters may be human promoters. In some embodiments, the promoter may be truncated.

[0142] Promoters which drive or promote expression in most tissues include, but are not limited to, human elongation factor 1α-subunit (EF1α), cytomegalovirus (CMV) immediate-early enhancer and/or promoter, chicken β-actin (CBA) and its derivative CAG, β glucuronidase (GUSB), or ubiquitin C (UBC). Tissue-specific expression elements can be used to restrict expression to certain cell types such as, but not limited to, muscle specific promoters. B cell promoters, monocyte promoters, leukocyte promoters, macrophage promoters, pancreatic acinar cell promoters, endothelial cell promoters, lung tissue promoters, astrocyte promoters, or nervous system promoters which can be used to restrict expression to neurons, astrocytes, or oligodendrocytes.

[0143] Non-limiting examples of muscle-specific promoters include mammalian muscle creatine kinase (MCK) promoter, mammalian desmin (DES) promoter, mammalian troponin I (TNNI2) promoter, and mammalian skeletal alpha-actin (ASKA) promoter (see, e.g. U.S. Patent Publication US20110212529, the contents of which are herein incorporated by reference in their entirety)

[0144] Non-limiting examples of tissue-specific expression elements for neurons include neuron-specific enolase (NSE), platelet-derived growth factor (PDGF), platelet-derived growth factor B-chain (PDGF-β), synapsin (Syn), methyl-CpG binding protein 2 (MeCP2), Ca²⁺/calmodulin-dependent protein kinase II (CaMKII), metabotropic glutamate receptor 2 (mGluR2), neurofilament light (NFL) or heavy (NFH), β-globin minigene nβ2, preproenkephalin (PPE), enkephalin (Enk) and excitatory amino acid transporter 2 (EAAT2) promoters. Non-limiting examples of tissue-specific expression elements for astrocytes include glial fibrillary acidic protein (GFAP) and EAAT2 promoters. A non-limiting example of a tissue-specific expression element for oligodendrocytes includes the myelin basic protein (MBP) promoter.

[0145] In some embodiments, the promoter may be less than 1 kb. The promoter may have a length of 200, 210, 220, 230, 240, 250, 260, 270, 280, 290, 300, 310, 320, 330, 340, 350, 360, 370, 380, 390, 400, 410, 420, 430, 440, 450, 460, 470, 480, 490, 500, 510, 520, 530, 540, 550, 560, 570, 580, 590, 600, 610, 620, 630, 640, 650, 660, 670, 680, 690, 700, 710, 720, 730, 740, 750, 760, 770, 780, 790, 800, or more than 800 nucleotides. The promoter may have a length between 200-300, 200-400, 200-500, 200-600, 200-700, 200-800, 300-400, 300-500, 300-600, 300-700, 300-800, 400-500, 400-600, 400-700, 400-800, 500-600, 500-700, 500-800, 600-700, 600-800, or 700-800.

[0146] In some embodiments, the promoter may be a combination of two or more components of the same or different starting or parental promoters such as, but not limited to, CMV and CBA. Each component may have a length of 200, 210, 220, 230, 240, 250, 260, 270, 280, 290, 300, 310, 320, 330, 340, 350,360, 370, 380, 381, 382, 383, 384, 385, 386, 387, 388, 389, 390, 400, 410, 420, 430, 440, 450, 460, 470, 480, 490, 500, 510, 520, 530, 540, 550, 560, 570, 580, 590, 600, 610, 620, 630, 640, 650, 660, 670, 680, 690, 700, 710, 720, 730, 740, 750, 760, 770, 780, 790, 800, or more than 800. Each component may have a length between 200-300, 200-400, 200-500, 200-600, 200-700, 200-800, 300-400, 300-500, 300-600, 300-700, 300-800, 400-500, 400-600, 400-700, 400-800, 500-600, 500-700, 500-800, 600-700, 600-800 or 700-800. In some embodiments, the promoter is a combination of a 382 nucleotide CMV-enhancer sequence and a 260 nucleotide CBA-promoter sequence.

[0147] In some embodiments, the viral genome comprises a ubiquitous promoter. Non-limiting examples of ubiquitous promoters include CMV, CBA (including derivatives CAG, CB6, CBh, etc.), EF-1α, PGK, UBC, GUSB (hGBp), and UCOE (promoter of HNRPA2B1-CBX3).

[0148] Yu et al. (Molecular Pain 2011, 7:63; the contents of which are herein incorporated by reference in their entirety) evaluated the expression of eGFP under the CAG, EF1α, PGK and UBC promoters in rat DRG cells and primary DRG cells using lentiviral vectors and found that UBC showed weaker expression than the other 3 promoters and only 10-12% glial expression was seen for all promoters. Soderblom et al. (E. Neuro 2015; the contents of which are herein incorporated by reference in its entirety) evaluated the expression of eGFP in AAV8 with CMV and UBC promoters and AAV2 with the CMV promoter after injection in the motor cortex. Intranasal administration of a plasmid containing a UBC or EF1α promoter showed a sustained airway expression greater than the expression with the CMV promoter (See e.g., Gill et al., Gene Therapy 2001, Vol. 8, 1539-1546; the contents of which are herein incorporated by reference in their entirety). Husain et al. (Gene Therapy 2009; the contents of which are herein incorporated by reference in its entirety) evaluated an HOH construct with a hGUSB promoter, an HSV-1LAT promoter and an NSE promoter and found that the HOH construct showed weaker expression than NSE in mouse brain. Passini and Wolfe (J. Virol. 2001, 12382-12392, the contents of which are herein incorporated by reference in its entirety) evaluated the long-term effects of the HOH vector following an intraventricular injection in neonatal mice and found that there was sustained expression for at least 1 year. Low expression in all brain regions was found by Xu et al. (Gene Therapy 2001, 8, 1323-1332; the contents of which are herein incorporated by reference in their entirety) when NFL and NFH promoters were used as compared to the CMV-lacZ, CMV-luc, EF, GFAP, hENK, nAChR, PPE, PPE+wpre, NSE (0.3 kb), NSE (1.8 kb) and NSE (1.8 kb+wpre). Xu et al. found that the promoter activity in descending order was NSE (1.8 kb), EF, NSE (0.3 kb), GFAP, CMV, hENK, PPE, NFL and NFH. NFL is a 650 nucleotide promoter and NFH is a 920-nucleotide promoter which are both absent in the liver but NFH is abundant in the sensory proprioceptive neurons, brain and spinal cord and NFH is present in the heart. Scn8a is a 470 nucleotide promoter which expresses throughout the DRG, spinal cord and brain with particularly high expression seen in the hippocampal neurons and cerebellar Purkinje cells, cortex, thalamus, and hypothalamus (See e.g., Drews et al. Identification of evolutionary conserved, functional noncoding elements in the promoter region of the sodium channel gene SCN8A. Mamm Genome (2007) 18:723-731; and Raymond et al. Expression of Alternatively Spliced Sodium Channel α-subunit genes. Journal of Biological Chemistry (2004) 279(44) 46234-46241; the contents of each of which are herein incorporated by reference in their entireties).

[0149] Any of promoters taught by the aforementioned Yu, Soderblom, Gill, Husain. Passini, Xu, Drews, or Raymond may be used in the present disclosures.

[0150] In some embodiments, the promoter is not cell specific.

[0151] In some embodiments, the promoter is a ubiquitin c (UBC) promoter. The UBC promoter may have a size of 300-350 nucleotides. As a non-limiting example, the UBC promoter is 332 nucleotides.

[0152] In some embodiments, the promoter is a β-glucuronidase (GUSB) promoter. The GUSB promoter may have a size of 350-400 nucleotides. As a non-limiting example, the GUSB promoter is 378 nucleotides.

[0153] In some embodiments, the promoter is a neurofilament light (NFL) promoter. The NFL promoter may have a size of 600-700 nucleotides. As a non-limiting example, the NFL promoter is 650 nucleotides.

[0154] In some embodiments, the promoter is a neurofilament heavy (NFH) promoter. The NFH promoter may have a size of 900-950 nucleotides. As a non-limiting example, the NFH promoter is 920 nucleotides.

[0155] In some embodiments, the promoter is a scn8a promoter. The scn8a promoter may have a size of 450-500 nucleotides. As a non-limiting example, the scn8a promoter is 470 nucleotides.

[0156] In some embodiments, the promoter is a phosphoglycerate kinase 1 (PGK) promoter.

[0157] In some embodiments, the promoter is a chicken β-actin (CBA) promoter, or a variant thereof.

[0158] In some embodiments, the promoter is a CB6 promoter.

[0159] In some embodiments, the promoter is a minimal CB promoter.

[0160] In some embodiments, the promoter is a cytomegalovirus (CMV) promoter.

[0161] In some embodiments, the promoter is a CAG promoter.

[0162] In some embodiments, the promoter is a GFAP promoter.

[0163] In some embodiments, the promoter is a synapsin promoter.

[0164] In some embodiments, the promoter is a liver or a skeletal muscle promoter. Non-limiting examples of liver promoters include human α-1-antitrypsin (hAAT) and thyroxine binding globulin (TBG). Non-limiting examples of skeletal muscle promoters include Desmin, MCK or synthetic CS-12.

[0165] In some embodiments, the promoter is an RNA pol III promoter. As a non-limiting example, the RNA pol III promoter is U6. As a non-limiting example, the RNA pol III promoter is H1.

[0166] In some embodiments, the viral genome comprises two promoters. As a non-limiting example, the promoters are an EF1α promoter and a CMV promoter.

[0167] In some embodiments, the viral genome comprises an enhancer element, a promoter and/or a 5′UTR intron. The enhancer element, also referred to herein as an “enhancer,” may be, but is not limited to, a CMV enhancer, the promoter may be, but is not limited to, a CMV, CBA, UBC, GUSB, NSE, Synapsin, MeCP2, and GFAP promoter and the 5′UTR/intron may be, but is not limited to, SV40, and CBA-MVM. As a non-limiting example, the enhancer, promoter and/or intron used in combination may be: (1) CMV enhancer, CMV promoter, SV40 5′UTR intron; (2) CMV enhancer, CBA promoter, SV 40 5′UTR intron; (3) CMV enhancer, CBA promoter, CBA-MVM 5′UTR intron; (4) UBC promoter; (5) GUSB promoter; (6) NSE promoter; (7) Synapsin promoter; (8) MeCP2 promoter; and (9) GFAP promoter.

[0168] In some embodiments, the viral genome comprises an engineered promoter.

[0169] In another embodiment, the viral genome comprises a promoter from a naturally expressed protein.

### Viral Genome Component: Untranslated Regions (UTRs)

[0170] By definition, wild type untranslated regions (UTRs) of a gene are transcribed but not translated. Generally, the 5′ UTR starts at the transcription start site and ends at the start codon and the 3′ UTR starts immediately following the stop codon and continues until the termination signal for transcription.

[0171] Features typically found in abundantly expressed genes of specific target organs may be engineered into UTRs to enhance the stability and protein production. As a non-limiting example, a 5′ UTR from mRNA normally expressed in the liver (e.g., albumin, serum amyloid A, Apolipoprotein A/B/E, transferrin, alpha fetoprotein, erythropoietin, or Factor VIII) may be used in the viral genomes of the AAV particles to enhance expression in hepatic cell lines or liver.

[0172] While not wishing to be bound by theory, wild-type 5′ untranslated regions (UTRs) include features which play roles in translation initiation. Kozak sequences, which are commonly known to be involved in the process by which the ribosome initiates translation of many genes, are usually included in 5′ UTRs. Kozak sequences have the consensus CCR(A/G)CCAUGG, where R is a purine (adenine or guanine) three bases upstream of the start codon (ATG), which is followed by another ‘G’.

[0173] In some embodiments, the 5′UTR in the viral genome includes a Kozak sequence.

[0174] In some embodiments, the 5′UTR in the viral genome does not include a Kozak sequence.

[0175] In some embodiments, the Kozak sequence is GAGGAGCCACC (SEQ ID NO: 4543).

[0176] In some embodiments, the Kozak sequence is GCCGCCACCATG (SEQ ID NO: 2114)

[0177] While not wishing to be bound by theory, wild-type 3′ UTRs are known to have stretches of Adenosines and Uridines embedded therein. These AU rich signatures are particularly prevalent in genes with high rates of turnover. Based on their sequence features and functional properties, the AU rich elements (AREs) can be separated into three classes (Chen et al, 1995, the contents of which are herein incorporated by reference in its entirety): Class I AREs, such as, but not limited to, c-Myc and MyoD, contain several dispersed copies of an AUUUA motif within U-rich regions. Class II AREs, such as, but not limited to, GM-CSF and TNF-a, possess two or more overlapping UUAUUUA(U/A)(U/A) nonamers. Class III ARES, such as, but not limited to, c-Jun and Myogenin, are less well defined. These U rich regions do not contain an AUUUA motif. Most proteins binding to the AREs are known to destabilize the messenger, whereas members of the ELAV family, most notably HuR, have been documented to increase the stability of mRNA. HuR binds to AREs of all the three classes. Engineering the HuR specific binding sites into the 3′ UTR of nucleic acid molecules will lead to HuR binding and thus, stabilization of the message in vivo.

[0178] Introduction, removal or modification of 3′ UTR AU rich elements (AREs) can be used to modulate the stability of polynucleotides. When engineering specific polynucleotides, e.g., payload regions of viral genomes, one or more copies of an ARE can be introduced to make polynucleotides less stable and thereby curtail translation and decrease production of the resultant protein. Likewise, AREs can be identified and removed or mutated to increase the intracellular stability and thus increase translation and production of the resultant protein.

[0179] In some embodiments, the 3′ UTR of the viral genome may include an oligo(dT) sequence for templated addition of a poly-A tail.

[0180] In some embodiments, the viral genome may include at least one miRNA seed, binding site or full sequence, microRNAs (or miRNA or miR) are 19-25 nucleotide noncoding RNAs that bind to the sites of nucleic acid targets and down-regulate gene expression either by reducing nucleic acid molecule stability or by inhibiting translation. A microRNA sequence comprises a “seed” region, i.e., a sequence in the region of positions 2-8 of the mature microRNA, which sequence has perfect Watson-Crick complementarity to the miRNA target sequence of the nucleic acid.

[0181] In some embodiments, the viral genome may be engineered to include, alter or remove at least one miRNA binding site, sequence, or seed region.

[0182] Any UTR from any gene known in the art may be incorporated into the viral genome of the AAV particle. These UTRs, or portions thereof, may be placed in the same orientation as in the gene from which they were selected, or they may be altered in orientation or location. In some embodiments, the UTR used in the viral genome of the AAV particle may be inverted, shortened, lengthened, made with one or more other 5′ UTRs or 3′ UTRs known in the art. As used herein, the term “altered” as it relates to a UTR, means that the UTR has been changed in some way in relation to a reference sequence. For example, a 3′ or 5′ UTR may be altered relative to a wild type or native UTR by the change in orientation or location as taught above or may be altered by the inclusion of additional nucleotides, deletion of nucleotides, swapping or transposition of nucleotides.

[0183] In some embodiments, the viral genome of the AAV particle comprises at least one artificial UTRs which is not a variant of a wild type UTR.

[0184] In some embodiments, the viral genome of the AAV particle comprises UTRs which have been selected from a family of transcripts whose proteins share a common function, structure, feature or property.

### Viral Genome Component: Polyadenylation Sequence

[0185] In some embodiments, the viral genome of the AAV particles of the present disclosure comprise at least one polyadenylation sequence. The viral genome of the AAV particle may comprise a polyadenylation sequence between the 3′ end of the payload coding sequence and the 5′ end of the 3′ITR.

[0186] In some embodiments, the polyadenylation sequence or “polyA sequence” may range from absent to about 500 nucleotides in length. The polyadenylation sequence may be, but is not limited to, 1, 2, 3, 4, 5, 6, 7, 8, 9, 10, 11, 12, 13, 14, 15, 16, 17, 18, 19, 20, 21, 22, 23, 24, 25, 26, 27, 28, 29, 30, 31, 32, 33, 34, 35, 36, 37, 38, 39, 40, 41, 42, 43, 44, 45, 46, 47, 48, 49, 50, 51, 52, 53, 54, 55, 56, 57, 58, 59, 60, 61, 62, 63, 64, 65, 66, 67, 68, 69, 70, 71, 72, 73, 74, 75, 76, 77, 78, 79, 80, 81, 82, 83, 84, 85, 86, 87, 88, 89, 90, 91, 92, 93, 94, 95, 96, 97, 98, 99, 100, 101, 102, 103, 104, 105, 106, 107, 108, 109, 110, 111, 112, 113, 114, 115, 116, 117, 118, 119, 120, 121, 122, 123, 124, 125, 126, 127, 128, 129, 130, 131, 132, 133, 134, 135, 136, 137, 138, 139, 140, 141, 142, 143, 144, 145, 146, 147, 148, 149, 150, 151, 152, 153, 154, 155, 156, 157, 158, 159, 160, 161, 162, 163, 164, 165, 166, 167, 168, 169, 170, 171, 172, 173, 174, 175, 176, 177, 178, 179, 180, 181, 182, 183, 184, 185, 186, 187, 188, 189, 190, 191, 192, 193, 194, 195, 196, 197, 198, 199, 200, 201, 202, 203, 204, 205, 206, 207, 208, 209, 210, 211, 212, 213, 214, 215, 216, 217, 218, 219, 220, 221, 222, 223, 224, 225, 226, 227, 228, 229, 230, 231, 232, 233, 234, 235, 236, 237, 238, 239, 240, 241, 242, 243, 244, 245, 246, 247, 248, 249, 250, 251, 252, 253, 254, 255, 256, 257, 258, 259, 260, 261, 262, 263, 264, 265, 266, 267, 268, 269, 270, 271, 272, 273, 274, 275, 276, 277, 278, 279, 280, 281, 282, 283, 284, 285, 286, 287, 288, 289, 290, 291, 292, 293, 294, 295, 296, 297, 298, 299, 300, 301, 302, 303, 304, 305, 306, 307, 308, 309, 310, 311, 312, 313, 314, 315, 316, 317, 318, 319, 320, 321, 322, 323, 324, 325, 326, 327, 328, 329, 330, 331, 332, 333, 334, 335, 336, 337, 338, 339, 340, 341, 342, 343, 344, 345, 346, 347, 348, 349, 350, 351, 352, 353, 354, 355, 356, 357, 358, 359, 360, 361, 362, 363, 364, 365, 366, 367, 368, 369, 370, 371, 372, 373, 374, 375, 376, 377, 378, 379, 380, 381, 382, 383, 384, 385, 386, 387, 388, 389, 390, 391, 392, 393, 394, 395, 396, 397, 398, 399, 400, 401, 402, 403, 404, 405, 406, 407, 408, 409, 410, 411, 412, 413, 414, 415, 416, 417, 418, 419, 420, 421, 422, 423, 424, 425, 426, 427, 428, 429, 430, 431, 432, 433, 434, 435, 436, 437, 438, 439, 440, 441, 442, 443, 444, 445, 446, 447, 448, 449, 450, 451, 452, 453, 454, 455, 456, 457, 458, 459, 460, 461, 462, 463, 464, 465, 466, 467, 468, 469, 470, 471, 472, 473, 474, 475, 476, 477, 478, 479, 480, 481, 482, 483, 484, 485, 486, 487, 488, 489, 490, 491, 492, 493, 494, 495, 496, 497, 498, 499, 500, 501, 502, 503, 504, 505, 506, 507, 508, 509, 510, 511, 512, 513, 514, 515, 516, 517, 518, 519, 520, 521, 522, 523, 524, 525, 526, 527, 528, 529, 530, 531, 532, 533, 534, 535, 536, 537, 538, 539, 540, 541, 542, 543, 544, 545, 546, 547, 548, 549, 550, 551, 552, 553, 554, 555, 556, 557, 558, 559, 560, 561, 562, 563, 564, 565, 566, 567, 568, 569, 570, 571, 572, 573, 574, 575, 576, 577, 578, 579, 580, 581, 582, 583, 584, 585, 586, 587, 588, 589, 590, 591, 592, 593, 594, 595, 596, 597, 598, 599, and 600 nucleotides in length.

[0187] In some embodiments, the polyadenylation sequence is 50-100 nucleotides in length.

[0188] In some embodiments, the polyadenylation sequence is 50-150 nucleotides in length.

[0189] In some embodiments, the polyadenylation sequence is 50-160 nucleotides in length.

[0190] In some embodiments, the polyadenylation sequence is 50-200 nucleotides in length.

[0191] In some embodiments, the polyadenylation sequence is 60-100 nucleotides in length.

[0192] In some embodiments, the polyadenylation sequence is 60-150 nucleotides in length.

[0193] In some embodiments, the polyadenylation sequence is 60-160 nucleotides in length.

[0194] In some embodiments, the polyadenylation sequence is 60-200 nucleotides in length.

[0195] In some embodiments, the polyadenylation sequence is 70-100 nucleotides in length.

[0196] In some embodiments, the polyadenylation sequence is 70-150 nucleotides in length.

[0197] In some embodiments, the polyadenylation sequence is 70-160 nucleotides in length.

[0198] In some embodiments, the polyadenylation sequence is 70-200 nucleotides in length.

[0199] In some embodiments, the polyadenylation sequence is 80-100 nucleotides in length.

[0200] In some embodiments, the polyadenylation sequence is 80-150 nucleotides in length.

[0201] In some embodiments, the polyadenylation sequence is 80-160 nucleotides in length.

[0202] In some embodiments, the polyadenylation sequence is 80-200 nucleotides in length.

[0203] In some embodiments, the polyadenylation sequence is 90-100 nucleotides in length.

[0204] In some embodiments, the polyadenylation sequence is 90-150 nucleotides in length.

[0205] In some embodiments, the polyadenylation sequence is 90-160 nucleotides in length.

[0206] In some embodiments, the polyadenylation sequence is 90-200 nucleotides in length.

[0207] In some embodiments, the polyadenylation sequence is 127 nucleotides in length.

[0208] In some embodiments, the polyadenylation sequence is 477 nucleotides in length.

[0209] In some embodiments, the polyadenylation sequence is 552 nucleotides in length.

### Viral Genome Component: Linkers

[0210] Viral genomes may be engineered with one or more spacer or linker regions to separate coding or non-coding regions.

[0211] In some embodiments, the payload region of the AAV particle may optionally encode one or more linker sequences. In some cases, the linker may be a peptide linker that may be used to connect the polypeptides encoded by the payload region (i.e., light and heavy antibody chains during expression). Some peptide linkers may be cleaved after expression to separate heavy and light chain domains, allowing assembly of mature antibodies or antibody fragments. Linker cleavage may be enzymatic. In some cases, linkers comprise an enzymatic cleavage site to facilitate intracellular or extracellular cleavage. Some payload regions encode linkers that interrupt polypeptide synthesis during translation of the linker sequence from an mRNA transcript. Such linkers may facilitate the translation of separate protein domains (e.g., heavy and light chain antibody domains) from a single transcript. In some cases, two or more linkers are encoded by a payload region of the viral genome. Non-limiting examples of linkers that may be encoded by the payload region of an AAV particle viral genome are given in Table 2.

TABLE 2
Linkers

| Linker ID | Description | Length | SEQ ID NO |
|---|---|---|---|
| Linker1 | Furin | 12 | 1724 |
| Linker2 | Furin | 12 | 1725 |
| Linker3 | T2A | 54 | 1726 |
| Linker4 | F2A | 75 | 1727 |
| Linker5 | P2A | 66 | 1728 |
| Linker6 | SG4S (SEQ ID NO: 4536) | 18 | 1729 |
| Linker7 | (G4S)3 (SEQ ID NO: 4537) | 45 | 1730 |
| Linker8 | (G4S)5 (SEQ ID NO: 4538) | 75 | 1731 |
| Linker9 | IRES | 609 | 1732 |
| Linker10 | IRES-2 | 623 | 1733 |
| Linker11 | hIgG2 hinge | 54 | 1734 |
| Linker12 | hIgG3 hinge | 108 | 1735 |
| Linker13 | hIgG3-2 hinge | 153 | 1736 |
| Linker14 | hIgG3-3 hinge | 198 | 1737 |
| Linker15 | msiGG-1 hinge | 45 | 1738 |
| Linker16 | msiGG1 hinge | 18 | 1739 |
| Linker17 | HigG3 hinge | 198 | 2244 |
| Linker18 | G4S (SEQ ID NO: 4535) | 15 | 2245 |
| Linker19 | (G4S)2 (SEQ ID NO: 4539) | 30 | 2246 |
| Linker20 | (G4S)3 (SEQ ID NO: 4537) | 45 | 2247 |
| Linker21 | (G4S)4 (SEQ ID NO: 4540) | 60 | 2248 |
| Linker22 | (G4S)5 (SEQ ID NO: 4538) | 75 | 2249 |
| Linker23 | (G4S)5 (SEQ ID NO: 4538) | 75 | 2250 |
| Linker24 | (G4S)6 (SEQ ID NO: 4541) | 90 | 2251 |
| Linker25 | (G4S)8 (SEQ ID NO: 4542) | 120 | 2252 |
| Linker26 | (G4S)8 (SEQ ID NO: 4542) | 120 | 2253 |
| Linker27 | (G4S)4 (SEQ ID NO: 4540) | 60 | 2254 |
| Linker28 | (G4S)6 (SEQ ID NO: 4541) | 90 | 2259 |

[0212] Some payload regions encode linkers comprising furin cleavage sites. Furin is a calcium dependent serine endoprotease that cleaves proteins just downstream of a basic amino acid target sequence (Arg-X-(Arg/Lys)-Arg) (Thomas, G., 2002. Nature Reviews Molecular Cell Biology 3(10): 753-66; the contents of which are herein incorporated by reference in its entirety). Furin is enriched in the trans-golgi network where it is involved in processing cellular precursor proteins. Furin also plays a role in activating a number of pathogens. This activity can be taken advantage of for expression of polypeptides.

[0213] 2A peptides are small “self-cleaving” peptides (18-22 amino acids) derived from viruses such as foot-and-mouth disease virus (F2A), porcine teschovirus-1 (P2A), Thoseaasigna virus (T2A), or equine rhinitis A virus (E2A). The 2A designation refers specifically to a region of picornavirus polyproteins that lead to a ribosomal skip at the glycyl-prolyl bond in the C-terminus of the 2A peptide (Kim, J. H. et al., 2011. PLoS One 6(4): e18556; the contents of which are herein incorporated by reference in its entirety). This skip results in a cleavage between the 2A peptide and its immediate downstream peptide. As opposed to IRES linkers, 2A peptides generate stoichiometric expression of proteins flanking the 2A peptide and their shorter length can be advantageous in generating viral expression vectors.

[0214] Internal ribosomal entry site (IRES) is a nucleotide sequence (>500 nucleotides) that allows for initiation of translation in the middle of an mRNA sequence (Kim, J. H. et al., 2011. PLoS One 6(4): e18556; the contents of which are herein incorporated by reference in its entirety). Use of an IRES sequence ensures co-expression of genes before and after the IRES, though the sequence following the IRES may be transcribed and translated at lower levels than the sequence preceding the IRES sequence.

[0215] In some embodiments, the payload region may encode one or more linkers comprising cathepsin, matrix metalloproteinases or legumain cleavage sites. Such linkers are described e.g. by Cizeau and Macdonald in International Publication No. WO2008052322, the contents of which are herein incorporated in their entirety. Cathepsins are a family of proteases with unique mechanisms to cleave specific proteins. Cathepsin B is a cysteine protease and cathepsin D is an aspartyl protease. Matrix metalloproteinases are a family of calcium-dependent and zinc-containing endopeptidases. Legumain is an enzyme catalyzing the hydrolysis of (-Asn-Xaa-) bonds of proteins and small molecule substrates.

[0216] In some embodiments, payload regions may encode linkers that are not cleaved. Such linkers may include a simple amino acid sequence, such as a glycine rich sequence. In some cases, linkers may comprise flexible peptide linkers comprising glycine and serine residues. The linker may comprise flexible peptide linkers of different lengths, e.g. nxG4S, where n=1-10 (SEQ ID NO: 4544), and the length of the encoded linker varies between 5 and 50 amino acids. In a non-limiting example, the linker may be 5xG4S (SEQ ID NO: 4544). These flexible linkers are small and without side chains so they tend not to influence secondary protein structure while providing a flexible linker between antibody segments (George, R. A., et al., 2002. Protein Engineering 15(11): 871-9; Huston, J. S. et al., 1988. PNAS 85:5879-83; and Shan, D. et al., 1999. Journal of Immunology. 162(11):6589-95; the contents of each of which are herein incorporated by reference in their entirety). Furthermore, the polarity of the serine residues improves solubility and prevents aggregation problems.

[0217] In some embodiments, payload regions may encode small and unbranched serine-rich peptide linkers, such as those described by Huston et al. in U.S. Pat. No. 5,525,491, the contents of which are herein incorporated in their entirety. Polypeptides encoded by the payload region, linked by serine-rich linkers, have increased solubility.

[0218] In some embodiments, payload regions may encode artificial linkers, such as those described by Whitlow and Filpula in U.S. Pat. No. 5,856,456 and Ladner et al. in U.S. Pat. No. 4,946,778, the contents of each of which are herein incorporated by their entirety.

[0219] In some embodiments, the payload region encodes at least one G4S3 linker (“G4S3” disclosed as SEQ ID NO: 4537).

[0220] In some embodiments, the payload region encodes at least one G4S linker (“G4S” disclosed as SEQ ID NO: 4535).

[0221] In some embodiments, the payload region encodes at least one furin site.

[0222] In some embodiments, the payload region encodes at least one T2A linker.

[0223] In some embodiments, the payload region encodes at least one F2A linker.

[0224] In some embodiments, the payload region encodes at least one P2A linker.

[0225] In some embodiments, the payload region encodes at least one IRES sequence.

[0226] In some embodiments, the payload region encodes at least one G4S5 linker (“G4S5” disclosed as SEQ ID NO: 4538).

[0227] In some embodiments, the payload region encodes at least one furin and one 2A linker. As non-limiting examples, the payload region may comprise furin and T2A linkers or furin and F2A linkers.

[0228] In some embodiments, the payload region encodes at least one hinge region. As a non-limiting example, the hinge is an IgG hinge.

[0229] In some embodiments, the linker region may be 1-50, 1-100, 50-100, 50-150, 100-150, 100-200, 150-200, 150-250, 200-250, 200-300, 250-300, 250-350, 300-350, 300-400, 350-400, 350-450, 400-450, 400-500, 450-500, 450-550, 500-550, 500-600, 550-600, 550-650, or 600-650 nucleotides in length. The linker region may have a length of 1, 2, 3, 4, 5, 6, 7, 8, 9, 10, 11, 12, 13, 14, 15, 16, 17, 18, 19, 20, 21, 22, 23, 24, 25, 26, 27, 28, 29, 30, 31, 32, 33, 34, 35, 36, 37, 38, 39, 40, 41, 42, 43, 44, 45, 46, 47, 48, 49, 50, 51, 52, 53, 54, 55, 56, 57, 58, 59, 60, 61, 62, 63, 64, 65, 66, 67, 68, 69, 70, 71, 72, 73, 74, 75, 76, 77, 78, 79, 80, 81, 82, 83, 84, 85, 86, 87, 88, 89, 90, 91, 92, 93, 94, 95, 96, 97, 98, 99, 100, 101, 102, 103, 104, 105, 106, 107, 108, 109, 110, 115, 120, 125, 130, 135, 140, 145, 150, 151, 152, 153, 154, 155, 156, 157, 158, 159, 160, 165, 170, 171, 172, 173, 174, 175, 176, 177, 178, 179, 180, 185, 190, 191, 192, 193, 194, 195, 196, 197, 198, 199, 200, 210, 220, 230, 240, 250, 260, 270, 280, 290, 300, 310, 320, 330, 340, 350, 360, 370, 380, 390, 400, 410, 420, 430, 440, 450, 460, 470, 480, 490, 500, 510, 520, 530, 540, 550, 560, 570, 580, 590, 600, 601, 602, 603, 604, 605, 606, 607, 608, 609, 610, 611, 612, 613, 614, 615, 616, 617, 618, 619, 620, 621, 622, 623, 624, 625, 626, 627, 628, 629, 630, 631, 632, 633, 634, 635, 640, 650 or greater than 650. In some embodiments, the linker region may be 12 nucleotides in length. In some embodiments, the linker region may be 15 nucleotides in length, In some embodiments, the linker region may be 18 nucleotides in length. In some embodiments, the linker region may be 30 nucleotides in length. In some embodiments, the linker region may be 45 nucleotides in length. In some embodiments, the linker region may be 54 nucleotides in length. In some embodiments, the linker region may be 60 nucleotides in length. In some embodiments, the linker region may be 66 nucleotides in length. In some embodiments, the linker region may be 75 nucleotides in length. In some embodiments, the linker region may be 78 nucleotides in length. In some embodiments, the linker region may be 87 nucleotides in length. In some embodiments, the linker region may be 108 nucleotides in length. In some embodiments, the linker region may be 120 nucleotides in length. In some embodiments, the linker region may be 153 nucleotides in length. In some embodiments, the linker region may be 198 nucleotides in length. In some embodiments, the linker region may be 609 nucleotides in length. In some embodiments, the linker region may be 623 nucleotides in length.

### Viral Genome Component: Introns

[0230] In some embodiments, the payload region comprises at least one element to enhance the expression such as one or more introns or portions thereof. Non-limiting examples of introns include, MVM (67-97 bps), F.IX truncated intron 1 (300 bps), 0-globin SD/immunoglobulin heavy chain splice acceptor (250 bps), adenovirus splice donor/immunoglobin splice acceptor (500 bps). SV40 late splice donor/splice acceptor (19S/16S) (180 bps) and hybrid adenovirus splice donor/IgG splice acceptor (230 bps).

[0231] In some embodiments, the intron or intron portion may be 1-100, 100-500, 500-1000, or 1000-1500 nucleotides in length. The intron may have a length of 10, 15, 20, 30, 40, 50, 60, 70, 80, 90, 100, 110, 120, 130, 140, 150, 160, 170, 171, 172, 173, 174, 175, 176, 177, 178, 179, 180, 190, 200, 210, 220, 230, 240, 250, 260, 270, 280, 290, 300, 310, 320, 330, 340, 350, 360, 370, 380, 390, 400, 410, 420, 430, 440, 450, 460, 470, 480, 490, 500, or greater than 500. The intron may have a length between 80-100, 80-120, 80-140, 80-160, 80-180, 80-200, 80-250, 80-300, 80-350, 80-400, 80-450, 80-500, 200-300, 200-400, 200-500, 300-400, 300-500, or 400-500. In some embodiments, the intron may be 15 nucleotides in length. In some embodiments, the intron may be 32 nucleotides in length. In some embodiments, the intron may be 41 nucleotides in length. In some embodiments, the intron may be 53 nucleotides in length. In some embodiments, the intron may be 54 nucleotides in length. In some embodiments, the intron may be 59 nucleotides in length. In some embodiments, the intron may be 73 nucleotides in length. In some embodiments, the intron may be 102 nucleotides in length. In some embodiments, the intron may be 134 nucleotides in length. In some embodiments, the intron may be 168 nucleotides in length. In some embodiments, the intron may be 172 nucleotides in length. In some embodiments, the intron may be 292 nucleotides in length. In some embodiments, the intron may be 347 nucleotides in length. In some embodiments, the intron may be 387 nucleotides in length. In some embodiments, the intron may be 491 nucleotides in length. In some embodiments, the intron may be 566 nucleotides in length. In some embodiments, the intron may be 1074 nucleotides in length.

[0232] Any, or all components of a viral genome may be modified or optimized to improve expression or targeting of the payload. Such components include, but are not limited to, intron, signal peptide sequences, antibody heavy chain and/or light chain 5′ to 3′ order, antibody heavy chain and/or light chain codons, linkers, cleavage sites, polyadenylation sequences, stuffer sequences, other regulatory sequences, and/or the backbone of the ITR to ITR sequence.

### Payloads

[0233] The AAV particles of the present disclosure comprise at least one payload region. As used herein, “payload” or “payload region” refers to one or more polynucleotides or polynucleotide regions encoded by or within a viral genome or an expression product of such polynucleotide or polynucleotide region, e.g., a transgene, a polynucleotide encoding a polypeptide or multi-polypeptide or a modulatory nucleic acid or regulatory nucleic acid. Payloads of the present disclosure typically encode polypeptides (e.g., antibodies or antibody-based compositions) or fragments or variants thereof.

[0234] The payload region may be constructed in such a way as to reflect a region similar to or mirroring the natural organization of an mRNA.

[0235] The payload region may comprise a combination of coding and non-coding nucleic acid sequences.

[0236] In some embodiments, the AAV payload region may encode a coding or non-coding RNA.

[0237] In some embodiments, the AAV particle comprises a viral genome with a payload region comprising nucleic acid sequences encoding more than one polypeptide of interest (e.g., an antibody). In such an embodiment, a viral genome encoding more than one polypeptide may be replicated and packaged into a viral particle. A target cell transduced with a viral particle comprising more than one polypeptide may express each of the polypeptides in a single cell.

[0238] In some embodiments, an AAV particle comprises a viral genome with a payload region comprising a nucleic acid sequence encoding a heavy chain and a light chain of an antibody, or fragments thereof. The heavy chain and light chain are expressed and assembled to form the antibody which is secreted.

[0239] In some embodiments, the payload region may comprise at least one inverted terminal repeat (ITR), a promoter region, an intron region, and a coding region. In some embodiments, the coding region comprises a heavy chain region and/or a light chain region of an antibody, or a fragment thereof, and any two components may be separated by a linker region.

[0240] In some embodiments, the coding region may comprise a payload region with a heavy chain and light chain sequence separated by a linker and/or a cleavage site. In some embodiments, the heavy and light chain sequence is separated by an IRES sequence. In some embodiments, the heavy and light chain sequence is separated by a foot and mouth virus sequence. In some embodiments, the heavy and light chain sequence is separated by a foot and mouth virus sequence and a furin cleavage site. In some embodiments, the heavy and light chain sequence is separated by a porcine teschovirus-1 virus sequence. In some embodiments, the heavy and light chain sequence is separated by a porcine teschovirus-1 virus and a furin cleavage site. In some embodiments, the heavy and light chain sequence is separated by a 5xG4S sequence (“5xG4S” disclosed as SEQ ID NO: 4538).

[0241] Where the AAV particle payload region encodes a polypeptide, the polypeptide may be a peptide or protein. A protein encoded by the AAV particle payload region may comprise an antibody, an antibody related composition, a secreted protein, an intracellular protein, an extracellular protein, and/or a membrane protein. The encoded proteins may be structural or functional. In addition to the antibodies or antibody-based composition, proteins encoded by the payload region may include, in combination, certain mammalian proteins involved in immune system regulation. The AAV viral genomes encoding polypeptides described herein may be useful in the fields of human disease, viruses, infections, veterinary applications and a variety of in vivo and in vitro settings.

[0242] In some embodiments, the AAV particles are useful in the field of medicine for the treatment, prophylaxis, palliation, or amelioration of neurological diseases and/or disorders.

### Antibodies and Antibody-Based Compositions

[0243] Payload regions of the AAV particles may encode polypeptides that form one or more functional antibodies or antibody-based compositions. As used herein, the term “antibody” is referred to in the broadest sense and specifically covers various embodiments including, but not limited to monoclonal antibodies, polyclonal antibodies, multispecific antibodies (e.g. bispecific antibodies formed from at least two intact antibodies), and antibody fragments (e.g., diabodies) so long as they exhibit a desired biological activity (e.g., “functional”). Antibodies are primarily amino-acid based molecules but may also comprise one or more modifications (including, but not limited to the addition of sugar moieties, fluorescent moieties, chemical tags, etc.).

[0244] As used herein, “antibody-based” or “antibody-derived” compositions are monomeric or multi-meric polypeptides which comprise at least one amino-acid region derived from a known or parental antibody sequence and at least one amino acid region derived from a non-antibody sequence, e.g., mammalian protein.

[0245] Payload regions may encode polypeptides that form or function as any antibody, including antibodies that are known in the art and/or antibodies that are commercially available. The encoded antibodies may be therapeutic, diagnostic, or for research purposes. Further, polypeptides may include fragments of such antibodies or antibodies that have been developed to comprise one or more of such fragments (e.g., variable domains or complementarity determining regions (CDRs)).

[0246] In some embodiments, the viral genome of the AAV particles may comprise nucleic acids which have been engineered to enable expression of antibodies, antibody fragments, or components of any of those described in U.S. Pat. No. 7,041,807 related to YYX epitope; US20090175884, US20110305630, US20130330275 related to misfolded proteins in cancer; US20040175775 related to PrP in eye fluid; US20030114360 related to copolymers and methods of treating prion-related diseases; WO2009121176 related to insulin-induced gene peptide compositions; US20030022243, WO2003000853 related to protein aggregation assays; WO200078344 related to prion protein peptides and uses thereof. Each of these publications are incorporated by reference in their entireties.

### Antibody Generation

[0247] In some embodiments, viral genomes of the AAV particles may encode antibodies or antibody-based compositions produced using methods known in the art. Such methods may include, but are not limited to, immunization and display technologies (e.g., phage display, yeast display, and ribosomal display). Antibodies may be developed, for example, using any naturally occurring or synthetic antigen. As used herein, an “antigen” is an entity which induces or evokes an immune response in an organism. An immune response is characterized by the reaction of the cells, tissues and/or organs of an organism to the presence of a foreign entity. Such an immune response typically leads to the production by the organism of one or more antibodies against the foreign entity, e.g., antigen or a portion of the antigen. As used herein, “antigens” also refer to binding partners for specific antibodies or binding agents in a display library.

[0248] In some embodiments, the sequences of the polypeptides to be encoded in the viral genomes may be derived from antibodies produced using hybridoma technology. Host animals (e.g. mice, rabbits, goats, and llamas) may be immunized by an injection with an antigenic protein to elicit lymphocytes that specifically bind to the antigen. Lymphocytes may be collected and fused with immortalized cell lines to generate hybridomas which can be cultured in a suitable culture medium to promote growth. The antibodies produced by the cultured hybridomas may be subjected to analysis to determine binding specificity of the antibodies for the target antigen. Once antibodies with desirable characteristics are identified, corresponding hybridomas may be subcloned through limiting dilution procedures and grown by standard methods. The antibodies produced by these cells may be isolated and purified using standard immunoglobulin purification procedures.

[0249] In some embodiments, the sequences of the polypeptides to be encoded in the viral genomes may be produced using heavy and light chain variable region cDNA sequences selected from hybridomas or from other sources. Sequences encoding antibody variable domains expressed by hybridomas may be determined by extracting RNA molecules from antibody-producing hybridoma cells and producing cDNA by reverse transcriptase polymerase chain reaction (PCR). PCR may be used to amplify cDNA using primers specific for heavy and light chain sequences. PCR products may then be subcloned into plasmids for sequence analysis. Antibodies may be produced by insertion of resulting variable domain sequences into expression vectors.

[0250] In some embodiments, the sequences of the polypeptides to be encoded in the viral genomes may be generated using display technologies. Display technologies used to generate polypeptides may include any of the display techniques (e.g. display library screening techniques) disclosed in International Patent Application No. WO2014074532, the contents of which are herein incorporated by reference in their entirety. In some embodiments, synthetic antibodies may be designed, selected, or optimized by screening target antigens using display technologies (e.g. phage display technologies). Phage display libraries may comprise millions to billions of phage particles, each expressing unique antibody fragments on their viral coats. Such libraries may provide richly diverse resources that may be used to select potentially hundreds of antibody fragments with diverse levels of affinity for one or more antigens of interest (McCafferty, et al., 1990. Nature. 348:552-4; Edwards, B. M. et al., 2003. JMB. 334: 103-18; Schofield, D. et al., 2007. Genome Biol. 8, R254 and Pershad, K. et al., 2010. Protein Engineering Design and Selection. 23:279-88; the contents of each of which are herein incorporated by reference in their entirety). Often, the antibody fragments present in such libraries comprise scFv antibody fragments, comprising a fusion protein of V_{H} and V_{L} antibody domains joined by a flexible linker. In some cases, scFvs may contain the same sequence with the exception of unique sequences encoding variable loops of the CDRs. In some cases, scFvs are expressed as fusion proteins, linked to viral coat proteins (e.g. the N-terminus of the viral pIII coat protein). V_{L} chains may be expressed separately for assembly with V_{H} chains in the periplasm prior to complex incorporation into viral coats. Precipitated library members may be sequenced from the bound phage to obtain cDNA encoding desired scFvs. Antibody variable domains or CDRs from such sequences may be directly incorporated into antibody sequences for recombinant antibody production or mutated and utilized for further optimization through in vitro affinity maturation.

[0251] In some embodiments, the sequences of the polypeptides to be encoded in the viral genomes may be produced using yeast surface display technology, wherein antibody variable domain sequences may be expressed on the cell surface of Saccharomyces cerevisiae. Recombinant antibodies may be developed by displaying the antibody fragment of interest as a fusion to e.g. Aga2p protein on the surface of the yeast, where the protein interacts with proteins and small molecules in a solution, scFvs with affinity toward desired receptors may be isolated from the yeast surface using magnetic separation and flow cytometry. Several cycles of yeast surface display and isolation may be done to attain scFvs with desired properties through directed evolution.

[0252] In some embodiments, the sequence of the polypeptides to be encoded in the viral genomes (e.g., antibodies) may be designed by VERSITOPE™ Antibody Generation and other methods used by BIOATLA® and described in United States Patent Publication No. US20130281303, the contents of which are herein incorporated by reference in their entirety. In brief, recombinant monoclonal antibodies are derived from B-cells of a host immuno-challenged with one or more target antigens. These methods of antibody generation do not rely on immortalized cell lines, such as hybridoma, thereby avoiding some of the associated challenges i.e., genetic instability and low production capacity, producing high affinity and high diversity recombinant monoclonal antibodies. In some embodiments, the method is a natural diversity approach. In another embodiment, the method is a high diversity approach.

[0253] In some embodiments, the sequences of the polypeptides to be encoded in the viral genomes may be generated using the BIOATLA® natural diversity approach. In the natural diversity approach of generating recombinant monoclonal antibodies described in United States Patent Publication No. US20130281303, the original pairings of variable heavy (V_{H}) and variable light (V_{L}) domains are retained from the host, yielding recombinant monoclonal antibodies that are naturally paired. These may be advantageous due to a higher likelihood of functionality as compared to non-natural pairings of V_{H} and V_{L}. To produce the recombinant monoclonal antibodies, first a non-human host (i.e., rabbit, mouse, hamster, guinea pig, camel or goat) is immuno-challenged with an antigen of interest. In some embodiments, the host may be a previously challenged human patient. In other embodiments, the host may not have been immuno-challenged. B-cells are harvested from the host and screened by fluorescence activated cell sorting (FACS), or other method, to create a library of B-cells enriched in B-cells capable of binding the target antigen. The cDNA obtained from the mRNA of a single B-cell is then amplified to generate an immunoglobulin library of V_{H} and V_{L} domains. This library of immunoglobulins is then cloned into expression vectors capable of expressing the V_{H} and V_{L} domains, wherein the V_{H} and V_{L} domains remain naturally paired. The library of expression vectors is then used in an expression system to express the V_{H} and V_{L} domains in order to create an antibody library. Screening of the antibody library yields antibodies able to bind the target antigen, and these antibodies can be further characterized. Characterization may include one or more of the following: isoelectric point, thermal stability, sedimentation rate, folding rate, neutralization or antigen activity, antagonist or agonistic activity, expression level, specific and non-specific binding, inhibition of enzymatic activity, rigidity/flexibility, shape, charge, stability across pH, in solvents, under UV radiation, in mechanical stress conditions, or in sonic conditions, half-life, and glycosylation.

[0254] In some embodiments, the sequences of the polypeptides to be encoded in the viral genomes may be generated using the BIOATLA® high diversity approach. In the high diversity approach of generating recombinant monoclonal antibodies described in United States Patent Publication No. US20130281303, additional pairings of variable heavy (V_{H}) and variable light (V_{L}) domains are attained. To produce the recombinant monoclonal antibodies, B-cells harvested from the host are screened by fluorescence activated cell sorting (FACS), panning, or other method, to create a library of B-cells enriched in B-cells capable of binding the target antigen. The cDNA obtained from the mRNA of the pooled B-cells is then amplified to generate an immunoglobulin library of V_{H} and V_{L} domains. This library of immunoglobulins is then used in a biological display system (mammalian, yeast or bacterial cell surface display systems) to generate a population of cells displaying antibodies, fragments or derivatives comprising the V_{H} and V_{L} domains wherein, the antibodies, fragments or derivatives comprise V_{H} and V_{L} domain combinations that were not present in the B-cells in vivo. Screening of the cell population by FACS, with the target antigen, yields a subset of cells capable of binding the target antigen and the antibodies displayed on these cells can be further characterized. In an alternate embodiment of the high diversity approach, the immunoglobulin library comprises only V_{H} domains obtained from the B-cells of the immuno-challenged host, while the V_{L} domain(s) are obtained from another source.

[0255] In some embodiments, the sequences of the polypeptides to be encoded in the viral genomes may be evolved using BIOATLA® comprehensive approaches. The methods of generating recombinant monoclonal antibodies as described in United States Patent Publication No. US20130281303, further comprises evolving the recombinant antibody by comprehensive positional evolution (CPE™), CPE™ followed by comprehensive protein synthesis (CPS™), PCR shuffling, or other method.

[0256] In some embodiments, the sequence of the polypeptides to be encoded in the viral genomes (e.g., antibodies) may be derived from any of the BIOATLA® protein evolution methods described in International Publication WO2012009026, the contents of which are herein incorporated by reference in their entirety. In this method, mutations are systematically performed throughout the polypeptide or molecule of interest, a map is created providing useful informatics to guide the subsequent evolutionary steps. Not wishing to be bound by theory, these evolutionary methods typically start with a template polypeptide and a mutant is derived therefrom, which has desirable properties or characteristics. Non-limiting examples of evolutionary techniques include polymerase chain reaction (PCR), error prone PCR, oligonucleotide-directed mutagenesis, cassette mutagenesis, shuffling, assembly PCR, sexual PCR mutagenesis, in vivo mutagenesis, site-specific mutagenesis, gene reassembly, gene site saturated mutagenesis, in vitro mutagenesis, ligase chain reaction, oligonucleotide synthesis or any combination thereof.

[0257] In some embodiments, the BIOATLA® evolution method is Comprehensive Positional Evolution (CPE™). In CPE, naturally occurring amino acid variants are generated for each of the codons of the template polypeptide, wherein 63 different codon options exist for each amino acid variant. A set of polypeptides with single amino acid mutations are generated and the mutations are then confirmed by sequencing or other method known in the art and each amino acid change screened for improved function, neutral mutations, inhibitory mutations, expression, and compatibility with the host system. An EvoMap™ is created that describes in detail the effects of each amino acid mutation on the properties and characteristics of that polypeptide. The data from the EvoMap™ may be utilized to produce polypeptides with more than one amino acid mutation, wherein the resultant multi-site mutant polypeptides can be screened for desirable characteristics.

[0258] In some embodiments, the BIOATLA® evolution method is Synergy Evolution, wherein an EvoMap™ is used to identify amino acid positions to introduce 2-20 mutations simultaneously to produce a combinatorial effect. The resulting multi-site mutant polypeptides may be screened on one or more pre-determined characteristics to identify “upmutants” wherein the function of the mutant is improved as compared to the parent polypeptide. In some embodiments, Synergy Evolution is used to enhance binding affinity of an antibody.

[0259] In some embodiments, the BIOATLA® evolution method is Flex Evolution, wherein an EvoMap™ is used to identify fully mutable sites within a polypeptide that may then be targeted for alteration, such as introduction of glycosylation sites or chemical conjugation.

[0260] In some embodiments, the BIOATLA® evolution method is Comprehensive Positional Insertion Evolution (CPI™), wherein an amino acid is inserted after each amino acid of a template polypeptide to generate a set of lengthened polypeptides. CPI may be used to insert 1, 2, 3, 4, or 5 amino acids at each new position. The resultant lengthened polypeptides are sequenced and assayed for one or more pre-determined properties and evaluated in comparison to its template or parent molecule. In some embodiments, the binding affinity and immunogenicity of the resultant polypeptides are assayed. In some embodiments, the lengthened polypeptides are further mutated and mapped to identify polypeptides with desirable characteristics.

[0261] In some embodiments, the BIOATLA® evolution approach is Comprehensive Positional Deletion Evolution (CPD™), wherein each amino acid of the template polypeptide is individually and systematically deleted one at a time. The resultant shortened polypeptides are then sequenced and evaluated by assay for at least one pre-determined feature. In some embodiments, the shortened polypeptides are further mutated and mapped to identify polypeptides with desirable characteristics.

[0262] In some embodiments, the BIOATLA® evolution approach is Combinatorial Protein Synthesis (CPS™), wherein mutants identified in CPE, CPI, CPD, or other evolutionary techniques are combined for polypeptide synthesis. These combined mutant polypeptides are then screened for enhanced properties and characteristics. In some embodiments CPS is combined with any of the aforementioned evolutionary or polypeptide synthesis methods.

[0263] In some embodiments, the sequence of the polypeptides to be encoded in the viral genomes (e.g., antibodies) may be derived from the BIOATLA®, Comprehensive Integrated Antibody Optimization (CIAO!™) described in U.S. Pat. No. 8,859,467, the contents of which are herein incorporated by reference in their entirety. The CIAO!™ method allows for simultaneous evolution of polypeptide performance and expression optimization, within a eukaryotic cell host (i.e., mammalian or yeast cell host). First, an antibody library is generated in a mammalian cell production host by antibody cell surface display, wherein the generated antibody library targets a particular antigen of interest. The antibody library is then screened by any method known in the art, for one or more properties or characteristics. One or more antibodies of the library, with desirable properties or characteristics are chosen for further polypeptide evolution by any of the methods known in the art, to produce a library of mutant antibodies by antibody cell surface display in a mammalian cell production host. The generated mutant antibodies are screened for one or more predetermined properties or characteristics, whereby an upmutant is selected, wherein the upmutant has enhanced or improved characteristics as compared to the parent template polypeptide.

[0264] In some embodiments, the sequences of the polypeptides to be encoded in the viral genomes may be humanized by the methods of BIOATLA® as described in United States Patent Publication US20130303399, the contents of which are herein incorporated by reference in their entirety. In this method, for generating enhanced full-length humanized antibodies in mammalian cells, no back-mutations are required to retain affinity to the antigen and no CDR grafting or phage-display is necessary. The generated humanized antibody has reduced immunogenicity and equal or greater affinity for the target antigen as compared to the parent antibody. The variable regions or CDRs of the generated humanized antibody are derived from the parent or template, whereas the framework and constant regions are derived from one or more human antibodies. To start, the parent, or template antibody is selected, cloned and each CDR sequence identified and synthesized into a CDR fragment library. Double stranded DNA fragment libraries for V_{H} and V_{L} are synthesized from the CDR fragment encoding libraries, wherein at least one CDR fragment library is derived from the template antibody and framework (FW) fragment encoding libraries, wherein the FW fragment library is derived from a pool of human frameworks obtained from natively expressed and functional human antibodies. Stepwise liquid phase ligation of FW and CDR encoding fragments is then used to generate both V_{H} and V_{L} fragment libraries. The V_{H} and V_{L} fragment libraries are then cloned into expression vectors to create a humanization library, which is further transfected into cells for expression of full length humanized antibodies and used to create a humanized antibody library. The humanized antibody library is then screened to determine expression level of the humanized antibodies, affinity or binding ability for the antigen, and additional improved or enhanced characteristics, as compared to the template or parent antibody. Non-limiting examples of characteristics that may be screened include equilibrium dissociation constant (K_{D}), stability, melting temperature (Tₘ), pI, solubility, expression level, reduced immunogenicity, and improved effector function.

[0265] In some embodiments, the sequences of the polypeptides to be encoded in the viral genomes may be generated by the BIOATLA® method for preparing conditionally active antibodies as described in International Publications WO2016033331 and WO2016036916, the contents of which are herein incorporated by reference in their entirety. As used herein, the term “conditionally active” refers to a molecule that is active at an aberrant condition. Further, the conditionally active molecule may be virtually inactive at normal physiological conditions. Aberrant conditions may result from changes in pH, temperature, osmotic pressure, osmolality, oxidative stress, electrolyte concentration, and/or chemical or proteolytic resistance, as non-limiting examples.

[0266] The method of preparing a conditionally active antibody is described in International Publications WO2016033331 and WO2016036916 and summarized herein. Briefly, a wild-type polypeptide is selected and the DNA is evolved to create mutant DNAs. Non-limiting examples of evolutionary techniques that may be used to evolve the DNA include polymerase chain reaction (PCR), error prone PCR, shuffling, oligonucleotide-directed mutagenesis, assembly PCR, sexual PCR mutagenesis, in vivo mutagenesis, site-specific mutagenesis, gene reassembly, gene site saturated mutagenesis, in vitro mutagenesis, ligase chain reaction, oligonucleotide synthesis or any combination thereof. Once mutant DNAs are created, they are expressed in a eukaryotic cell production host (i.e., fungal, insect, mammalian, adenoviral, plant), wherein a mutant polypeptide is produced. The mutant polypeptide and the corresponding wild-type polypeptide are then subjected to assays under both normal physiological conditions and aberrant conditions in order to identify mutants that exhibit a decrease in activity in the assay at normal physiological conditions as compared to the wild-type polypeptide and/or an increase in activity in the assay under aberrant conditions, as compared to the corresponding wild-type polypeptide. The desired conditionally active mutant may then be produced in the aforementioned eukaryotic cell production host.

[0267] In some embodiments, the conditionally active antibody is a “mirac protein” as described by BIOATLA® in U.S. Pat. No. 8,709,755, the contents of which are herein incorporated by reference in their entirety. As used herein “mirac protein” refers to a conditionally active antibody that is virtually inactive at body temperature but active at lower temperatures.

[0268] In some embodiments, the sequence of the polypeptides to be encoded in the viral genomes (e.g., antibodies) may be derived based on any of the BIOATLA® methods including, but not limited to, VERSITOPE™ Antibody Generation, natural diversity approaches, and high diversity approaches for generating monoclonal antibodies, methods for generation of conditionally active polypeptides, humanized antibodies, mirac proteins, multi-specific antibodies or cross-species active mutant polypeptides, Comprehensive Integrated Antibody Optimization (CIAO!™), Comprehensive Positional Evolution (CPE™), Synergy Evolution, Flex Evolution, Comprehensive Positional Insertion Evolution (CPI™), Comprehensive Positional Deletion Evolution (CPD™), Combinatorial Protein Synthesis (CPS™), or any combination thereof. These methods are described in U.S. Pat. Nos. 8,859,467 and 8,709,755 and United States Publication Nos. US20130281303, US20130303399, US20150065690, US20150252119, US20150086562 and US20100138945, and International Publication Nos. WO2015105888, WO2012009026, WO2011109726, WO2016036916, and WO2016033331, the contents of each of which are herein incorporated by reference in their entirety.

[0269] In some embodiments, antibodies of the present disclosure are generated by any of the aforementioned means to target one or more of the following epitopes of the tau protein; phosphorylated tau peptides, pS396, pS396-pS404, pS404, pS396-pS404-pS422, pS422, pS199, pS199-pS202, pS202, pT181, pT231, cis-pT231, any of the following acetylated sites acK174, acK274, acK280, acK281 and/or any combination thereof

### Antibody Fragments and Variants

[0270] In some embodiments, antibody fragments encoded by payloads comprise antigen binding regions from intact antibodies. Examples of antibody fragments may include, but are not limited to Fab, Fab′, F(ab′)₂, and Fv fragments; diabodies; linear antibodies; single-chain antibody molecules; and multispecific antibodies formed from antibody fragments. Papain digestion of antibodies produces two identical antigen-binding fragments, called “Fab” fragments, each with a single antigen-binding site. Also produced is a residual “Fc” fragment, whose name reflects its ability to crystallize readily. Pepsin treatment yields an F(ab)₂ fragment that has two antigen-binding sites and is still capable of cross-linking antigen. Compounds and/or compositions of the present disclosure may comprise one or more of these fragments. For the purposes herein, an “antibody” may comprise a heavy and light variable domain as well as an Fe region.

[0271] In some embodiments, the Fc region may be a modified Fc region, as described in US Patent Publication US20150065690, wherein the Fc region may have a single amino acid substitution as compared to the corresponding sequence for the wild-type Fc region, wherein the single amino acid substitution yields an Fc region with preferred properties to those of the wild-type Fc region. Non-limiting examples of Fc properties that may be altered by the single amino acid substitution include bind properties or response to pH conditions

[0272] As used herein, the term “native antibody” refers to a usually heterotetrameric glycoprotein of about 150,000 Daltons, composed of two identical light (L) chains and two identical heavy (H) chains. Genes encoding antibody heavy and light chains are known and segments making up each have been well characterized and described (Matsuda, F. et al., 1998. The Journal of Experimental Medicine. 188(11): 2151-62 and Li, A. et al., 2004. Blood. 103 (12: 4602-9, the content of each of which are herein incorporated by reference in their entirety). Each light chain is linked to a heavy chain by one covalent disulfide bond, while the number of disulfide linkages varies among the heavy chains of different immunoglobulin isotypes. Each heavy and light chain also has regularly spaced intrachain disulfide bridges. Each heavy chain has at one end a variable domain (V_{H}) followed by a number of constant domains. Each light chain has a variable domain at one end (V_{L}) and a constant domain at its other end; the constant domain of the light chain is aligned with the first constant domain of the heavy chain, and the light chain variable domain is aligned with the variable domain of the heavy chain.

[0273] As used herein, the term “variable domain” refers to specific antibody domains found on both the antibody heavy and light chains that differ extensively in sequence among antibodies and are used in the binding and specificity of each particular antibody for its particular antigen. Variable domains comprise hypervariable regions. As used herein, the term “hypervariable region” refers to a region within a variable domain comprising amino acid residues responsible for antigen binding. The amino acids present within the hypervariable regions determine the structure of the complementarity determining regions (CDRs) that become part of the antigen-binding site of the antibody. As used herein, the term “CDR” refers to a region of an antibody comprising a structure that is complimentary to its target antigen or epitope. Other portions of the variable domain, not interacting with the antigen, are referred to as framework (FW) regions. The antigen-binding site (also known as the antigen combining site or paratope) comprises the amino acid residues necessary to interact with a particular antigen. The exact residues making up the antigen-binding site are typically elucidated by co-crystallography with bound antigen, however computational assessments can also be used based on comparisons with other antibodies (Strohl, W. R. Therapeutic Antibody Engineering. Woodhead Publishing, Philadelphia Pa. 2012. Ch. 3, p 47-54, the contents of which are herein incorporated by reference in their entirety). Determining residues making up CDRs may include the use of numbering schemes including, but not limited to, those taught by Kabat [Wu, T. T. et al., 1970, JEM, 132(2):211-50 and Johnson, G. et al., 2000, Nucleic Acids Res. 28(1): 214-8, the contents of each of which are herein incorporated by reference in their entirety], Chothia [Chothia and Lesk, J. Mol. Biol. 196, 901 (1987), Chothia et al., Nature 342, 877 (1989) and Al-Lazikani, B. et al., 1997, J. Mol. Biol. 273(4):927-48, the contents of each of which are herein incorporated by reference in their entirety], Lefranc (Lefranc, M. P. et al., 2005, Immunome Res. 1:3) and Honegger (Honegger, A. and Pluckthun, A. 2001. J. Mol. Biol. 309(3):657-70, the contents of which are herein incorporated by reference in their entirety).

[0274] V_{H} and V_{L} domains have three CDRs each. VL CDRs are referred to herein as CDR-L1, CDR-L2 and CDR-L3, in order of occurrence when moving from N- to C-terminus along the variable domain polypeptide. VH CDRs are referred to herein as CDR-H1, CDR-H2, and CDR-H3, in order of occurrence when moving from N- to C-terminus along the variable domain polypeptide. Each of CDRs have favored canonical structures with the exception of the CDR-H3, which comprises amino acid sequences that may be highly variable in sequence and length between antibodies resulting in a variety of three-dimensional structures in antigen-binding domains (Nikoloudis, D. et al., 2014. Peer J. 2:e456; the contents of which are herein incorporated by reference in their entirety). In some cases. CDR-H3s may be analyzed among a panel of related antibodies to assess antibody diversity. Various methods of determining CDR sequences are known in the art and may be applied to known antibody sequences (Strohl, W. R. Therapeutic Antibody Engineering. Woodhead Publishing, Philadelphia Pa. 2012. Ch. 3, p 47-54, the contents of which are herein incorporated by reference in their entirety).

[0275] As used herein, the term “Fv” refers to an antibody fragment comprising the minimum fragment on an antibody needed to form a complete antigen-binding site. These regions consist of a dimer of one heavy chain and one light chain variable domain in tight, non-covalent association. Fv fragments can be generated by proteolytic cleavage but are largely unstable. Recombinant methods are known in the art for generating stable Fv fragments, typically through insertion of a flexible linker between the light chain variable domain and the heavy chain variable domain [to form a single chain Fv (scFv)] or through the introduction of a disulfide bridge between heavy and light chain variable domains (Strohl, W. R. Therapeutic Antibody Engineering. Woodhead Publishing, Philadelphia Pa. 2012. Ch. 3, p 46-47, the contents of which are herein incorporated by reference in their entirety).

[0276] As used herein, the term “light chain” refers to a component of an antibody from any vertebrate species assigned to one of two clearly distinct types, called kappa and lambda based on amino acid sequences of constant domains. Depending on the amino acid sequence of the constant domain of their heavy chains, antibodies can be assigned to different classes. There are five major classes of intact antibodies: IgA, IgD, IgE, IgG, and IgM, and several of these may be further divided into subclasses (isotypes), e.g., IgG1, IgG2, IgG3, IgG4, IgA, and IgA2.

[0277] As used herein, the term “single chain Fv” or “scFv” refers to a fusion protein of V_{H} and V_{L} antibody domains, wherein these domains are linked together into a single polypeptide chain by a flexible peptide linker. In some embodiments, the Fv polypeptide linker enables the scFv to form the desired structure for antigen binding. In some embodiments, scFvs are utilized in conjunction with phage display, yeast display or other display methods where they may be expressed in association with a surface member (e.g. phage coat protein) and used in the identification of high affinity peptides for a given antigen.

[0278] As used herein, the term “bispecific antibody” refers to an antibody capable of binding two different antigens. Such antibodies typically comprise regions from at least two different antibodies. Bispecific antibodies may include any of those described in Riethmuller, G. 2012. Cancer Immunity. 12:12-18, Marvin, J. S. et al., 2005. Acta Pharmacologica Sinica. 26(6):649-58 and Schaefer, W. et al., 2011. PNAS. 108(27):11187-92, the contents of each of which are herein incorporated by reference in their entirety.

[0279] As used herein, the term “diabody” refers to a small antibody fragment with two antigen-binding sites. Diabodies comprise a heavy chain variable domain V_{H} connected to a light chain variable domain V_{L} in the same polypeptide chain. By using a linker that is too short to allow pairing between the two domains on the same chain, the domains are forced to pair with the complementary domains of another chain and create two antigen-binding sites. Diabodies are described more fully in, for example, EP 404097; WO 9311161; and Hollinger et al. (Hollinger, P. et al., “Diabodies”: Small bivalent and bispecific antibody fragments. PNAS. 1993. 90:6444-8) the contents of each of which are incorporated herein by reference in their entirety.

[0280] The term “intrabody” refers to a form of antibody that is not secreted from a cell in which it is produced, but instead targets one or more intracellular proteins. Intrabodies may be used to affect a multitude of cellular processes including, but not limited to intracellular trafficking, transcription, translation, metabolic processes, proliferative signaling, and cell division. In some embodiments, methods of the present disclosure may include intrabody-based therapies. In some such embodiments, variable domain sequences and/or CDR sequences disclosed herein may be incorporated into one or more constructs for intrabody-based therapy.

[0281] As used herein, the term “monoclonal antibody” refers to an antibody obtained from a population of substantially homogeneous cells (or clones), i.e., the individual antibodies comprising the population are identical and/or bind the same epitope, except for possible variants that may arise during production of the monoclonal antibodies, such variants generally being present in minor amounts. In contrast to polyclonal antibody preparations that typically include different antibodies directed against different determinants (epitopes), each monoclonal antibody is directed against a single determinant on the antigen

[0282] The modifier “monoclonal” indicates the character of the antibody as being obtained from a substantially homogeneous population of antibodies and is not to be construed as requiring production of the antibody by any particular method. The monoclonal antibodies herein include “chimeric” antibodies (immunoglobulins) in which a portion of the heavy and/or light chain is identical with or homologous to corresponding sequences in antibodies derived from a particular species or belonging to a particular antibody class or subclass, while the remainder of the chain(s) is identical with or homologous to corresponding sequences in antibodies derived from another species or belonging to another antibody class or subclass, as well as fragments of such antibodies.

[0283] As used herein, the term “humanized antibody” refers to a chimeric antibody comprising a minimal portion from one or more non-human (e.g., murine) antibody source(s) with the remainder derived from one or more human immunoglobulin sources. For the most part, humanized antibodies are human immunoglobulins (recipient antibody) in which residues from the hypervariable region from an antibody of the recipient are replaced by residues from the hypervariable region from an antibody of a non-human species (donor antibody) such as mouse, rat, rabbit or nonhuman primate having the desired specificity, affinity, and/or capacity.

[0284] In some embodiments, viral genomes of the present disclosure may encode antibody mimetics. As used herein, the term “antibody mimetic” refers to any molecule which mimics the function or effect of an antibody and which binds specifically and with high affinity to their molecular targets. In some embodiments, antibody mimetics may be monobodies, designed to incorporate the fibronectin type III domain (Fn3) as a protein scaffold (U.S. Pat. Nos. 6,673,901; 6,348,584). In some embodiments, antibody mimetics may be those known in the art including, but are not limited to affibody molecules, affilins, affitins, anticalins, avimers, Centyrins, DARPINS™, fynomers, Kunitz domains, and domain peptides. In other embodiments, antibody mimetics may include one or more non-peptide regions.

[0285] As used herein, the term “antibody variant” refers to a modified antibody (in relation to a native or starting antibody) or a biomolecule resembling a native or starting antibody in structure and/or function (e.g., an antibody mimetic). Antibody variants may be altered in their amino acid sequence, composition, or structure as compared to a native antibody. Antibody variants may include, but are not limited to, antibodies with altered isotypes (e.g., IgA, IgD, IgE, IgG1, IgG2, IgG3, IgG4, or IgM), humanized variants, optimized variants, multispecific antibody variants (e.g., bispecific variants), and antibody fragments.

[0286] The preparation of antibodies, whether monoclonal or polyclonal, is known in the art. Techniques for the production of antibodies are well known in the art and described, e.g. in Harlow and Lane “Antibodies, A Laboratory Manual”, Cold Spring Harbor Laboratory Press, 1988; Harlow and Lane “Using Antibodies: A Laboratory Manual” Cold Spring Harbor Laboratory Press, 1999 and “Therapeutic Antibody Engineering: Current and Future Advances Driving the Strongest Growth Area in the Pharmaceutical Industry” Woodhead Publishing, 2012.

### Multispecific Antibodies

[0287] In some embodiments, payloads may encode antibodies that bind more than one epitope. As used herein, the terms “multibody” or “multispecific antibody” refer to an antibody wherein two or more variable regions bind to different epitopes. The epitopes may be on the same or different targets. In certain embodiments, a multi-specific antibody is a “bispecific antibody,” which recognizes two different epitopes on the same or different antigens.

[0288] In some embodiments, multi-specific antibodies may be prepared by the methods used by BIOATLA® and described in International Patent publication WO201109726, the contents of which are herein incorporated by reference in their entirety. First a library of homologous, naturally occurring antibodies is generated by any method known in the art (i.e., mammalian cell surface display), then screened by FACSAria or another screening method, for multi-specific antibodies that specifically bind to two or more target antigens. In some embodiments, the identified multi-specific antibodies are further evolved by any method known in the art, to produce a set of modified multi-specific antibodies. These modified multi-specific antibodies are screened for binding to the target antigens. In some embodiments, the multi-specific antibody may be further optimized by screening the evolved modified multi-specific antibodies for optimized or desired characteristics.

[0289] In some embodiments, multi-specific antibodies may be prepared by the methods used by BIOATLA® and described in Unites States Publication No. US20150252119, the contents of which are herein incorporated by reference in their entirety. In one approach, the variable domains of two parent antibodies, wherein the parent antibodies are monoclonal antibodies are evolved using any method known in the art in a manner that allows a single light chain to functionally complement heavy chains of two different parent antibodies. Another approach requires evolving the heavy chain of a single parent antibody to recognize a second target antigen. A third approach involves evolving the light chain of a parent antibody so as to recognize a second target antigen. Methods for polypeptide evolution are described in International Publication WO2012009026, the contents of which are herein incorporated by reference in their entirety, and include as non-limiting examples, Comprehensive Positional Evolution (CPE), Combinatorial Protein Synthesis (CPS), Comprehensive Positional Insertion (CPI), Comprehensive Positional Deletion (CPD), or any combination thereof. The Fc region of the multi-specific antibodies described in United States Publication No. US20150252119 may be created using a knob-in-hole approach, or any other method that allows the Fc domain to form heterodimers. The resultant multi-specific antibodies may be further evolved for improved characteristics or properties such as binding affinity for the target antigen.

### Bispecific Antibodies

[0290] In some embodiments, payloads may encode bispecific antibodies. Bispecific antibodies are capable of binding two different antigens. Such antibodies typically comprise antigen-binding regions from at least two different antibodies. For example, a bispecific monoclonal antibody (BsMAb, BsAb) is an artificial protein composed of fragments of two different monoclonal antibodies, thus allowing the BsAb to bind to two different types of antigen.

[0291] In some cases, payloads encode bispecific antibodies comprising antigen-binding regions from two different anti-tau antibodies. For example, such bispecific antibodies may comprise binding regions from two different antibodies selected from Table 3.

[0292] Bispecific antibody frameworks may include any of those described in Riethmuller, G., 2012. Cancer Immunity. 12:12-18; Marvin, J. S. et al., 2005. Acta Pharmacologica Sinica. 26(6):649-58; and Schaefer, W. et al., 2011. PNAS. 108(27):11187-92, the contents of each of which are herein incorporated by reference in their entirety.

[0293] New generations of BsMAb, called “trifunctional bispecific” antibodies, have been developed. These consist of two heavy and two light chains, one each from two different antibodies, where the two Fab regions (the arms) are directed against two antigens, and the Fc region (the foot) comprises the two heavy chains and forms the third binding site.

[0294] Of the two paratopes that form the tops of the variable domains of a bispecific antibody, one can be directed against a target antigen and the other against a T-lymphocyte antigen like CD3. In the case of trifunctional antibodies, the Fc region may additionally bind to a cell that expresses Fe receptors, like a macrophage, a natural killer (NK) cell or a dendritic cell. In sum, the targeted cell is connected to one or two cells of the immune system, which subsequently destroy it.

[0295] Other types of bispecific antibodies have been designed to overcome certain problems, such as short half-life, immunogenicity and side-effects caused by cytokine liberation. They include chemically linked Fabs, consisting only of the Fab regions, and various types of bivalent and trivalent single-chain variable fragments (scFvs), fusion proteins mimicking the variable domains of two antibodies. The furthest developed of these newer formats are the bi-specific T-cell engagers (BiTEs) and mAb2's, antibodies engineered to contain an Fcab antigen-binding fragment instead of the Fc constant region.

[0296] Using molecular genetics, two scFvs can be engineered in tandem into a single polypeptide, separated by a linker domain, called a “tandem scFv” (tascFv). TascFvs have been found to be poorly soluble and require refolding when produced in bacteria, or they may be manufactured in mammalian cell culture systems, which avoids refolding requirements but may result in poor yields. Construction of a tascFv with genes for two different scFvs yields a “bispecific single-chain variable fragments” (bis-scFvs). Only two tascFvs have been developed clinically by commercial firms; both are bispecific agents in active early phase development by Micromet for oncologic indications and are described as “Bispecific T-cell Engagers (BiTE).” Blinatumomab is an anti-CD19/anti-CD3 bispecific tascFv that potentiates T-cell responses to B-cell non-Hodgkin lymphoma in Phase 2. MT110 is an anti-EP-CAM/anti-CD3 bispecific tascFv that potentiates T-cell responses to solid tumors in Phase 1. Bispecific, tetravalent “TandAbs” are also being researched by Affimed (Nelson, A. L., MAbs. 2010. January-February; 2(1):77-83).

[0297] In some embodiments, payloads may encode antibodies comprising a single antigen-binding domain. These molecules are extremely small, with molecular weights approximately one-tenth of those observed for full-sized mAbs. Further antibodies may include “nanobodies” derived from the antigen-binding variable heavy chain regions (V_{HH}s) of heavy chain antibodies found in camels and llamas, which lack light chains (Nelson, A. L., MAbs. 2010. January-February; 2(1):77-83).

[0298] Disclosed and claimed in PCT Publication WO2014144573 to Memorial Sloan-Kettering Cancer Center are multimerization technologies for making dimeric multispecific binding agents (e.g., fusion proteins comprising antibody components) with improved properties over multispecific binding agents without the capability of dimerization.

[0299] In some cases, payloads may encode tetravalent bispecific antibodies (TetBiAbs as disclosed and claimed in PCT Publication WO2014144357). TetBiAbs feature a second pair of Fab fragments with a second antigen specificity attached to the C-terminus of an antibody, thus providing a molecule that is bivalent for each of the two antigen specificities. The tetravalent antibody is produced by genetic engineering methods, by linking an antibody heavy chain covalently to a Fab light chain, which associates with its cognate, co-expressed Fab heavy chain.

[0300] In some aspects, payloads may encode biosynthetic antibodies as described in U.S. Pat. No. 5,091,513, the contents of which are herein incorporated by reference in their entirety. Such antibody may include one or more sequences of amino acids constituting a region which behaves as a biosynthetic antibody binding site (BABS). The sites comprise 1) non-covalently associated or disulfide bonded synthetic V_{H} and V_{L} dimers, 2) V_{H}-V_{L} or V_{L}-V_{H} single chains wherein the V_{H} and V_{L} are attached by a polypeptide linker, or 3) individuals V_{H} or V_{L} domains. The binding domains comprise linked CDR and FR regions, which may be derived from separate immunoglobulins. The biosynthetic antibodies may also include other polypeptide sequences which function, e.g., as an enzyme, toxin, binding site, or site of attachment to an immobilization media or radioactive atom. Methods are disclosed for producing the biosynthetic antibodies, for designing BABS having any specificity that can be elicited by in vivo generation of antibody, and for producing analogs thereof.

[0301] In some embodiments, payloads may encode antibodies with antibody acceptor frameworks taught in U.S. Pat. No. 8,399,625. Such antibody acceptor frameworks may be particularly well suited accepting CDRs from an antibody of interest. In some cases, CDRs from anti-tau antibodies known in the art or developed according to the methods presented herein may be used.

### Miniaturized Antibody

[0302] In some embodiments, the antibody encoded by the payloads may be a “miniaturized” antibody. Among the best examples of mAb miniaturization are the small modular immunopharmaceuticals (SMIPs) from Trubion Pharmaceuticals. These molecules, which can be monovalent or bivalent, are recombinant single-chain molecules containing one V_{L}, one V_{H} antigen-binding domain, and one or two constant “effector” domains, all connected by linker domains. Presumably, such a molecule might offer the advantages of increased tissue or tumor penetration claimed by fragments while retaining the immune effector functions conferred by constant domains. At least three “miniaturized” SMIPs have entered clinical development. TRU-015, an anti-CD20 SMIP developed in collaboration with Wyeth, is the most advanced project, having progressed to Phase 2 for rheumatoid arthritis (RA). Earlier attempts in systemic lupus erythrematosus (SLE) and B cell lymphomas were ultimately discontinued. Trubion and Facet Biotechnology are collaborating in the development of TRU-016, an anti-CD37 SMIP, for the treatment of CLL and other lymphoid neoplasias, a project that has reached Phase 2. Wyeth has licensed the anti-CD20 SMIP SBI-087 for the treatment of autoimmune diseases, including RA, SLE, and possibly multiple sclerosis, although these projects remain in the earliest stages of clinical testing. (Nelson, A. L., MAbs. 2010. January-February; 2(1):77-83).

### Diabodies

[0303] In some embodiments, payloads may encode diabodies. Diabodies are functional bispecific single-chain antibodies (bscAb). These bivalent antigen-binding molecules are composed of non-covalent dimers of scFvs, and can be produced in mammalian cells using recombinant methods. (See, e.g., Mack et al. Proc. Natl. Acad. Si., 92: 7021-7025, 1995). Few diabodies have entered clinical development. An iodine-123-labeled diabody version of the anti-CEA chimeric antibody cT84.66 has been evaluated for pre-surgical immunoscintigraphic detection of colorectal cancer in a study sponsored by the Beckman Research Institute of the City of Hope (Clinicaltrials.gov NCT00647153) (Nelson, A. L., MAbs., 2010. January-February; 2(1):77-83).

### Unibody

[0304] In some embodiments, payloads may encode a “unibody,” in which the hinge region has been removed from IgG4 molecules. While IgG4 molecules are unstable and can exchange light-heavy chain heterodimers with one another, deletion of the hinge region prevents heavy chain-heavy chain pairing entirely, leaving highly specific monovalent light/heavy heterodimers, while retaining the Fc region to ensure stability and half-life in vivo. This configuration may minimize the risk of immune activation or oncogenic growth, as IgG4 interacts poorly with FcRs and monovalent unibodies fail to promote intracellular signaling complex formation. These contentions are, however, largely supported by laboratory, rather than clinical, evidence. Other antibodies may be “miniaturized” antibodies, which are compacted 100 kDa antibodies (see, e.g., Nelson. A. L., MAbs., 2010. January-February; 2(1):77-83).

### Intrabodies

[0305] In some embodiments, payloads may encode intrabodies. Intrabodies are a form of antibody that is not secreted from a cell in which it is produced, but instead targets one or more intracellular proteins. Intrabodies are expressed and function intracellularly, and may be used to affect a multitude of cellular processes including, but not limited to intracellular trafficking, transcription, translation, metabolic processes, proliferative signaling and cell division. In some embodiments, methods described herein include intrabody-based therapies. In some such embodiments, variable domain sequences and/or CDR sequences disclosed herein are incorporated into one or more constructs for intrabody-based therapy. For example, intrabodies may target one or more glycated intracellular proteins or may modulate the interaction between one or more glycated intracellular proteins and an alternative protein.

[0306] More than two decades ago, intracellular antibodies against intracellular targets were first described (Biocca, Neuberger and Cattaneo EMBO J. 9: 101-108, 1990). The intracellular expression of intrabodies in different compartments of mammalian cells allows blocking or modulation of the function of endogenous molecules (Biocca, et al., EMBO J. 9: 101-108, 1990; Colby et al., Proc. Natl. Acad. Sci. U.S.A. 101: 17616-21, 2004). Intrabodies can alter protein folding, protein-protein, protein-DNA, protein-RNA interactions and protein modification. They can induce a phenotypic knockout and work as neutralizing agents by direct binding to the target antigen, by diverting its intracellular trafficking or by inhibiting its association with binding partners. They have been largely employed as research tools and are emerging as therapeutic molecules for the treatment of human diseases such as viral pathologies, cancer and misfolding diseases. The fast-growing bio-market of recombinant antibodies provides intrabodies with enhanced binding specificity, stability, and solubility, together with lower immunogenicity, for their use in therapy (Biocca, abstract in Antibody Expression and Production Cell Engineering Volume 7, 2011, pp. 179-195).

[0307] In some embodiments, intrabodies have advantages over interfering RNA (iRNA); for example, iRNA has been shown to exert multiple non-specific effects, whereas intrabodies have been shown to have high specificity and affinity to target antigens. Furthermore, as proteins, intrabodies possess a much longer active half-life than iRNA. Thus, when the active half-life of the intracellular target molecule is long, gene silencing through iRNA may be slow to yield an effect, whereas the effects of intrabody expression can be almost instantaneous. Lastly, it is possible to design intrabodies to block certain binding interactions of a particular target molecule, while sparing others.

[0308] Intrabodies are often single chain variable fragments (scFvs) expressed from a recombinant nucleic acid molecule and engineered to be retained intracellularly (e.g., retained in the cytoplasm, endoplasmic reticulum, or periplasm). Intrabodies may be used, for example, to ablate the function of a protein to which the intrabody binds. The expression of intrabodies may also be regulated through the use of inducible promoters in the nucleic acid expression vector comprising the intrabody. Intrabodies may be produced for use in the viral genomes using methods known in the art, such as those disclosed and reviewed in: (Marasco et al., 1993 Proc. Natl. Acad. Sci. USA, 90: 7889-7893; Chen et al., 1994, Hum. Gene her. 5:595-601; Chen et al., 1994, Proc. Natl. Acad. Sci. USA, 91: 5932-5936; Maciejewski et al., 1995, Nature Med., 1: 667-673; Marasco, 1995, Immunotech, 1: 1-19; Mhashilkar, et al., 1995, EMBO J. 14: 1542-51; Chen et al., 1996, Hum. Gene Therap., 7: 1515-1525; Marasco, Gene Ther. 4:11-15, 1997; Rondon and Marasco, 1997, Annu. Rev. Microbiol. 51:257-283; Cohen, et al., 1998, Oncogene 17:2445-56; Proba et al., 1998, J. Mol. Biol. 275:245-253; Cohen et al., 1998, Oncogene 17:2445-2456; Hassanzadeh, et al., 1998. FEBS Lett. 437:81-6; Richardson et al., 1998. Gene Ther. 5:635-44; Ohage and Steipe, 1999, J. Mol. Biol. 291:1119-1128; Ohage et al., 1999, J. Mol. Biol. 291:1129-1134; Wirtz and Steipe, 1999, Protein Sci. 8:2245-2250; Zhu et al., 1999, J. Immunol. Methods 231:207-222; Arafat et al., 2000, Cancer Gene Ther. 7:1250-6; der Maur et al., 2002, J. Biol. Chem. 277:45075-85; Mhashilkar et al., 2002, Gene Ther. 9:307-19; and Wheeler et al., 2003, FASEB J. 17: 1733-5; and references cited therein). In particular, a CCR5 intrabody has been produced by Steinberger el al., 2000, Proc. Natl. Acad. Sci. USA 97:805-810). See generally Marasco, W A, 1998, “Intrabodies: Basic Research and Clinical Gene Therapy Applications” Springer: New York; and for a review of scFvs, see Pluckthun in “The Pharmacology of Monoclonal Antibodies,” 1994, vol. 113, Rosenburg and Moore eds. Springer-Verlag, New York, pp. 269-315.

[0309] Sequences from donor antibodies may be used to develop intrabodies. Intrabodies are often recombinantly expressed as single domain fragments such as isolated V_{H} and VL domains or as a single chain variable fragment (scFv) antibody within the cell. For example, intrabodies are often expressed as a single polypeptide to form a single chain antibody comprising the variable domains of the heavy and light chains joined by a flexible linker polypeptide. Intrabodies typically lack disulfide bonds and are capable of modulating the expression or activity of target genes through their specific binding activity. Single chain antibodies can also be expressed as a single chain variable region fragment joined to the light chain constant region.

[0310] As is known in the art, an intrabody can be engineered into recombinant polynucleotide vectors to encode sub-cellular trafficking signals at its N or C terminus to allow expression at high concentrations in the sub-cellular compartments where a target protein is located. For example, intrabodies targeted to the endoplasmic reticulum (ER) are engineered to incorporate a leader peptide and, optionally, a C-terminal ER retention signal, such as the KDEL amino acid motif (SEQ ID NO: 4545). Intrabodies intended to exert activity in the nucleus are engineered to include a nuclear localization signal. Lipid moieties are joined to intrabodies in order to tether the intrabody to the cytosolic side of the plasma membrane. Intrabodies can also be targeted to exert function in the cytosol. For example, cytosolic intrabodies are used to sequester factors within the cytosol, thereby preventing them from being transported to their natural cellular destination.

[0311] There are certain technical challenges with intrabody expression. In particular, protein conformational folding and structural stability of the newly synthesized intrabody within the cell is affected by reducing conditions of the intracellular environment.

[0312] Intrabodies may be promising therapeutic agents for the treatment of misfolding diseases, including Tauopathies, prion diseases, Alzheimer's, Parkinson's, and Huntington's, because of their virtually infinite ability to specifically recognize the different conformations of a protein, including pathological isoforms, and because they can be targeted to the potential sites of aggregation (both intra- and extracellular sites). These molecules can work as neutralizing agents against amyloidogenic proteins by preventing their aggregation, and/or as molecular shunters of intracellular traffic by rerouting the protein from its potential aggregation site (Cardinale, and Biocca, Curr. Mol. Med. 2008, 8:2-11).

### Maxibodies

[0313] In some embodiments, the payloads encode a maxibody (bivalent scFv fused to the amino terminus of the Fc (CH2-CH3 domains) of IgG.

### Chimeric Antigen Receptors

[0314] In some embodiments, the polypeptides encoded by the viral genomes (e.g., antibodies) may be used to generate chimeric antigen receptors (CARs) as described by BIOATLA® in International Publications WO2016033331 and WO2016036916, the contents of which are herein incorporated by reference in their entirety. As used herein, a “chimeric antigen receptor (CAR)” refers to an artificial chimeric protein comprising at least one antigen specific targeting region (ASTR), wherein the antigen specific targeting region comprises a full-length antibody or a fragment thereof that specifically binds to a target antigen. The ASTR may comprise any of the following: a full length heavy or light chain, an Fab fragment, a single chain Fv fragment, a divalent single chain antibody, or a diabody. As a non-limiting example, the ASTR of a CAR may be any of the antibodies listed in Table 3, antibody-based compositions or fragments thereof. Any molecule that is capable of binding a target antigen with high affinity can be used in the ASTR of a CAR. In some embodiments, the CAR may have more than one ASTR. These ASTRs may target two or more antigens or two or more epitopes of the same antigen. In some embodiments, the CAR is conditionally active. In some embodiments, the CAR is used to produce a genetically engineered cytotoxic cell carrying the CAR and capable of targeting the antigen bound by the ASTR.

[0315] Chimeric antigen receptors (CARs) are particularly useful in the treatment of cancers, though also therapeutically effective in treatment of a wide variety of other diseases and disorders. Non-limiting examples of disease categories that may be treated with CARs or CAR-based therapeutics include autoimmune disorders, B-cell mediated diseases, inflammatory diseases, neuronal disorders, cardiovascular disease and circulatory disorders, or infectious diseases. Not wishing to be bound by theory, CARs traditionally work by targeting antigens presented on the surface of or on the inside of cells to be destroyed e.g., cancer tumor cells, by the cytotoxic cell of the CAR.

### Senescent Cell Surface Protein Antibodies

[0316] In some embodiments, the AAV particles may comprise nucleic acids which have been engineered to express of antibodies that selectively bind to surface marker proteins of senescent cells. For example, the antibodies may selectively bind to proteins that are in misfolded conformation. The binding antibodies may reduce the number of senescent cells and be used to treat age-related conditions, such as, but not limited to, Alzheimer's disease, cardiovascular disease, emphysema, sarcopenia, and tumorigenesis as well as conditions more cosmetic in nature such as signs of skin aging including wrinkling, sagging, discoloration, age-related tissue dysfunction, tumor formation, and other age-related conditions.

[0317] In some embodiments, the expressed antibodies binding to epitopes of senescent cell surface proteins may be, but are not limited to, such as prion epitopes presented by SEQ ID NO: 1-14 of International Publication No. WO2014186878; CD44 epitopes presented by SEQ ID NO: 47-51 of International Publication No. WO2014186878; TNFR epitopes presented by SEQ ID NO: 52-56 of International Publication No. WO2014186878; NOTCH1 epitope presented by SEQ ID NO: 57-61 of International Publication No. WO2014186878; FasR epitopes presented by SEQ ID NO: 62-66 of International Publication No. WO2014186878; epidermal growth factor epitopes presented by SEQ ID NO: 67-81 of International Publication No. WO2014186878; CD38 epitopes presented by SEQ ID NO: 82-86 of International Publication No. WO2014186878, the contents of each of which are herein incorporated by reference in their entirety.

[0318] In some embodiments, the expressed antibodies may comprise peptides binding to senescent cell surface prion proteins, such as, but not limited to, those presented by SEQ ID NO: 15-36 of International Publication No. WO2014186878, the contents of which are herein incorporated by reference in their entirety.

[0319] In some embodiments, the expressed antibody may be AMF-3a-118 or AMF 3d-19 (SEQ ID NO: 89-92 and 103-106 of International publication WO2014186878, respectively, the contents of which are herein incorporated by reference in their entirety) targeting senescent cell surface protein FasR. In some embodiments, the expressed antibody may be Ab c-120 (SEQ ID NO: 37-40 of International publication WO2014186878, the contents of which are herein incorporated by reference in their entirety) targeting senescent cell surface protein PrP.

### Payload Antibodies

[0320] In some embodiments, the payload region of the AAV particle comprises one or more nucleic acid sequences encoding tau associated disease antibodies, variants or fragments thereof.

[0321] In some embodiments, the payload region of the AAV particle comprises one or more nucleic acid sequences encoding one or more of the payload antibody polypeptides listed in Table 3, or variants or fragments thereof. As used herein, “antibody polynucleotide” refers to a nucleic acid sequence encoding an antibody polypeptide.

[0322] In some embodiments, the payload region of the AAV particle comprises one or more nucleic acid sequences listed in Table 3, or variants or fragments thereof.

[0323] In some embodiments, the payload region of the AAV particle comprises a nucleic acid sequence encoding a payload antibody with at least 50% identity to one or more payload antibody polypeptides listed in Tables 3. The encoded antibody polypeptide may have 50%, 51%, 52%, 53%, 54%, 55%, 56%, 57%, 58%, 59%, 60%, 61%, 62%, 63%, 64%, 65%, 66%, 67%, 68%, 69%, 70%, 71%, 72%, 73%, 74%, 75%, 76%, 77%, 78%, 79%, 80%, 81%, 82%, 83%, 84%, 85%, 86%, 87%, 88%, 89%, 90%, 91%, 92%, 93%, 94%, 95%, 96%, 97%, 98%, 99%, or 100% identity to one or more of the payload antibody polypeptides listed in Table 3, or variants or fragments thereof.

[0324] In some embodiments, the full sequence of the encoded antibody polypeptide may have 50%, 51%, 52%, 53%, 54%, 55%, 56%, 57%, 58%, 59%, 60%, 61%, 62%, 63%, 64%, 65%, 66%, 67%, 68%, 69%, 70%, 71%, 72%, 73%, 74%, 75%, 76%, 77%, 78%, 79%, 80%, 81%, 82%, 83%, 84%, 85%, 86%, 87%, 88%, 89%, 90%, 91%, 92%, 93%, 94%, 95%, 96%, 97%, 98%, 99%, or 100% identity to one or more of the payload antibody polypeptides listed in Table 3, or variants or fragments thereof.

[0325] In some embodiments, the variable region sequence(s) of the encoded antibody polypeptide may have 50%, 51%, 52%, 53%, 54%, 55%, 56%, 57%, 58%, 59%, 60%, 61%, 62%, 63%, 64%, 65%, 66%, 67%, 68%, 69%, 70%, 71%, 72%, 73%, 74%, 75%, 76%, 77%, 78%, 79%, 80%, 81%, 82%, 83%, 84%, 85%, 86%, 87%, 88%, 89%, 90%, 91%, 92%, 93%, 94%, 95%, 96%, 97%, 98%, 99%, or 100% identity to one or more of the payload antibody polypeptides listed in Table 3, or variants or fragments thereof.

[0326] In some embodiments, the heavy chain of the encoded antibody polypeptide may have 50%, 51%, 52%, 53%, 54%, 55%, 56%, 57%, 58%, 59%, 60%, 61%, 62%, 63%, 64%, 65%, 66%, 67%, 68%, 69%, 70%, 71%, 72%, 73%, 74%, 75%, 76%, 77%, 78%, 79%, 80%, 81%, 82%, 83%, 84%, 85%, 86%, 87%, 88%, 89%, 90%, 91%, 92%, 93%, 94%, 95%, 96%, 97%, 98%, 99%, or 100% identity to one or more of the payload heavy chain antibody polypeptides listed in Table 3, or variants or fragments thereof.

[0327] In some embodiments, the light chain of the encoded antibody polypeptide may have 50%, 51%, 52%, 53%, 54%, 55%, 56%, 57%, 58%, 59%, 60%, 61%, 62%, 63%, 64%, 65%, 66%, 67%, 68%, 69%, 70%, 71%, 72%, 73%, 74%, 75%, 76%, 77%, 78%, 79%, 80%, 81%, 82%, 83%, 84%, 85%, 86%, 87%, 88%, 89%, 90%, 91%, 92%, 93%, 94%, 95%, 96%, 97%, 98%, 99%, or 100% identity to one or more of the payload light chain antibody polypeptides listed in Table 3, or variants or fragments thereof.

[0328] In some embodiments, the CDR region of the encoded antibody polypeptide may have 50%, 51%, 52%, 53%, 54%, 55%, 56%, 57%, 58%, 59%, 60%, 61%, 62%, 63%, 64%, 65%, 66%, 67%, 68%, 69%, 70%, 71%, 72%, 73%, 74%, 75%, 76%, 77%, 78%, 79%, 80%, 81%, 82%, 83%, 84%, 85%, 86%, 87%, 88%, 89%, 90%, 91%, 92%, 93%, 94%, 95%, 96%, 97%, 98%, 99%, or 100% identity to the CDRs of one or more of the payload antibody polypeptides listed in Table 3, or variants or fragments thereof.

[0329] In some embodiments, the payload antibody has 90% identity to one or more of the antibody polypeptides listed in Table 3, or variants or fragments thereof.

[0330] In some embodiments, the payload antibody has 91% identity to one or more of the antibody polypeptides listed in Table 3, or variants or fragments thereof.

[0331] In some embodiments, the payload antibody has 92% identity to one or more of the antibody polypeptides listed in Table 3, or variants or fragments thereof.

[0332] In some embodiments, the payload antibody has 93% identity to one or more of the antibody polypeptides listed in Table 3, or variants or fragments thereof.

[0333] In some embodiments, the payload antibody has 94% identity to one or more of the antibody polypeptides listed in Table 3, or variants or fragments thereof.

[0334] In some embodiments, the payload antibody has 95% identity to one or more of the antibody polypeptides listed in Table 3, or variants or fragments thereof.

[0335] In some embodiments, the payload antibody has 96% identity to one or more of the antibody polypeptides listed in Table 3, or variants or fragments thereof.

[0336] In some embodiments, the payload antibody has 97% identity to one or more of the antibody polypeptides listed in Table 3, or variants or fragments thereof.

[0337] In some embodiments, the payload antibody has 98% identity to one or more of the antibody polypeptides listed in Table 3, or variants or fragments thereof.

[0338] In some embodiments, the payload antibody has 99% identity to one or more of the antibody polypeptides listed in Table 3, or variants or fragments thereof.

[0339] In some embodiments, the payload antibody has 100% identity to one or more of the antibody polypeptides listed in Table 3, or variants or fragments thereof.

[0340] In some embodiments, the payload region of the AAV particle comprises a nucleic acid sequence with at least 50% identity to one or more nucleic acid sequences listed in Table 3, or variants or fragments thereof. The payload nucleic acid sequence may have 50%, 51%, 52%, 53%, 54%, 55%, 56%, 57%, 58%, 59%, 60%, 61%, 62%, 63%, 64%, 65%, 66%, 67%, 68%, 69%, 70%, 71%, 72%, 73%, 74%, 75%, 76%, 77%, 78%, 79%, 80%, 81%, 82%, 83%, 84%, 85%, 86%, 87%, 88%, 89%, 90%, 91%, 92%, 93%, 94%, 95%, 96%, 97%, 98%, 99%, or 100% identity to one or more nucleic acid sequences listed in Table 3, or variants or fragments thereof.

[0341] In some embodiments, the payload nucleic acid sequence has 90% identity to one or more of the nucleic acid sequences listed in Table 3, or variants or fragments thereof.

[0342] In some embodiments, the payload nucleic acid sequence has 91% identity to one or more of the nucleic acid sequences listed in Table 3, or variants or fragments thereof.

[0343] In some embodiments, the payload nucleic acid sequence has 92% identity to one or more of the nucleic acid sequences listed in Table 3, or variants or fragments thereof.

[0344] In some embodiments, the payload nucleic acid sequence has 93% identity to one or more of the nucleic acid sequences listed in Table 3, or variants or fragments thereof.

[0345] In some embodiments, the payload nucleic acid sequence has 94% identity to one or more of the nucleic acid sequences listed in Table 3, or variants or fragments thereof.

[0346] In some embodiments, the payload nucleic acid sequence has 95% identity to one or more of the nucleic acid sequences listed in Table 3, or variants or fragments thereof.

[0347] In some embodiments, the payload nucleic acid sequence has 96% identity to one or more of the nucleic acid sequences listed in Table 3, or variants or fragments thereof.

[0348] In some embodiments, the payload nucleic acid sequence has 97% identity to one or more of the nucleic acid sequences listed in Table 3, or variants or fragments thereof.

[0349] In some embodiments, the payload nucleic acid sequence has 98% identity to one or more of the nucleic acid sequences listed in Table 3, or variants or fragments thereof.

[0350] In some embodiments, the payload nucleic acid sequence has 99% identity to one or more of the nucleic acid sequences listed in Table 3, or variants or fragments thereof.

[0351] In some embodiments, the payload nucleic acid sequence has 100% identity to one or more of the nucleic acid sequences listed in Table 3, or variants or fragments thereof.

TABLE 3
Tau Associated Disease Antibodies

| | | Type | | | | SEQ |
|---|---|---|---|---|---|---|
| | | (PRT/ | | | | ID |
| Ab ID | Component | DNA) | Description | Reference | Len. | NO |
| Ab1 | VH Signal | DNA | IPN002 (VH Signal) | | 57 | 1740 |
| Ab2 | VH Signal | DNA | PHF1 (VH Signal) | | 57 | 1741 |
| Ab3 | VH Constant | DNA | VH (constant - 969) | | 969 | 1742 |
| Ab4 | VH Constant | DNA | VH (constant - 972) | | 972 | 1743 |
| Ab5 | VH CDR | PRT | 7295-M6 HCDR | WO2015122922; SEQ ID | 10 | 1744 |
| | | | | NO: 12 and 20 | | |
| Ab6 | VH CDR | PRT | 7295-M6 HCDR | WO2015122922; SEQ ID | 16 | 1745 |
| | | | | NO: 13 and 21 | | |
| Ab7 | VH CDR | PRT | 7295-M6 HCDR | WO2015122922; SEQ ID | 4 | 1746 |
| | | | | NO: 14 and 22 | | |
| Ab8 | VH CDR | PRT | 7297-2M1 HCDR | WO2015122922; SEQ ID | 16 | 1747 |
| | | | | NO: 69 | | |
| Ab9 | VH CDR | PRT | 7298-M1 HCDR | WO2015122922; SEQ ID | 11 | 1748 |
| | | | | NO: 28 | | |
| Ab10 | VH CDR | PRT | 7298-M1 HCDR | WO2015122922; SEQ ID | 16 | 1749 |
| | | | | NO: 29 | | |
| Ab11 | VH CDR | PRT | 7298-M1 HCDR | WO2015122922; SEQ ID | 4 | 1750 |
| | | | | NO: 30 | | |
| Ab12 | VH CDR | PRT | 7298-M2 HCDR | WO2015122922; SEQ ID | 10 | 1751 |
| | | | | NO: 36 | | |
| Ab13 | VH CDR | PRT | 7298-M2 HCDR | WO2015122922; SEQ ID | 14 | 1752 |
| | | | | NO: 37 | | |
| Ab14 | VH CDR | PRT | 7298-M2 HCDR | WO2015122922; SEQ ID | 8 | 1753 |
| | | | | NO: 38 | | |
| Ab15 | VH CDR | PRT | 7299-M2 HCDR | WO2015122922; SEQ ID | 10 | 1754 |
| | | | | NO: 44 and 60 | | |
| Ab16 | VH CDR | PRT | 7299-M2 HCDR | WO2015122922; SEQ ID | 16 | 1755 |
| | | | | NO: 45 | | |
| Ab17 | VH CDR | PRT | 7299-M2 HCDR | WO2015122922; SEQ ID | 4 | 1756 |
| | | | | NO: 46 and 62 | | |
| Ab18 | VH CDR | PRT | 7299-M5 HCDR | WO2015122922; SEQ ID | 10 | 1757 |
| | | | | NO: 52 and 68 | | |
| Ab19 | VH CDR | PRT | 7299-M5 HCDR | WO2015122922; SEQ ID | 16 | 1758 |
| | | | | NO: 53 | | |
| Ab20 | VH CDR | PRT | 7299-M5 HCDR | WO2015122922; SEQ ID | 10 | 1759 |
| | | | | NO: 54 and 70 | | |
| Ab21 | VH CDR | PRT | 7299-M9 HCDR | WO2015122922; SEQ ID | 15 | 1760 |
| | | | | NO: 61 | | |
| Ab22 | VH CDR | PRT | C10.2 HCDR1 | WO2017009308; SEQ ID | 13 | 1761 |
| | | | | NO: 12, 20 and 28 | | |
| Ab23 | VH CDR | PRT | C10.2 HCDR2 | WO2017009308; SEQ ID | 16 | 1762 |
| | | | | NO: 13 and 29 | | |
| Ab24 | VH CDR | PRT | C10.2 HCDR3 | WO2017009308; SEQ ID | 6 | 1763 |
| | | | | NO: 14 and 30 | | |
| Ab25 | VH CDR | PRT | C5.2 HCDR2 | WO2017009308; SEQ ID | 16 | 1764 |
| | | | | NO: 21 | | |
| Ab26 | VH CDR | PRT | C5.2 HCDR3 | WO2017009308; SEQ ID | 6 | 1765 |
| | | | | NO: 22 | | |
| Ab27 | VH CDR | PRT | D1.2 HCDR1 | WO2017009308; SEQ ID | 13 | 1766 |
| | | | | NO: 4 | | |
| Ab28 | VH CDR | PRT | D1.2 HCDR2 | WO2017009308; SEQ ID | 16 | 1767 |
| | | | | NO: 5 | | |
| Ab29 | VH CDR | PRT | D1.2 HCDR3 | WO2017009308; SEQ ID | 6 | 1768 |
| | | | | NO: 6 | | |
| Ab30 | VH CDR | PRT | HCDR1 | U.S. Pat. No. 8,980,270; | 5 | 1769 |
| | | | | SEQ ID NO: 4 | | |
| Ab31 | VH CDR | PRT | HCDR1 | U.S. Pat. No. 8,980,270; | 5 | 1770 |
| | | | | SEQ ID NO: 10 | | |
| Ab32 | VH CDR | PRT | HCDR2 | U.S. Pat. No. 8,980,270; | 17 | 1771 |
| | | | | SEQ ID NO: 5 | | |
| Ab33 | VH CDR | PRT | HCDR2 | U.S. Pat. No. 8,980,270; | 17 | 1772 |
| | | | | SEQ ID NO: 11 | | |
| Ab34 | VH CDR | PRT | HCDR2 | WO2015081085; SEQ ID | 32 | 1773 |
| | | | | NO: 27 | | |
| Ab35 | VH CDR | PRT | HCDR3 | U.S. Pat. No. 8,980,270; | 8 | 1774 |
| | | | | SEQ ID NO: 6 | | |
| Ab36 | VH CDR | PRT | HCDR3 | U.S. Pat. No. 8,980,270; | 8 | 1775 |
| | | | | SEQ ID NO: 12 | | |
| Ab37 | VH CDR | PRT | HCDR3 | WO2015081085; SEQ ID | 11 | 1776 |
| | | | | NO: 44 | | |
| Ab38 | VH CDR | PRT | IPN002 HCDR1 | WO2014028777; SEQ ID | 14 | 1777 |
| | | | | NO: 84 | | |
| Ab39 | VH CDR | PRT | IPN002 HCDR2 | WO2014028777; SEQ ID | 32 | 1778 |
| | | | | NO: 85 | | |
| Ab40 | VH CDR | PRT | IPN002 HCDR3 | WO2014028777; SEQ ID | 11 | 1779 |
| | | | | NO: 86 | | |
| Ab41 | VH CDR | PRT | MC1 LCDR1 | WO2016137811; SEQ ID | 13 | 1780 |
| | | | | NO: 6 | | |
| Ab42 | VH CDR | PRT | MC1 LCDR2 | WO2016137811; SEQ ID | 18 | 1781 |
| | | | | NO: 7 | | |
| Ab43 | VH CDR | PRT | MC1 LCDR3 | WO2016137811; SEQ ID | 9 | 1782 |
| | | | | NO: 8 | | |
| Ab44 | VH CDR | PRT | PT1 HCDR1 (Chothia) | U.S. Pat. No. 9,371,376; | 7 | 1783 |
| | | | | SEQ ID NO: 19 | | |
| Ab45 | VH CDR | PRT | PT1 HCDR1 (Rabat) | U.S. Pat. No. 9,371,376; | 5 | 1784 |
| | | | | SEQ ID NO: 7 | | |
| Ab46 | VH CDR | PRT | PT1 HCDR2 (Chothia) | U.S. Pat. No. 9,371,376; | 6 | 1785 |
| | | | | SEQ ID NO: 20 | | |
| Ab47 | VH CDR | PRT | PT1 HCDR2 (Rabat) | U.S. Pat. No. 9,371,376; | 17 | 1786 |
| | | | | SEQ ID NO. 8 | | |
| Ab48 | VH CDR | PRT | PT1 HCDR3 (Chothia) | U.S. Pat. No. 9,371,376; | 9 | 1787 |
| | | | | SEQ ID NO: 21 | | |
| Ab49 | VH CDR | PRT | PT1 HCDR3 (Rabat) | U.S. Pat. No. 9,371,376; | 10 | 1788 |
| | | | | SEQ ID NO: 9 | | |
| Ab50 | VH CDR | PRT | PT3 HCDR I (Chothia) | U.S. Pat. No. 9,371,376; | 7 | 1789 |
| | | | | SEQ ID NO: 25 | | |
| Ab51 | VH CDR | PRT | PT3 HCDR1 (Rabat) | U.S. Pat. No. 9,371,376; | 5 | 1790 |
| | | | | SEQ ID NO: 13 | | |
| Ab52 | VH CDR | PRT | PT3 HCDR2 (Chothia) | U.S. Pat. No. 9,371,376; | 5 | 1791 |
| | | | | SEQ ID NO: 26 | | |
| Ab53 | VH CDR | PRT | PT3 HCDR2 (Rabat) | U.S. Pat. No. 9,371,376; | 16 | 1792 |
| | | | | SEQ ID NO: 14 | | |
| Ab54 | VH CDR | PRT | PT3 HCDR3 (Chothia) | U.S. Pat. No. 9,371,376; | 9 | 1793 |
| | | | | SEQ ID NO: 27 | | |
| Ab55 | VH CDR | PRT | PT3 HCDR3 (Rabat) | U.S. Pat. No. 9,371,376; | 10 | 1794 |
| | | | | SEQ ID NO: 15 | | |
| Ab56 | VH | PRT | 7295-M6 VH | WO2015122922; SEQ ID | 125 | 1795 |
| | | | | NO: 16 and 24 | | |
| Ab57 | VH | PRT | 7297-2M1 VH | WO2015122922; SEQ ID | 131 | 1796 |
| | | | | NO: 72 | | |
| Ab58 | VH | PRT | 7298-M1 VH | WO2015122922; SEQ ID | 127 | 1797 |
| | | | | NO: 32 | | |
| Ab59 | VH | PRT | 7298-M2 VH | WO2015122922; SEQ ID | 128 | 1798 |
| | | | | NO: 40 | | |
| Ab60 | VH | PRT | 7299-M2 VH | WO2015122922; SEQ ID | 125 | 1799 |
| | | | | NO: 48 | | |
| Ab61 | VH | PRT | 7299-M5 VH | WO2015122922; SEQ ID | 131 | 1800 |
| | | | | NO: 56 | | |
| Ab62 | VH | PRT | 7299-M9 VH | WO2015122922; SEQ ID | 125 | 1801 |
| | | | | NO: 64 | | |
| Ab63 | VH | PRT | C10.2 VH | WO2017009308; SEQ ID | 439 | 1802 |
| | | | | NO: 16 | | |
| Ab64 | VH | PRT | C10.2 VH - 115 | | 115 | 1803 |
| Ab65 | VH | DNA | C10.2 VH | | 345 | 1804 |
| | | | Bioinformatics | | | |
| Ab66 | VH | DNA | C10.2 VH EMBOSS | | 345 | 1805 |
| Ab67 | VH | DNA | C10.2 VH Geneinfinity | | 345 | 1806 |
| Ab68 | VH | DNA | C10.2 VH | | 345 | 1807 |
| | | | GregThatcher | | | |
| Ab69 | VH | DNA | C10.2 VH IDT | | 345 | 1808 |
| Ab70 | VH | DNA | C10.2 VH InSilico | | 345 | 1809 |
| Ab71 | VH | DNA | C10.2 VH MolBio | | 345 | 1810 |
| Ab72 | VH | DNA | C10.2 VH N2P | | 345 | 1811 |
| Ab73 | VH | DNA | C10.2 VH Snapgene | | 345 | 1812 |
| Ab74 | VH | DNA | C10.2 VH Vector NTT | | 345 | 1813 |
| Ab75 | VH | PRT | C5.2 VH | WO2017009308; SEQ ID | 439 | 1814 |
| | | | | NO: 24 | | |
| Ab76 | VH | PRT | C8.3 VH | WO2017009308; SEQ ID | 439 | 1815 |
| | | | | NO: 32 | | |
| Ab77 | VH | PRT | D1.2 VH | WO2017009308; SEQ ID | 451 | 1816 |
| | | | | NO: 8 | | |
| Ab78 | VH | PRT | hC10.2 VH | WO2017009308; SEQ ID | 444 | 1817 |
| | | | | NO: 35 | | |
| Ab79 | VH | DNA | IPN001 VH - 351 | U.S. Pat. No. 8,980,270; | 351 | 1818 |
| | | | | SEQ ID NO: 18 | | |
| Ab80 | VH | PRT | IPN001 VH - 117 | U.S. Pat. No. 8,980,270; | 117 | 1819 |
| | | | | SEQ ID NO: 14 | | |
| Ab81 | VH | DNA | IPN002 VH - 1377 | | 1377 | 1820 |
| Ab82 | VH | DNA | IPN002 VH - 351 | U.S. Pat. No. 8,980,270; | 351 | 1821 |
| | | | | SEQ ID NO: 20 | | |
| Ab83 | VH | PRT | IPN002 VH - 117 | U.S. Pat. No. 8,980,270; | 117 | 1822 |
| | | | | SEQ ID NO: 16 | | |
| Ab84 | VH | PRT | IPN002 VH - 30 | WO2014028777; SEQ ID | 30 | 1823 |
| | | | | NO: 83 | | |
| Ab85 | VH | DNA | IPN002 VH variant 1 | U.S. Pat. No. 8,980,270; | 351 | 1824 |
| | | | | SEQ ID NO: 28 | | |
| Ab86 | VH | PRT | IPN002 VH variant 1 | U.S. Pat. No. 8,980,270; | 117 | 1825 |
| | | | | SEQ ID NO: 36 | | |
| Ab87 | VH | DNA | IPN002 VH variant 2 | U.S. Pat. No. 8,980,270; | 351 | 1826 |
| | | | | SEQ ID NO: 29 | | |
| Ab88 | VH | PRT | IPN002 VH variant 2 | U.S. Pat. No. 8,980,270; | 117 | 1827 |
| | | | | SEQ ID NO: 37 | | |
| Ab89 | VH | DNA | IPN002 VH variant 3 | U.S. Pat. No. 8,980,270; | 351 | 1828 |
| | | | | SEQ ID NO: 30 | | |
| Ab90 | VH | PRT | IPN002 VH variant 3 | U.S. Pat. No. 8,980,270; | 117 | 1829 |
| | | | | SEQ ID NO: 38 | | |
| Ab91 | VH | DNA | IPN002 VH variant 4 | U.S. Pat. No. 8,980,270; | 351 | 1830 |
| | | | | SEQ ID NO: 31 | | |
| Ab92 | VH | PRT | IPN002 VH variant 4 | U.S. Pat. No. 8,980,270; | 117 | 1831 |
| | | | | SEQ ID NO: 39 | | |
| Ab93 | VH | DNA | MC1 VH - 1374 | | 1374 | 1832 |
| Ab94 | VH | DNA | MC1 VH - 1326 | WO2016137811; SEQ ID | 1326 | 1833 |
| | | | | NO: 12 | | |
| Ab95 | VH | PRT | MC1 VH - 458 | | 458 | 1834 |
| Ab96 | VH | PRT | MC1 VH - 442 | WO2016137811; SEQ ID | 442 | 1835 |
| | | | | NO: 2 | | |
| Ab97 | VH | PRT | MC1 VH - 116 | WO2016137811; SEQ ID | 116 | 1836 |
| | | | | NO: 10 | | |
| Ab98 | VH | DNA | PHF1 VH - 1320 | | 1320 | 1837 |
| Ab99 | VH | DNA | PHF1 VH - 1377 | | 1377 | 1838 |
| Ab100 | VH | DNA | PHF1 VH - 351 | | 351 | 1839 |
| Ab101 | VH | DNA | PHF1 VH - 699 | | 699 | 1840 |
| Ab102 | VH | DNA | PHF1 VH - 717 | | 717 | 1841 |
| Ab103 | VH | DNA | PHF1 VH - 744 | | 744 | 1842 |
| Ab104 | VH | DNA | PHF1 VH - 753 | | 753 | 1843 |
| Ab105 | VH | PRT | PHF1 VH - 459 | | 459 | 1844 |
| Ab106 | VH | DNA | PHF1 VH+ | | 1383 | 1845 |
| Ab107 | VH | DNA | PT1 VH - 357 | U.S. Pat. No. 9,371,376; | 357 | 1846 |
| | | | | SEQ ID NO: 31 | | |
| Ab108 | VH | PRT | PT1 VH - 119 | U.S. Pat. No. 9,371,376; | 119 | 1847 |
| | | | | SEQ ID NO: 35 | | |
| Ab109 | VH | DNA | PT3 VH - 354 | U.S. Pat. No. 9,371,376; | 354 | 1848 |
| | | | | SEQ ID NO: 33 | | |
| Ab110 | VH | PRT | PT3 VH - 118 | U.S. Pat. No. 9,371,376; | 118 | 1849 |
| | | | | SEQ ID NO: 37 | | |
| Ab111 | VH | DNA | PT3 VH Bioinformatics | | 354 | 1850 |
| Ab112 | VH | DNA | PT3 VH Bioinformatics | | 354 | 1851 |
| | | | 2 | | | |
| Ab113 | VH | DNA | PT3 VH EMBOSS | | 354 | 1852 |
| Ab114 | VH | DNA | PT3 VH Geneinfinity | | 354 | 1853 |
| Ab115 | VH | DNA | PT3 VH Genescript | | 354 | 1854 |
| Ab116 | VH | DNA | PT3 VH IDT | | 354 | 1855 |
| Ab117 | VH | DNA | PT3 VH NUS | | 354 | 1856 |
| Ab118 | VH | DNA | PT3 VH NUS2 | | 354 | 1857 |
| Ab119 | VH | DNA | PT3 VH NUS3 | | 354 | 1858 |
| Ab120 | VH | DNA | PT3 VH Snapgene | | 354 | 1859 |
| Ab121 | VH | PRT | VH | WO2015081085; SEQ ID | 30 | 1860 |
| | | | | NO: 25 | | |
| Ab122 | VL Signal | DNA | IPN002 (VL Signal) | | 57 | 1861 |
| Ab123 | VL Signal | DNA | PHF1 (VL Signal) | | 57 | 1862 |
| Ab124 | VL Signal | DNA | PHF1 (VL Signal 72) | | 72 | 1863 |
| Ab125 | VL Constant | DNA | VL (constant) | | 321 | 1864 |
| Ab126 | VL CDR | PRT | 7295-M6 LCDR | WO2015122922; SEQ ID | 16 | 1865 |
| | | | | NO: 9 and 17 | | |
| Ab127 | VL CDR | PRT | 7295-M6 LCDR | WO2015122922; SEQ ID | 9 | 1866 |
| | | | | NO: 11 and 19 | | |
| Ab128 | VL CDR | PRT | 7297-2M1 LCDR | WO2015122922; SEQ ID | 11 | 1867 |
| | | | | NO: 65 | | |
| Ab129 | VL CDR | PRT | 7297-2M1 LCDR | WO2015122922; SEQ ID | / | 1868 |
| | | | | NO: 66 | | |
| Ab130 | VL CDR | PRT | 7297-2M1 LCDR | WO2015122922; SEQ ID | 8 | 1869 |
| | | | | NO: 67 | | |
| Ab131 | VL CDR | PRT | 7298-M1 LCDR | WO2015122922; SEQ ID | 15 | 1870 |
| | | | | NO: 25 and 33 | | |
| Ab132 | VL CDR | PRT | 7298-M1 LCDR | WO2015122922; SEQ ID | 7 | 1871 |
| | | | | NO: 26 and 34 | | |
| Ab133 | VL CDR | PRT | 7298-M1 LCDR | WO2015122922; SEQ ID | 9 | 1872 |
| | | | | NO: 27 and 35 | | |
| Ab134 | VL CDR | PRT | 7299-M2 LCDR | WO2015122922; SEQ ID | 16 | 1873 |
| | | | | NO: 41 | | |
| Ab135 | VL CDR | PRT | 7299-M2 LCDR | WO2015122922; SEQ ID | 7 | 1874 |
| | | | | NO: 42 | | |
| Ab136 | VL CDR | PRT | 7299-M2 LCDR | WO2015122922; SEQ ID | 9 | 1875 |
| | | | | NO: 43 | | |
| Ab137 | VL CDR | PRT | 7299-M5 LCDR | WO2015122922; SEQ ID | 16 | 1876 |
| | | | | NO: 49 and 57 | | |
| Ab138 | VL CDR | PRT | 7299-M5 LCDR | WO2015122922; SEQ ID | 7 | 1877 |
| | | | | NO: 50 and 58 | | |
| Ab139 | VL CDR | PRT | 7299-M5 LCDR | WO2015122922; SEQ ID | 9 | 1878 |
| | | | | NO: 51 | | |
| Ab140 | VL CDR | PRT | 7299-M9 LCDR | WO2015122922; SEQ ID | 8 | 1879 |
| | | | | NO: 59 | | |
| Ab141 | VL CDR | PRT | C10.2 LCDR1 | WO2017009308; SEQ ID | 11 | 1880 |
| | | | | NO: 9 and 25 | | |
| Ab142 | VL CDR | PRT | C10.2 LCDR2 | WO2017009308; SEQ ID | 7 | 1881 |
| | | | | NO: 10 and 18 | | |
| Ab143 | VL CDR | PRT | C10.2 LCDR3 | WO2017009308; SEQ ID | 7 | 1882 |
| | | | | NO: 11 and 19 | | |
| Ab144 | VL CDR | PRT | C5.2 LCDR1 | WO2017009308; SEQ ID | 11 | 1883 |
| | | | | NO: 17 | | |
| Ab145 | VL CDR | PRT | C8.3 LCDR2 | WO2017009308; SEQ ID | / | 1884 |
| | | | | NO: 26 | | |
| Ab146 | VL CDR | PRT | C8.3 LCDR3 | WO2017009308; SEQ ID | 7 | 1885 |
| | | | | NO: 27 | | |
| Ab147 | VL CDR | PRT | D1.2 LCDR1 | WO2017009308; SEQ ID | 16 | 1886 |
| | | | | NO: 1 | | |
| Ab148 | VL CDR | PRT | D1.2 LCDR2 | WO2017009308; SEQ ID | 7 | 1887 |
| | | | | NO: 2 | | |
| Ab149 | VL CDR | PRT | D1.2 LCDR3 | WO2017009308; SEQ ID | 7 | 1888 |
| | | | | NO: 3 | | |
| Ab150 | VL CDR | PRT | IPN002 LCDR1 | WO2014028777; SEQ ID | 15 | 1889 |
| | | | | NO: 55 | | |
| Ab151 | VL CDR | PRT | IPN002 LCDR2 | WO2014028777; SEQ ID | 32 | 1890 |
| | | | | NO: 56 | | |
| Ab152 | VL CDR | PRT | IPN002 LCDR3 | WO2014028777; SEQ ID | 10 | 1891 |
| | | | | NO: 57 | | |
| Ab153 | VL CDR | PRT | LCDR1 | U.S. Pat. No. 8,980,270; | 16 | 1892 |
| | | | | SEQ ID NO: 1 | | |
| Ab154 | VL CDR | PRT | LCDR1 | U.S. Pat. No. 8,980,270; | 16 | 1893 |
| | | | | SEQ ID NO: 7 | | |
| Ab155 | VL CDR | PRT | LCDR1 | WO2015081085; SEQ ID | 15 | 1894 |
| | | | | NO: 46 | | |
| Ab156 | VL CDR | PRT | LCDR2 | U.S. Pat. No. 8,980,270; | 7 | 1895 |
| | | | | SEQ ID NO: 2 | | |
| Ab157 | VL CDR | PRT | LCDR2 | WO2015081085; SEQ ID | 32 | 1896 |
| | | | | NO: 47 | | |
| Ab158 | VL CDR | PRT | LCDR3 | U.S. Pat. No. 8,980,270; | 9 | 1897 |
| | | | | SEQ ID NO: 3 | | |
| | | | | and 9 | | |
| Ab159 | VL CDR | PRT | MC1 LCDR1 | WO2016137811; SEQ ID | 16 | 1898 |
| | | | | NO: 3 | | |
| Ab160 | VL CDR | PRT | MC1 LCDR2 | WO2016137811; SEQ ID | 8 | 1899 |
| | | | | NO: 4 | | |
| Ab161 | VL CDR | PRT | MC1 LCDR3 | WO2016137811; SEQ ID | 9 | 1900 |
| | | | | NO: 5 | | |
| Ab162 | VL CDR | PRT | PT1 LCDR1 (Chothia) | U.S. Pat No. 9,371,376; | 12 | 1901 |
| | | | | SEQ ID NO: 22 | | |
| Ab163 | VL CDR | PRT | PT1 LCDR1 (Rabat) | U.S. Pat No. 9,371,376; | 16 | 1902 |
| | | | | SEQ ID NO: 10 | | |
| Ab164 | VL CDR | PRT | PT1 LCDR2 (Chothia) | U.S. Pat No. 9,371,376; | 3 | 1903 |
| | | | | SEQ ID NO: 23 | | |
| Ab165 | VL CDR | PRT | PT1 LCDR2 (Rabat) | U.S. Pat No. 9,371,376; | 7 | 1904 |
| | | | | SEQ ID NO: 11 | | |
| Ab166 | VL CDR | PRT | PT1 LCDR3 (Chothia) | U.S. Pat No. 9,371,376; | 7 | 1905 |
| | | | | SEQ ID NO: 24 | | |
| Ab167 | VL CDR | PRT | PT1 LCDR3 (Rabat) | U.S. Pat No. 9,371,376; | 9 | 1906 |
| | | | | SEQ ID NO. 12 | | |
| Ab168 | VL CDR | PRT | PT3 LCDR1 (Chothia) | U.S. Pat No. 9,371,376; | 7 | 1907 |
| | | | | SEQ ID NO: 28 | | |
| Ab169 | VL CDR | PRT | PT3 LCDR1 (Rabat) | U.S. Pat No. 9,371,376; | 11 | 1908 |
| | | | | SEQ ID NO: 16 | | |
| Ab170 | VL CDR | PRT | PT3 LCDR2 (Chothia) | U.S. Pat No. 9,371,376; | 3 | 1909 |
| | | | | SEQ ID NO: 29 | | |
| Ab171 | VL CDR | PRT | PT3 LCDR2 (Rabat) | U.S. Pat No. 9,371,376; | 7 | 1910 |
| | | | | SEQ ID NO: 17 | | |
| Ab172 | VL CDR | PRT | PT3 LCDR3 (Chothia) | U.S. Pat No. 9,371,376; | 6 | 1911 |
| | | | | SEQ ID NO: 30 | | |
| Ab173 | VL CDR | PRT | PT3 LCDR3 (Rabat) | U.S. Pat No. 9,371,376; | 10 | 1912 |
| | | | | SEQ ID NO: 18 | | |
| Ab174 | VL | PRT | 7295-M6 VL | WO2015122922; SEQ ID | 122 | 1913 |
| | | | | NO: 15 and 23 | | |
| Ab175 | VL | PRT | 7297-2M1 VL | WO2015122922; SEQ ID | 116 | 1914 |
| | | | | NO: 71 | | |
| Ab176 | VL | PRT | 7298-M1 VL | WO2015122922; SEQ ID | 121 | 1915 |
| | | | | NO: 31 and 39 | | |
| Ab177 | VL | PRT | 7299-M2 VL | WO2015122922; SEQ ID | 122 | 1916 |
| | | | | NO: 47 | | |
| Ab178 | VL | PRT | 7299-M5 VL | WO2015122922; SEQ ID | 122 | 1917 |
| | | | | NO: 55 | | |
| Ab179 | VL | PRT | 7299-M9 VL | WO2015122922; SEQ ID | 122 | 1918 |
| | | | | NO: 63 | | |
| Ab180 | VL | PRT | C10.2 VL - 107 | | 107 | 1919 |
| Ab181 | VL | PRT | C10.2 VL -214 | WO2017009308; SEQ ID | 214 | 1920 |
| | | | | NO: 15 | | |
| Ab182 | VL | DMA | C10.2 VL | | 321 | 1921 |
| | | | Bioinformatics | | | |
| Ab183 | VL | DNA | C10.2 VL EMBOSS | | 321 | 1922 |
| Ab184 | VL | DNA | C10.2 VL GeneInfinity | | 321 | 1923 |
| Ab185 | VL | DNA | C10.2 VL | | 321 | 1924 |
| | | | GregThatcher | | | |
| Ab186 | VL | DNA | C10.2 VL IDT | | 321 | 1925 |
| Ab181 | VL | DNA | C10.2 VL InSilico | | 321 | 1926 |
| Ab188 | VL | DNA | C10.2 VL MolBio | | 321 | 1927 |
| Ab189 | VL | DNA | C10.2 VLN2P | | 321 | 1928 |
| Ab190 | VL | DNA | C10.2 VL Snapgene | | 321 | 1929 |
| Ab191 | VL | DNA | C10.2 VL Vector NTI | | 321 | 1930 |
| Ab192 | VL | PRT | C5.2. VL | WO2017009308; SEQ ID | 214 | 1931 |
| | | | | NO: 23 | | |
| Ab193 | VL | PRT | C8.3 VL | WO2017009308; SEQ ID | 214 | 1932 |
| | | | | NO: 31 | | |
| Ab194 | VL | PRT | D1.2 VL | WO2017009.308; SEQ ID | 219 | 1933 |
| | | | | NO: 7 | | |
| Ab195 | VL | PRT | D1.2* VL | WO2017009308; SEQ ID | 219 | 1934 |
| | | | | NO: 34 | | |
| Ab196 | VL | PRT | hC10.2 VL | WO2017009308; SEQ ID | 214 | 1935 |
| | | | | NO: 36 | | |
| Ab197 | VL | DNA | IPN001 VL - 336 | U.S. Pat No. 8,980,270; | 336 | 1936 |
| | | | | SEQ ID NO: 17 | | |
| Ab198 | VL | PRT | IPN001 VL | U.S. Pat No. 8,980,270; | 112 | 1937 |
| | | | | SEQ ID NO. 13 | | |
| Ab199 | VL | PRT | IPN002 VL | WO2014028777; SEQ ID | 23 | 1938 |
| | | | | NO: 54 | | |
| Ab200 | VL | DNA | IPN002 VL - 336 | U.S. Pat No. 8,980,270; | 336 | 1939 |
| | | | | SEQ ID NO. 19 | | |
| Ab201 | VL | DNA | IPN002 VL - 714 | | 714 | 1940 |
| Ab202 | VL | PRT | IPN002 VL - 112 | U.S. Pat No. 8,980,270; | 112 | 1941 |
| | | | | SEQ ID NO: 15 | | |
| Ab203 | VL | DNA | IPN002 VL variant 1 | U.S. Pat No. 8,980,270; | 336 | 1942 |
| | | | | SEQ ID NO: 32 | | |
| Ab204 | VL | PRT | IPN002 VL variant 1 | U.S. Pat No. 8,980,270; | 112 | 1943 |
| | | | | SEQ ID NO: 40 | | |
| Ab205 | VL | DNA | IPN002 VL variant 2 | U.S. Pat No. 8,980,270; | 336 | 1944 |
| | | | | SEQ ID NO: 33 | | |
| Ab206 | VL | PRT | IPN002 VL variant 2 | U.S. Pat No. 8,980,270; | 112 | 1945 |
| | | | | SEQ ID NO: 41 | | |
| Ab207 | VL | DNA | IPN002 VL variant 3 | U.S. Pat No. 8,980,270; | 336 | 1946 |
| | | | | SEQ ID NO: 34 | | |
| Ab208 | VL | PRT | IPN002 VL variant 3 | U.S. Pat No. 8,980,270; | 112 | 1947 |
| | | | | SEQ ID NO: 42 | | |
| Ab209 | VL | DNA | IPN002 VL variant 4 | U.S. Pat No. 8,980,270; | 336 | 1948 |
| | | | | SEQ ID NO: 35 | | |
| Ab210 | VL | PRT | IPN002 VL variant 4 | U.S. Pat No. 8,980,270; | 112 | 1949 |
| | | | | SEQ ID NO: 43 | | |
| Ab211 | VL | DNA | MC1 VL - 714 | | 714 | 1950 |
| Ab212 | VL | DNA | MC1 VL - 717 | | 717 | 1951 |
| Ab213 | VL | DNA | MC1 VL - 657 | WO2016137811; SEQ ID | 657 | 1952 |
| | | | | NO: 11 | | |
| Ab214 | VL | PRT | MC1 VL - 238 | | 238 | 1953 |
| Ab215 | VL | PRT | MC1 VL - 219 | WO2016137811; SEQ ID | 219 | 1954 |
| | | | | NO: 1 | | |
| Ab216 | VL | PRT | MC1 VL - 112 | WO2016137811; SEQ ID | 112 | 1955 |
| | | | | NO: 9 | | |
| Ab217 | VL | DNA | PHF1 VL - 339v1 | | 339 | 1956 |
| Ab218 | VL | DNA | PHF1 VL - 339v2 | | 339 | 1957 |
| Ab219 | VL | DNA | PHF1 VL - 396 | | 396 | 1958 |
| Ab220 | VL | DNA | PHF1 VL - 657 | | 657 | 1959 |
| Ab221 | VL | DNA | PHF1 VL - 660 | | 660 | 1960 |
| Ab222 | VL | DNA | PHF1 VL - 678 | | 678 | 1961 |
| Ab223 | VL | DNA | PHF1 VL - 714 | | 714 | 1962 |
| Ab224 | VL | DNA | PHF1 VL - 720 | | 720 | 1963 |
| Ab225 | VL | PRT | PHF1 VL - 239 | | 239 | 1964 |
| Ab226 | VL | DNA | PHF1 VL+ (732) | | 732 | 1965 |
| Ab227 | VL | DNA | PHF1 VL+ (747) | | 747 | 1966 |
| Ab228 | VL | DNA | PT1 VL - 336 | U.S. Pat No. 9,371,376; | 336 | 1967 |
| | | | | SEQ ID NO: 32 | | |
| Ab229 | VL | PRT | PT1 VL - 112 | U.S. Pat No. 9,371,376; | 112 | 1968 |
| | | | | SEQ ID NO: 36 | | |
| Ab230 | VL | DNA | PT3 VL - 321 | U.S. Pat No. 9,371,376; | 321 | 1969 |
| | | | | SEQ ID NO: 34 | | |
| Ab231 | VL | PRT | PT3 VL - 107 | U.S. Pat No. 9,371,376; | 107 | 1970 |
| | | | | SEQ ID NO: 38 | | |
| Ab232 | VL | DNA | PT3 VL Bioinformatics | | 321 | 1971 |
| Ab233 | VL | DNA | PT3 VL Bioinformatics | | 321 | 1972 |
| | | | 2 | | | |
| Ab234 | VL | DNA | PT3 VL EMBOSS | | 321 | 1973 |
| Ab235 | VL | DNA | PT3 VL Geneinfinity | | 321 | 1974 |
| Ab236 | VL | DNA | PT3 AT Genescript | | 321 | 1975 |
| Ab237 | VL | DNA | PT3 VL IDT | | 321 | 1976 |
| Ab238 | VL | DNA | PT3 VL NUS | | 321 | 1977 |
| Ab239 | VL | DNA | PT3 VL NUS2 | | 321 | 1978 |
| Ab240 | VL | DNA | PT3 VL NUS3 | | 321 | 1979 |
| Ab241 | VL | DNA | PT3 VL Snapgene | | 321 | 1980 |
| Ab242 | VL | PRT | VL | WO2015081085; SEQ ID | 23 | 1981 |
| | | | | NO: 45 | | |
| Ab243 | Fab | PRT | AT8 Fab1 | Malia, T. J. et al, “Epitope | 18 | 1982 |
| | | | | mapping and structural basis | | |
| | | | | for the recognition of | | |
| | | | | phosphorylated tan by the | | |
| | | | | anti-tau antibody AT8”, | | |
| | | | | Proteins 84 (4), 427-434 | | |
| | | | | (2016), Accession number | | |
| | | | | 5E2V_P | | |
| Ab244 | Fab | PRT | AT8 Fab2 | Malta, T. J. et al, “Epitope | 18 | 1983 |
| | | | | mapping and structural basis | | |
| | | | | for the recognition of | | |
| | | | | phosphorylated tau by the | | |
| | | | | anti-tau antibody AT8”, | | |
| | | | | Proteins 84 (4), 427-434 | | |
| | | | | (2016), Accession number | | |
| | | | | 5E2W_P | | |
| Ab245 | Full | DNA | MC1 Furin 2A - 2168 | WO2015035190; SEQ ID | 2168 | 1984 |
| | antibody | | | NO: 2 | | |
| Ab246 | Full | PRT | MC1 Furin 2A - 718 | WO2015035190; SEQ ID | 718 | 1985 |
| | antibody | | | NO: 4 | | |
| Ab247 | Full | DNA | MC1 optimized seq | WQ2015035190; SEQ ID | 2168 | 1986 |
| | antibody | | | NO: 6 | | |
| Ab248 | Full | DNA | PHF1 Furin 2A - 2174 | W02015035190; SEQ ID | 2174 | 1987 |
| | antibody | | | NO: 1 | | |
| Ab249 | Full | PRT | PHF1 Furin 2A - 726 | W02015035190; SEQ ID | 720 | 1988 |
| | antibody | | | NO: 3 | | |
| Ab250 | Full | DNA | PHF1 optimized seq | W02015035190; SEQ ID | 2174 | 1989 |
| | antibody | | | NO: 5 | | |
| Ab251 | VH | DNA | PT3 | | 348 | 2241 |
| Ab252 | VH Constant | DNA | VH (constant - 309) | | 309 | 2242 |
| Ab253 | VH Constant | DNA | VH (constant - 291) | | 291 | 2243 |
| Ab254 | VH | DNA | PHF1 VH-435 | | 435 | 2169 |
| Ab255 | VH | DNA | PHF1 VH-408 | | 408 | 2170 |

[0352] In some embodiments, tube payload region of the AAV particle comprises a nucleic acid sequence encoding a polypeptide which is an antibody, an antibody-based composition, or a fragment thereof. As a non-limiting example, the antibody may be one or more of the polypeptides listed in Table 3, or variants or fragments thereof. As another non-limiting example, the antibody may be one or more of the heavy chain sequences listed in Table 3. As a non-limiting example, the antibody may be one or more of the light chain sequences listed in Table 3, or variants or fragments thereof.

[0353] In some embodiments, the payload region of the AAV particle comprises a nucleic acid sequence encoding a polypeptide comprising a heavy chain and a light chain sequence listed in Table 3, or variants or fragments thereof. The payload region may also comprise a linker between the heavy and light chain sequences. The linker may be a sequence known in the art or described in Table 2.

[0354] In some embodiments, the payload region of the AAV particle comprises a nucleic acid sequence encoding a polypeptide comprising a heavy chain and a light chain sequence listed in Table 3, or variants or fragments thereof, where the heavy chain sequence is from a different antibody than the light chain sequence. The payload region may also comprise a linker between the heavy and light chain sequences. The linker may be a sequence known in the art or described in Table 2.

[0355] In some embodiments, the payload region comprises, in the 5′ to 3′ direction, an antibody light chain sequence, a linker and a heavy chain sequence. In another embodiment, the linker is not used.

[0356] In some embodiments, the payload region comprises a nucleic acid sequence encoding, in the 5′ to 3′ direction, an antibody light chain sequence from Table 3, a linker from Table 2 and a heavy chain sequence from Table 3. Non-limiting examples are included in Tables 4-6 and Tables 15-91.

[0357] In some embodiments, the payload region comprises, in the 5′ to 3′ direction, an antibody heavy chain sequence, a linker region (may comprise one or more linkers) and a light chain sequence. In another embodiment, the linker is not used.

[0358] In some embodiments, the payload region comprises a nucleic acid sequence encoding, in the 5′ to 3′ direction, an antibody heavy chain sequence from Table 3, one or more linkers from Table 2, and a light chain sequence from Table 3. Non-limiting examples are included in Tables 4-6 and Tables 15-91.

[0359] In some embodiments, the payload region comprises a nucleic acid sequence encoding a single heavy chain. As a non-limiting example, the heavy chain is an amino acid sequence or fragment thereof described in Table 3.

[0360] Shown in Table 3 are a listing of antibodies and their polynucleotides and/or polypeptides sequences. These sequences may be encoded by or included in the AAV particles of the present disclosure. Variants or fragments of the antibody sequences described in Table 3 may be utilized in the AAV particles of the present disclosure.

[0361] In some embodiments, the AAV particles may comprise a viral genome, wherein one or more components may be codon-optimized. Codon-optimization may be achieved by any method known to one with skill in the art such as, but not limited to, by a method according to Genescript, EMBOSS, Bioinformatics. NUS, NUS2, Geneinfinity, IDT, NUS3, GregThatcher, Insilico, Molbio, N2P, Snapgene, and/or VectorNTI. Antibody heavy and/or light chain sequences within the same viral genome may be codon-optimized according to the same or according to different methods.

[0362] In some cases, the payload region of the AAV particles may encode one or more isoforms or variants of heavy and light chain antibody domains. Such variants may be humanized or optimized antibody domains comprising one or more complementarity determining regions (CDRs) from the heavy and light chains listed in Table 3. CDRs of the antibodies encoded by the viral genomes of the present disclosure may be 50%, 60%, 70%, 80%, 90%, 95% identical to CDRs listed in or incorporated in the sequences of Table 3. Methods of determining CDRs are well known in the art and are described herein. Payload regions may encode antibody variants with one or more heavy chain variable domain (V_{H}) or light chain variable domain (V_{L}) derived from the antibody sequences in Table 3. In some cases, such variants may include bispecific antibodies. Bispecific antibodies encoded by payload regions may comprise variable domain pairs from two different antibodies.

[0363] In some embodiments, the AAV particles may comprise a heavy and a light chain of an antibody described herein and two promoters. As a non-limiting example, the AAV particles may comprise a nucleic acid sequence of a genome as described in FIG. 1 or FIG. 2 of US Patent Publication No. US20030219733, the contents of which are herein incorporated by reference in their entirety. As another non-limiting example, the AAV particles may be a dual-promoter AAV for antibody expression as described by Lewis et al. (J. of. Virology, September 2002, Vol. 76(17), p 8769-8775; the contents of which are herein incorporated by reference in their entirety).

[0364] Payload regions of the viral genomes may encode any anti-tau antibodies, or tau-associated antibodies, not limited to those described in Table 3, including antibodies that are known in the art and/or antibodies that are commercially available. This may include fragments of such antibodies or antibodies that have been developed to comprise one or more of such fragments [e.g., variable domains or complementarity determining regions (CDRs)]. Anti-tau antibodies that may be encoded by payloads include, but are not limited to, AT8 (pSer²⁰²/pThr²⁰⁵; ThermoFisher, Waltham, Mass.; described in International Publication No. WO1995017429, the contents of which are herein incorporated in their entirety), AT100 (pThr²¹²/pSer²¹⁴; ThermoFisher, Waltham, Mass.; described in U.S. Pat. No. 6,121,003, the contents of which are herein incorporated in their entirety), AT180 (pThr²³¹; ThermoFisher, Waltham, Mass.; described in International Publication No. WO1995017429, the contents of which are herein incorporated by reference in their entirety), MC-1 (or MC1) (Tau^{2-18/312-342} conformational antibody; as described in international Publication WO199620218, the contents of which are herein incorporated by reference in their entirety), MC-6 (pSer²³⁵; described in U.S. Pat. No. 5,811,310, the contents of which are herein incorporated in their entirety). TG-3 (pThr²³¹; described in Jicha, G A et al., 1997 J Neurochem 69(5):2087-95, the contents of which are herein incorporated by reference in their entirety), CP13 (pSer²⁰²), CP27 (human Tau¹³⁰⁻¹⁵⁰), Tau12 (human Tau⁹⁻¹⁸; Abcam, Cambridge, Mass.), TG5 (Tau²²⁰⁻²⁴²; described in U.S. Pat. No. 5,811,310), DA9 (Tau¹⁰²⁻¹⁴⁰; described in U.S. Pat. No. 5,811,310), PHF1 (or PHF-1) (pSer³⁹⁶/pSer⁴⁰⁴; described in International Publication WO199620218), Alz50 (Tau⁷⁻⁹ and Tau³¹²⁻³⁴² conformational epitope; described in U.S. Pat. No. 5,811,310 and Carmel, G et al 1996 J Biol Chem 271(51):32780-32795 and Jicha, G A et al, 1997 J Neurosci Res 48(2):128-132, the contents of each of which are herein incorporated by reference in their entirety). Tau-1 (de-phosphorylated Ser¹⁹⁵/Ser¹⁹⁸/Ser¹⁹⁹/Ser²⁰²; ThermoFisher, Waltham, Mass.), Tau46 (Tau⁴⁰⁴⁻⁴⁴¹; Abcam, Cambridge, Mass.), pS199 (ThermoFisher, Waltham, Mass.), pT205, pS396 (ThermoFisher, Waltham, Mass.; described in U.S. Pat. No. 8,647,631, the contents of which are herein incorporated by reference in their entirety), pS404 (ThermoFisher, Waltham, Mass.; described in U.S. Pat. No. 8,647,631, the contents of which are herein incorporated by reference in their entirety), pS422 (ThermoFisher, Waltham, Mass.), A0024 (hTau²⁴³⁻⁴⁴¹; Dako, Glostrup, Denmark), HT7 (hTau¹⁵⁹⁻¹⁶³; ThermoFisher, Waltham, Mass.), Tau2 (hTau⁵²⁻⁶⁸; Abcam, Cambridge, Mass.), AD2 (pSer³⁹⁶/pSer⁴⁰⁴; Bio-Rad Laboratories, Hercules, Calif.), AT120 (hTau²¹⁶⁻²²⁴; described in U.S. Pat. No. 5,843,779, the contents of which are herein incorporated by reference in their entirety), AT270 (pThr¹⁸¹; ThermoFisher, Waltham, Mass.), 12E8 (pSer²⁶² and/or Ser³⁵⁶), K9JA (hTau²⁴³⁻⁴⁴¹; Dako, Caprinteria, Calif.), TauC3 (hTau Asp441; Santa Cruz Biotechnology, Dallas, Tex.; described in United States Patent Publication US20120244174 and Gamblin, T C et al 2003 PNAS 100(17):10032-7, the contents of each of which are herein incorporated by reference in their entirety). 4E6G7 (pSer³⁹⁶/pSer⁴⁰⁴; described in United States Patent Publication No. US2010316564 and Congdon, E. E. et al., 2016. Molecular Neurodegeneration August 30; 11(1):62, the contents of which are herein incorporated by reference in their entirety), 6B2 and variants thereof, described in International Patent Publication WO2016007414, the contents of which are herein incorporated by reference in their entirety. RZ3 (pThr²³¹), PG5 (pSer⁴⁰⁹), BT2 (pS^{199/202}), DA31 (Tau¹⁵⁰⁻¹⁹⁰), CP9 (pThr²³¹) Ta1505 (phospho site between Tau⁴¹⁰⁻⁴²¹, particularly pSer⁴¹³ as described in United States Patent Publication US20150183854 and Umeda, T. et al., 2015. Ann Clin Trans Neurol 2(3): 241-255, the contents of each of which are herein incorporated by reference in their entirety), PHF-6 (pThr²³¹, as described in Hoffman R et al., 1997. Biochemistry 36:8114-8124, the contents of which are herein incorporated by reference in their entirety), PHF-13 (pSer³⁹⁶, as described in Hoffman R et al., 1997. Biochemistry 36; 8114-8124), 16B5 (Tau²⁵⁻⁴⁶, as described in United States Publication US20160031976, the contents of which are herein incorporated by reference in their entirety), DC8E8 (as described in United States Patent Publication US20150050215, the contents of which are herein incorporated by reference in their entirety), PT1 or PT3 (as described in U.S. Pat. No. 9,371,376, the contents of which are herein incorporated by reference in their entirety), 4G11 (Tau⁵⁴⁻⁶⁴, as described in International Publication WO2016137950, the contents of which are herein incorporated by reference in their entirety). 1A6 (Tau⁷⁻¹⁷ and Tau²¹⁵⁻²²⁰, as described in International Publication WO2016137950), Tau15 or Tau81 (as described in International Publication WO2016055941, the contents of which are herein incorporated by reference in their entirety), TOC-1 (dimerized or aggregated tau, as described in International Publication WO2012149365, the contents of which are herein incorporated by reference in their entirety), pS4041gG2a/k (Neotope Biosciences, South San Francisco, Calif.; as described in Ittner et al., 2015. Neurochemistry 132:135-145, the contents of which are herein incorporated by reference in their entirety), TOMA (tau oligomer monoclonal antibody; as described in U.S. Pat. Nos. 8,778,343 and 9,125,846, International Publications WO2012051498 and WO2011026031, or United States Publication Nos. US20150004169 and US20150322143, and Castillo-Carranza, D L et al., 2014 J Neurosci 34(12)4260-72, the contents of each of which are herein incorporated by reference in their entirety), TTC-99 (oligomeric tau), BMS-986168 (as described in United States Patent Publication US2014294831, International Publication WO2015081085 and U.S. Pat. No. 8,980,271, the contents of which are herein incorporated by reference in their entirety), 3H3 (pan-amyloid epitope; described in Levites, Y et al 2015 J Neurosci 35(16)6265-76, the contents of which are herein incorporated by reference in their entirety), cis-pT231 (described in International Publications WO2012149334 and WO2011056561, the contents of which are herein incorporated by reference in their entirety), CP-3 (pSer²¹⁴; described in Jicha et al 1999 J Neurosci 19(17):7486-94, the contents of which are herein incorporated by reference in their entirety). TNT1 (Tau²⁻¹⁸; as described in United States Patent Publication 20160031978, the contents of which are herein incorporated by reference in their entirety), Tau-nY29 (nTyr²⁹; described in Reynolds M R, et al., 2006 J Neurosci 26(42):10636-45, the contents of which are herein incorporated by reference in their entirety), Tau-nY197 (nTyr¹⁹⁷; described in Reyes, J F et al., 2012 Acta Neuropathol 123(1):119-32, the contents of which are herein incorporated by reference in their entirety), Tau-nY394 (nTyr³⁹⁴; described in Reyes, J F et al 2012), 4E4 (Tau³³⁷⁻³⁴³ Tau³⁸⁷⁻³⁹⁷; described in International Publication WO2012049570 and United States Patent Publication US20150252102, the contents of each of which are herein incorporated by reference in their entirety), ADx210 (described in United States Patent Publication US20140161875, the contents of which are herein incorporated by reference in their entirety), ADx215 (described in United States Patent Publication US20140161875), ADx202 (as described in International Publication WO2015004163, the contents of which are herein incorporated by reference in their entirety), AP422 (pSer⁴²²; described in Hasegawa, M et al 1996 FEBS Lett 384:25-30, the contents of which are herein incorporated by reference in their entirety), Tau5 (Tau²¹⁰⁻²⁴¹), RTA2 (Tau²⁷³⁻²⁸³), RTAC (Tau⁴²⁶⁻⁴⁴¹), RTA1 (Tau²⁵⁷⁻²⁷⁴), T46 (Tau³⁹⁴⁻⁴³²), T49, MIGT4, O.BG.15, 525, 3-39, 4F1, MapTau (Tau⁹⁴⁻¹⁰⁸; SMI Covance), T1, HYB33801 (Tau⁵⁻¹²), Tau13 (Tau²⁻¹⁸), B11E8, 5J20 (14-3-3 tau), DC25 (Tau³⁴⁷⁻³⁵³), DC39N1 (Tau⁴⁵⁻⁷³), DC-11 (Tau³²¹⁻³⁹¹; described in U.S. Pat. No. 7,746,180, the contents of which are herein incorporated by reference in their entirety), DC39 (Tau⁴⁰¹⁻⁴¹¹), DC4R, n847 (nitrated tau), SPM452, T14. 1E1/A6 (Tau²⁷⁵⁻²⁹¹), 5E2, 8E6/C11 (Tau²⁰⁹⁻²²⁴), 2E12 (pT231), NFT200, 248E5 (Tau³⁻²¹⁴), IG2 (Thr¹⁷⁵, Thr¹⁸¹, Thr²³¹; as described in International Publication WO2016041553, the contents of which are herein incorporated by reference in their entirety), YP3 (as described in WO2007019273, the contents of which are herein incorporated by reference in their entirety), YP4 (as described in WO2007019273) and 14-3-3 Tau (pSer 14-3-3 binding motif; Abcam, Cambridge, Mass.). Further, anti-tau antibodies may be any of those listed in the antibody section of Alzforum.org or at the Antibody Resource Page.com, the contents of each of which are herein incorporated by reference in their entirety. Further, anti-tau antibodies may be any commercially available anti-tau antibody. Additional antibodies may include any of those taught in Petry, F. R. et al., 2014. PLoS One 9(5): e94251, the contents of which are herein incorporated by reference in their entirety. In one example, such antibodies may include any of those described in Jicha, G. A. et al., 1997. Journal of Neuroscience Research 48:128-132, the contents of which are herein incorporated by reference in their entirety. One such antibody, MC-1 (or MC1), recognizes distinct conformations of tau that are associated with neurological disease.

[0365] In some embodiments, the AAV particles may have a payload region comprising any of the anti-tau antibodies as described in International Publication WO2017189963, the contents of which are herein incorporated by reference in their entirety. As a non-limiting example, the payload region may comprise one or more of the anti-tau antibodies as described in Table 3 of International Publication WO2017189963. In some embodiments, the payload region encodes one or more anti-tau antibodies selected from SEQ ID NO: 2948-4269 as described in WO2017189963.

[0366] In some embodiments, payloads may encode anti-tau antibodies (or fragments thereof) taught in United States Publication No. US2014294831, the contents of which are herein incorporated by reference in their entirety. Such antibodies may include IPN001 and/or IPN002 antibodies or fragments of such antibodies. In some cases, variable domains of IPN002 as presented in FIGS. 2A and 2B of US2014294831 may be used (e.g., incorporated into another antibody). In some cases, CDR regions of IPN002 as underlined in FIGS. 2A and 2B may be used (e.g., incorporated into another antibody or used to prepare humanized versions of IPN002). In some cases, anti-tau antibodies may include any of the IPN001 or IPN002 antibody variants taught in US2014294831 (e.g., in FIGS. 9-16 of that publication). In some embodiments, this antibody is also referred to as BMS-986168.

[0367] In some cases, payloads may encode anti-tau antibodies (or fragments thereof) taught in Otvos, L. et al., 1994. J Neurosci. Res 39(6):669-73, the contents of which are herein incorporated by reference in their entirety. Such antibodies may include monoclonal antibody PHF-1 or fragments thereof. The PHF-1 antibody binds to tau paired helical filaments, a pathological conformation of tau, found in certain neurological disorders, including Alzheimer's disease. Further, antibody affinity is increased when either serine 396 or serine 404 of tau is phosphorylated and even further increased when both are phosphorylated.

[0368] In some embodiments, payloads may encode anti-tau antibodies (or fragments thereof) taught in U.S. Pat. No. 5,811,310, the contents of which are herein incorporated by reference in their entirety. Such embodiments may include monoclonal antibodies PHF-1 or MC1 or fragments thereof. MC1 is a conformational antibody binding to the epitopes presented in Jicha, G. A., et al., 1997. J Neurosci Res 48(128-132).

[0369] In some embodiments, payloads may encode anti-tau antibodies (or fragments thereof) taught in International Publication Number WO2015035190, the contents of which are herein incorporated by reference in their entirety. Such embodiments may include, but are not limited to, antibodies PHF-1 or MC1 or fragments thereof. Viral genomes of the AAV particles of the present disclosure may comprise or encode any of SEQ ID NO: 1-6 of WO2015035190.

[0370] In some embodiments, viral genomes may encode anti-tau antibody MC1 scFv as described in Vitale et al 2018, (Acta Neuropath Commun. 6:82) the contents of which are herein incorporated by reference in their entirety.

[0371] In some embodiments, viral genomes may encode anti-tau antibody MC1 as described in International Publication WO2016137811, the contents of which are herein incorporated by reference in their entirety.

[0372] Anti-tau antibodies (or fragments thereof) encoded by viral genomes may include antibodies that bind to one or more of the epitopes presented in Otvos, L. et al., 1994. J Neurosci. Res 39(6):669-73 (e.g., any of those presented in Table 1 of that publication).

[0373] In some embodiments, payloads may encode anti-tau antibodies (or fragments thereof) taught in U.S. Pat. No. 7,746,180, the contents of which are herein incorporated by reference in their entirety. Such embodiments may include antibody DC-11 or fragments thereof.

[0374] In some embodiments, the antibodies encoded by the viral genomes of the present disclosure may target any of the antigenic regions or epitopes described in United States Patent Publication No US2008050383 or US20100316564, the contents of which are herein incorporated by reference in their entirety. In some embodiments, the antibody targets pS396/pS404. Such embodiments may include antibody 4E6 and/or variants or fragments thereof. The affinity of antibody 4E6 for soluble PHF and its ability to reduce soluble phospho tau has been described in Congdon, E. E. et al., 2016. Molecular Neurodegeneration August 30; 11(1):62, the contents of which are herein incorporated by reference in their entirety.

[0375] In some embodiments, the antibodies encoded by the viral genomes of the present disclosure may target any of the antigenic regions or epitopes described in International Patent Publication WO1998022120, the contents of which are herein incorporated by reference in their entirety. In some embodiments, the antibody may be PHF-6 (pT231), or fragments or variants thereof. In another embodiment, the antibody may be PHF-13 (pS396), or a fragment of variant thereof. These antibodies are further described in Hoffman et al., 1997. Biochemistry 36: 8114-8124, the contents of which are herein incorporated by reference in their entirety.

[0376] In some embodiments, the antibodies encoded by the viral genomes of the present disclosure may target any of the antigenic regions or epitopes described in International Publication WO2016126993, the contents of which are herein incorporated by reference in their entirety. The antibodies may be derived from any of the tau epitopes described in Table A of WO2016126993. In some embodiments, the antibody of the present disclosure may comprise any of the sequences listed in Table B or Table 1 of WO2016126993.

[0377] In some embodiments, the antibodies encoded by the viral genomes of the present disclosure may target any of the antigenic regions or epitopes described in United States Patent Publication US20120244174, the contents of which are herein incorporated by reference in their entirety. In some embodiments, the antibody may bind to caspase-cleaved tau. In some embodiments, the epitope for antibodies targeting caspase cleaved tau is aspartic acid 421. In another embodiment, the epitope for antibodies targeting caspase cleaved tau may be the C-terminus after glutamic residue Glu391. In yet another embodiment, the epitope for antibodies targeting caspase cleaved tau may be at the N-terminus at aspartic acid residue 13. In another embodiment, the antibody may be TauC3.

[0378] In some embodiments, the antibodies encoded by the viral genomes of the present disclosure may target any of the antigenic regions or epitopes described in United States Patent Publication US20160031978, the contents of which are herein incorporated by reference in their entirety. In some embodiments, the antibody may bind to tau N-terminal residues associated with the PP1/GSK3 signaling cascade. In some embodiments, the antibody may be TNT1.

[0379] In some embodiments, the antibodies encoded by the viral genomes of the present disclosure may be any of those described in d'Abramo, C et al., 2015. PLOS One 10(8):e0135774, the contents of which are herein incorporated by reference in their entirety. In some embodiments, the antibody may be CP13 (pS202), or a fragment or variant thereof. In another embodiment, the antibody may be RZ3 (pT231), or a fragment or variant thereof. In another embodiment, the antibody may be PG5 (pS409), or a fragment or variant thereof.

[0380] Anti-tau antibodies or fragments thereof encoded by the viral genomes of the present disclosure may target tau in any antigenic form. As non-limiting examples, antigenic tau may be an unphosphorylated or unmodified tau protein, a phosphorylated or otherwise post-translationally modified tau protein (0-GlnAcylated, or nitrosylated), an oligomeric species of tau protein, a soluble species of tau protein, an insoluble species of tau protein, a conformationally abnormal species of tau protein, a neuropathological form of tau protein and/or a neurofibrillary tangle or a precursor thereof.

[0381] Anti-tau antibodies or fragments thereof encoded by the viral genomes, may target any antigenic region or epitope along the full length of any of the six human tau protein isoforms. As non-limiting examples, the targeted antigenic peptides of the tau protein may be any of the following phosphorylated sites pT50, pS396, pS396-pS404, pS404, pS396-pS404-pS422, pS409, pS413, pS422, pS198, pS199, pS199-pS202, pS202, pT205, pT212, pS214, pT212-pS214, pT181, pT231, cis-pT231, pS235, pS238, pT245, pS262, pY310, pY394, pS324, pS356, pTau¹⁷⁷⁻¹⁸⁷, pY18, pS610, pS622, nitrosylated tau (nY18, nY29), methylated tau (di-meK281, dimeK311), O-GlnAcylated tau at S400, any of the following acetylated sites acK174, acK274, acK280, acK281 and/or any combination thereof. Acetylated tau proteins and associated antigenic peptides are described in Min et al., 2010, Neuron., 67, 953-966, Min et al., 2015, Nature Medicine., 10, 1154-1162, Cohen et al., 2011, Nature Communications., 2, 252, Gorsky et al., 2016, Scientific Report., 6, 22685, Tracy et al., 2016, Neuron., 90, 245-260, the contents of each of which are herein incorporated by reference in their entirety. Phosphorylated tau proteins and associated antigenic peptides are described in Asuni et al., 2007. J Neurosci., 27, 9115-9129. Boutajangout et al., 2010. J Neurosci., 30, 16559-16566, Boutajangout et al., 2011, J Neurochem., 118, 658-667. Chai et al., 2011, J Biol Chem., 286, 34457-34467, Gu et al., 2011, J Biol Chem., 288, 33081-33095, Sankaranarayanan et al., 2015, PloS One, 10, e0125614, Ittner et al., 2015, J Neurochem., 132, 135-145, D'Abramo et al., 2016, Neurobiol Aging., 37, 58-65, Collin et al., 2014, Brain., 137, 2834-2846, Kondo et al., 2015, Nature., 523, 431-436, the contents of each of which are herein incorporated by reference in their entirety.

[0382] In some embodiments, the antibody encoded by the viral genomes of the present disclosure may be a pS409 targeting antibody as described in Lee et al., 2016, Cell Reports, 16, 1690-1700, or International Patent Publication WO2013151762, the contents of each of which am herein incorporated by reference in their entirety. In some embodiments, this antibody may be RG6100 or R071057 or variants or fragments thereof.

[0383] In some embodiments, the antibody encoded by the viral genomes of the present disclosure may be a pS413 targeting antibody as described in Umeda et al., 2015, Ann Clin Trans Neurol., 2(3), 241-255 or International Patent Publication WO2013180238, the contents of each of which are herein incorporated by reference in their entirety. In some embodiments, the antibody is Ta1505 or variants or fragments thereof.

[0384] In some embodiments, the antibody encoded by the viral genomes of the present disclosure may target a tau epitope with amino acid residues 210-275, more specifically pS238 and/or pT245, as described in International Publication WO2011053565, the contents of which are herein incorporated by reference in their entirety.

[0385] In some embodiments, the CDRs of an antibody encoded by the viral genomes of the present disclosure may be any of those listed in or incorporated in the antibody sequences of Table 3. In some embodiments, the CDRs may be any of those described in International Publication WO2015122922, the contents of which are herein incorporated by reference in their entirety. In some embodiments, a CDR may be any of those chosen from the group of SEQ ID NO: 41, 49, or 57 of WO2015122922. Further a CDR of an antibody encoded by the viral genomes of the present disclosure may have 50%, 60%, 70%, 80%, 90%, or 95% identity to SEQ ID NO: 41, 49, or 57 of WO2015122922.

[0386] In some embodiments, the antibodies encoded by the viral genomes of the present disclosure may be any of those described in International Publication WO2016097315, the contents of which are herein incorporated by reference in their entirety. In some embodiments, the antibody may have an amino acid sequence as shown by SEQ ID NO: 2, 11, 20, 29, 38, 47, 56, 65, 74, 83, 92, 101, 110, 119, 128, 137, 146, 155, 164, 173, 182, 191, 209, 218, 226, or 227 of WO2016097315.

[0387] In some embodiments, the antibodies encoded by the viral genomes of the present disclosure may be a multispecific blood brain barrier receptor antibody that also targets tau, as described in International Publication WO2016094566, the contents of which are herein incorporated by reference in their entirety. In some embodiments, the antibody may have a sequence as shown by SEQ ID NO: 1, 2, 17, 18, 33, 34, 49, 50, 65, 66, 81, 82, 9-16, 25-32, 41-48, 57-64, 73-80, 89-96 of WO2016094566.

[0388] In some embodiments, the antibodies (or fragments thereof) encoded by the viral genomes of the present disclosure may be any of those taught in U.S. Pat. Nos. 8,778,343 and 9,125,846, International Publications WO2012051498 and WO2011026031, or United States Publication Nos. US20150004169 and US20150322143, the contents of each of which are herein incorporated by reference in their entirety. Such antibodies may include those that bind to oligomeric species of tau. Further, such an antibody may be referred to as TOMA (tau oligomer monoclonal antibody), as described in Castillo-Carranza et at (Castillo-Carranza, D L et al., 2014 J Neurosci 34(12)4260-72) the contents of which are herein incorporated by reference in their entirety. In some embodiments, the antibody that binds oligomeric tau may be TTC-99.

[0389] In some embodiments, the antibodies (or fragments thereof) encoded by the viral genomes of the present disclosure may be any of those taught in International Publications WO2014059442, the contents of which are herein incorporated by reference in their entirety. Such antibodies may include those that bind to oligomeric species of tau.

[0390] In some embodiments, the antibodies (or fragments thereof) encoded by the viral genomes of the present disclosure may be any of those taught in the International Publications WO2014008404 and WO2016126993, United States Patent Publication US20150183855, Yanamandra, K et al., 2013 Neuron 80(2):402-14 and Yanamandra, K et al 2015 Ann Clin Transl Neurol 2(3):278-88, the contents of each of which are herein incorporated by reference in their entirety. Such antibodies may block tau seeding. Non-limiting examples of antibodies described in these publications include HJ8.1.1, HJ8.1.2, HJ8.2, HJ8.3, HJ8.4, HJ8.5, HJ8.7, HJ8.8, HJ9.1, HJ9.2, HJ9.3, HJ9.4, HJ9.5, and variants thereof. Non-limiting examples of targeted epitopes of tau may include amino acids 22-34, 385-391, 405-411, 3-6, 118-122, 386-401, 7-13, and/or 272-281 of human tau.

[0391] In some embodiments, the antibodies (or fragments thereof) encoded by the viral genomes of the present disclosure may be any of those taught in the International Publications WO2002062851, the contents of which are herein incorporated by reference in their entirety.

[0392] In some embodiments, the antibodies (or fragments thereof) encoded by the viral genomes of the present disclosure may be as described in Bright, J et al., 2015 Neurobiol of Aging 36:693-709; Pedersen, J T and Sigurdsson E M, 2015 Trends Mol Med 21(6):394-402; Levites, Y et al 2015 J Neurosci 35(16)6265-76; Jicha et al 1999 J Neurosci 19(17):7486-94; Reyes J F et al., 2012 Acta Neuropathol 123(1):119-32; Reynolds M R, et al., 2006 J Neurosci 26(42):10636-45; Gamblin, T C et al 2003 PNAS 100(17):10032-7; Castillo-Carranza, D L et al., 2014 J Neurosci 34(12)4260-72; Walls, K C et al., 2014 Neurosci Lett 575:96-100; Yanamandra, K et al., 2013 Neuron 80(2):402-14; Yanamandra, K et al 2015 Ann Clin Transl Neurol 2(3):278-88: Allen B. et al., 2002 J Neurosci 22(21):9340-51: Gotz, J et al., 2010 Biochem Biophys Acta 1802(10):860-71; Hasegawa, M et al 1996 FEBS Lett 384:25-30; Carmel, G et al 1996 J Biol Chem 271(51):32780-32795; Jicha, G A et al, 1997 J Neurosci Res 48(2):128-132; Jicha, G A et al., 1997 J Neurochem 69(5):2087-95; the contents of each of which are herein incorporated by reference in their entirety.

[0393] Anti-tau antibodies or fragments thereof encoded by the viral genomes of the present disclosure may be any commercially available anti-tau antibody known in the art or developed by a person with skill in the art. Non-limiting examples of commercially available anti-tau antibodies include EPR2396(2) (pThr⁵⁰; Abeam, Cambridge, Mass.), 5H911 (pThr¹⁸³; ThermoFisher, Waltham, Mass.), M7004D06 (pThr¹⁸¹; BioLegend, San Diego, Calif.), 1E7 (pThr¹⁸¹; EMD Millipore, Billerica, Mass.), EPR2400 (pSer¹⁹⁸; Abcam, Cambridge, Mass.), EPR2401Y (pSer¹⁹⁹; Abcam, Cambridge, Mass.), 2H23L4 (pSer¹⁹⁹; ThermoFisher, Waltham, Mass.), EPR2402 (pSer²⁰²; Abcam, Cambridge, Mass.), 10F8 (pSer²⁰²; Abcam, Cambridge, Mass.), EPR2403(2) (pThr²⁰⁵; Abcam, Cambridge, Mass.), EPR1884(2) (pSer²¹⁴; Abcam, Cambridge, Mass.), EPR2488 (pThr²³¹; Abcam, Cambridge, Mass.), 1H6L6 (pThr²³¹; ThermoFisher, Waltham, Mass.), 3G3 (pThr²³¹, pSer²³⁵; Abeam, Cambridge, Mass.), EPR2452 (pSer²³⁵; Abcam, Cambridge, Mass.), 12G10 (pSer²³⁹; Abcam, Cambridge, Mass.), EPR2454 (pSer²⁶²; Abcam, Cambridge, Mass.), EPR2457(2) (pSer³²⁴; Abcam, Cambridge, Mass.), EPR2603 (pSer³⁵⁶; Abcam, Cambridge, Mass.), EPR2731 (pSer³⁹⁶; Abcam, Cambridge, Mass.), EPR2605 (pSer⁴⁰⁴; Abcam, Cambridge, Mass.), EPR2866 (pSer⁴²²; Abcam, Cambridge, Mass.), 1A4 (pTau¹⁷⁷⁻¹⁸⁷; Origene, Rockville, Md.), 7G9 (pTau¹⁷⁷⁻⁸⁷; Origene, Rockville, Md.), 9B4 (pTau¹⁷⁷⁻¹⁸⁷; Origene, Rockville, Md.), 2A4 (pTau¹⁷⁷⁻¹⁸⁷; Origene, Rockville, Md.), 9G3 (pTyr¹⁸; NovusBio, Littleton, Colo.), EPR2455(2) (pSer⁶¹⁰; Abcam, Cambridge, Mass.), EP2456Y (pSer⁶²²; Abcam, Cambridge, Mass.; EMD Millipore, Billerica, Mass.), SMI 51 (PHF Tau⁹⁵⁻¹⁰⁸; BioLegend, San Diego, Calif.), TOMA-1 (Oligomeric Tau; EMD Millipore, Billerica, Mass.), Tau-nY18 (nTyr¹⁸; Origene, Rockville, Md.; BioLegend, San Diego, Calif.; EMD Millipore, Billerica, Mass.), Tau-nY29 (nTyr²⁹; BioLegend, San Diego, Calif.; EMD Millipore, Billerica, Mass.; Abcam, Cambridge, Mass.), 1C9.G6 (di-methyl-Lys²⁸¹; BioLegend, San Diego, Calif.), 7G5.F4 (di-methyl-Lys³¹¹; BioLegend, San Diego, Calif.), TNT-1 (Tau²⁻¹⁸; EMD Millipore, Billerica, Mass.), TNT-2 (Tau²⁻¹⁸; EMD Millipore. Billerica, Mass.). 7B8 (Tau⁵⁻¹²; Abcam, Cambridge, Mass.), Tau-13 (Tau²⁰⁻³⁵; BioLegend, San Diego, Calif.), 1-100 (Tau¹⁻¹⁰⁰; BioLegend, San Diego, Calif.), 2G9.F10 (Tau¹⁵⁷⁻¹⁶⁸; BioLegend, San Diego, Calif.; Origene, Rockville, Md.), 39E10 (Tau¹⁸⁹⁻¹⁹⁵; BioLegend, San Diego, Calif.; Origene, Rockville, Md.), 77E9 (Tau¹⁸⁵⁻¹⁹⁵; BioLegend, San Diego, Calif.; Origene, Rockville, Md.), AT8 (pSer²⁰², pThr²⁰⁵; ThermoFisher, Waltham, Mass.), AT100 (pThr²²¹, pSer²¹⁴; ThermoFisher, Waltham, Mass.), PHF-6 (pThr²³¹; NovusBio, Littleton, Colo.; EMD Millipore, Billerica, Mass.; BioLegend, San Diego, Calif.; ThermoFisher, Waltham, Mass.), AT180 (pThr²³¹; ThermoFisher, Waltham, Mass.), AT270 (pThr¹⁸¹; ThermoFisher, Waltham, Mass.), PHF-13 (pSer³⁹⁶; ThermoFisher, Waltham, Mass.; BioLegend, San Diego, Calif.), TauC3 (Asp⁴²¹; BioLegend, San Diego. Calif.; EMD Millipore, Billerica, Mass.; ThermoFisher, Waltham, Mass.), Tau12 (Tau⁶⁻¹⁸; BioLegend, San Diego, Calif.; EMD Millipore, Billerica, Mass.), Tau5 (Tau²¹⁰⁻²⁴¹; BioLegend, San Diego, Calif.; EMD Millipore, Billerica, Mass.; Abcam, Cambridge Mass.; ThermoFisher, Waltham, Mass.), HT7 (Tau¹⁵⁹⁻¹⁶³; ThermoFisher, Waltham, Mass.), 77G7 (Tau³¹⁶⁻³⁵⁵; BioLegend, San Diego, Calif.), Tau46 (Tau⁴⁰⁴⁻⁴⁴¹; BioLegend, San Diego, Calif.; NovusBio, Littleton, Colo.; Abcam, Cambridge, Mass.), UMAB239 (Tau⁶²³⁻⁷⁵⁸; Origene, Rockville, Md.), OTI16G3 (Tau⁶²³⁻⁷⁵⁸; Origene, Rockville, Md.), OTI13E11 (Tau⁶²³⁻⁸⁰⁰; Origene, Rockville, Md.), OTI13B5 (Tau⁶²³⁻⁷⁵⁸; Origene, Rockville, Md.), E178 (Tau⁷⁰⁰⁻⁸⁰⁰; Abcam, Cambridge, Mass.), SP70 (N-terminal Tau; Origene, Rockville, Md.; NovusBio, Littleton, Colo.; ThermoFisher, Waltham, Mass.; Abcam, Cambridge, Mass.), C45 (N-terminal Tau; Origene, Rockville, Md.), Tau7 (C-terminal Tau; EMD Millipore, Billerica, Mass.), S.125.0 (C-terminal Tau; ThermoFisher, Waltham, Mass.), 8E6/C11 (Three-repeat Tau²⁰⁹⁻²²⁴; EMD Millipore, Billerica, Mass.), 1E1/A6 (Four-repeat Tau²⁷⁵⁻²⁹¹; EMD Millipore, Billerica, Mass.), 7D12.1 (Four-repeat Tau²⁷⁵⁻²⁹¹; EMD Millipore. Billerica, Mass.), 5C7 (Four-repeat Tau²⁶⁷⁻²⁷⁸; BioLegend, San Diego, Calif.; Origene, Rockville, Md.), 5F9 (Four-repeat Tau²⁷⁵⁻²⁹¹; BioLegend, San Diego, Calif.; Origene, Rockville, Md.), 3H6.H7 (0N Tau³⁹⁻⁵⁰; BioLegend, San Diego, Calif.; Origene, Rockville, Md.), 4H5.B9 (1N Tau⁶⁸⁻⁷⁹; BioLegend, San Diego, Calif.; Origene, Rockville, Md.), 71C11 (2N Tau; BioLegend, San Diego, Calif.), PC1C6 (unphosphorylated tau; EMD Millipore, Billerica, Mass.), Tau2 (BioLegend, San Diego, Calif.; Origene, Rockville, Md.; EMD Millipore, Billerica, Mass.), 2E9 (Origene, Rockville, Md.; NovusBio, Littleton, Colo.), 4F1 (Origene, Rockville, Md.; NovusBio, Littleton, Colo.), 5B10 (NovusBio, Littleton, Colo.); 5E2 (EMD Millipore, Billerica, Mass.), Tau-93 (Origene, Rockville, Md.), T14 (ThermoFisher, Waltham, Mass.), T46 (ThermoFisher, Waltham, Mass.), BT2 (ThermoFisher, Waltham, Mass.) and/or variants or derivates thereof.

[0394] In some embodiments, the antibodies encoded by the viral genomes of the present disclosure may be multispecific antibodies for transferrin receptor and a brain antigen, wherein the brain antigen may be tau, as described in International Publication WO2016081643, the contents of which are herein incorporated by reference in their entirety. In some embodiments, the antibody may have a sequence as given by SEQ ID NO: 160 or 161 of WO2016081643.

[0395] In some embodiments, the antibodies encoded by the viral genomes of the present disclosure are any of those described in U.S. Pat. Nos. 8,871,447, 8,420,613, International Publication No. WO2014193935, WO2010011999, or in United States Publication Nos. US20110250217, US20110020237, US20100316590, or US20120225864, the contents of each of which are herein incorporated by reference in their entirety. In some embodiments, the antibody recognizes a misfolded, amyloidogenic or aggregating protein.

[0396] In some embodiments, the viral genome of the AAV particle of the present disclosure encodes anti-tau antibody PT3, or a fragment or variant thereof.

[0397] In some embodiments, the viral genome of the AAV particle of the present disclosure encodes anti-tau antibody AT8, or a fragment or variant thereof.

[0398] In some embodiments, the viral genome of the AAV particle of the present disclosure encodes anti-tau antibody IPN002, or a fragment or variant thereof.

[0399] In some embodiments, the viral genome of the AAV particle of the present disclosure encodes anti-tau antibody MC1, or a fragment or variant thereof.

[0400] In some embodiments, the viral genome of the AAV particle of the present disclosure encodes anti-tau antibody PHF1, or a fragment or variant thereof.

[0401] In some embodiments, the viral genome of the AAV particle of the present disclosure encodes anti-tau antibody CP13, or a fragment or variant thereof.

[0402] In some embodiments, the viral genome of the AAV particle of the present disclosure encodes anti-tau antibody C10.2, or a fragment or variant thereof.

[0403] In some embodiments, the viral genome of the AAV particle of the present disclosure encodes anti-tau antibody PHF-13, or a fragment or variant thereof.

[0404] In some embodiments, the viral genome of the AAV particle of the present disclosure encodes anti-tau antibody PHF-6, or a fragment or variant thereof.

### The Nature of the Polypeptides and Variants

[0405] Antibodies encoded by payload regions of the viral genomes may be translated as a whole polypeptide, a plurality of polypeptides or fragments of polypeptides, which independently may be encoded by one or more nucleic acids, fragments of nucleic acids or variants of any of the aforementioned. As used herein, “polypeptide” means a polymer of amino acid residues (natural or unnatural) linked together most often by peptide bonds. The term, as used herein, refers to proteins, polypeptides, and peptides of any size, structure, or function. In some instances, the polypeptide encoded is smaller than about 50 amino acids and the polypeptide is then termed a peptide. If the polypeptide is a peptide, it will be at least about 2, 3, 4, or at least 5 amino acid residues long. Thus, polypeptides include gene products, naturally occurring polypeptides, synthetic polypeptides, homologs, orthologs, paralogs, fragments and other equivalents, variants, and analogs of the foregoing. A polypeptide may be a single molecule or may be a multi-molecular complex such as a dimer, trimer or tetramer. They may also comprise single chain or multichain polypeptides and may be associated or linked. The term polypeptide may also apply to amino acid polymers in which one or more amino acid residues are an artificial chemical analogue of a corresponding naturally occurring amino acid.

[0406] The term “polypeptide variant” refers to molecules which differ in their amino acid sequence from a native or reference sequence. The amino acid sequence variants may possess substitutions, deletions, and/or insertions at certain positions within the amino acid sequence, as compared to a native or reference sequence. Ordinarily, variants will possess at least about 50% identity (homology) to a native or reference sequence, and preferably, they will be at least about 80%, more preferably at least about 90% identical (homologous) to a native or reference sequence.

[0407] In some embodiments “variant mimics” are provided. As used herein, the term “variant mimic” is one which contains one or more amino acids which would mimic an activated sequence. For example, glutamate may serve as a mimic for phosphoro-threonine and/or phosphoro-serine. Alternatively, variant mimics may result in deactivation or in an inactivated product containing the mimic, e.g., phenylalanine may act as an inactivating substitution for tyrosine; or alanine may act as an inactivating substitution for serine.

[0408] The term “amino acid sequence variant” refers to molecules with some differences in their amino acid sequences as compared to a native or starting sequence. The amino acid sequence variants may possess substitutions, deletions, and/or insertions at certain positions within the amino acid sequence. “Native” or “starting” sequence should not be confused with a wild type sequence. As used herein, a native or starting sequence is a relative term referring to an original molecule against which a comparison may be made. “Native” or “starting” sequences or molecules may represent the wild-type (that sequence found in nature) but do not have to be the wild-type sequence.

[0409] Ordinarily, variants will possess at least about 70% homology to a native sequence, and preferably, they will be at least about 80/6, more preferably at least about 90% homologous to a native sequence. “Homology” as it applies to amino acid sequences is defined as the percentage of residues in the candidate amino acid sequence that are identical with the residues in the amino acid sequence of a second sequence after aligning the sequences and introducing gaps, if necessary, to achieve the maximum percent homology. Methods and computer programs for the alignment are well known in the art. It is understood that homology depends on a calculation of percent identity but may differ in value due to gaps and penalties introduced in the calculation.

[0410] By “homologs” as it applies to amino acid sequences is meant the corresponding sequence of other species having substantial identity to a second sequence of a second species.

[0411] “Analogs” is meant to include polypeptide variants which differ by one or more amino acid alterations, e.g., substitutions, additions, or deletions of amino acid residues that still maintain the properties of the parent polypeptide.

[0412] Sequence tags or amino acids, such as one or more lysines, can be added to the peptide sequences (e.g., at the N-terminal or C-terminal ends). Sequence tags can be used for peptide purification or localization. Lysines can be used to increase peptide solubility or to allow for biotinylation. Alternatively, amino acid residues located at the carboxy and amino terminal regions of the amino acid sequence of a peptide or protein may optionally be deleted providing for truncated sequences. Certain amino acids (e.g., C-terminal or N-terminal residues) may alternatively be deleted depending on the use of the sequence, as for example, expression of the sequence as part of a larger sequence which is soluble, or linked to a solid support.

[0413] “Substitutional variants” when referring to proteins are those that have at least one amino acid residue in a native or starting sequence removed and a different amino acid inserted in its place at the same position. The substitutions may be single, where only one amino acid in the molecule has been substituted, or they may be multiple, where two or more amino acids have been substituted in the same molecule.

[0414] As used herein the term “conservative amino acid substitution” refers to the substitution of an amino acid that is normally present in the sequence with a different amino acid of similar size, charge, or polarity. Examples of conservative substitutions include the substitution of a non-polar (hydrophobic) residue such as isoleucine, valine, and leucine for another non-polar residue. Likewise, examples of conservative substitutions include the substitution of one polar (hydrophilic) residue for another such as between arginine and lysine, between glutamine and asparagine, and between glycine and serine. Additionally, the substitution of a basic residue such as lysine, arginine, or histidine for another, or the substitution of one acidic residue such as aspartic acid or glutamic acid for another acidic residue are additional examples of conservative substitutions. Examples of non-conservative substitutions include the substitution of a non-polar (hydrophobic) amino acid residue such as isoleucine, valine, leucine, alanine, methionine for a polar (hydrophilic) residue such as cysteine, glutamine, glutamic acid or lysine and/or a polar residue for a non-polar residue.

[0415] “Insertional variants” when referring to proteins are those with one or more amino acids inserted immediately adjacent to an amino acid at a particular position in a native or starting sequence. “Immediately adjacent” to an amino acid means connected to either the alpha-carboxy or alpha-amino functional group of the amino acid.

[0416] “Deletional variants” when referring to proteins, are those with one or more amino acids in the native or starting amino acid sequence removed. Ordinarily, deletional variants will have one or more amino acids deleted in a particular region of the molecule.

[0417] As used herein, the term “derivative” is used synonymously with the term “variant” and refers to a molecule that has been modified or changed in any way relative to a reference molecule or starting molecule. In some embodiments, derivatives include native or starting proteins that have been modified with an organic proteinaceous or non-proteinaceous derivatizing agent, and post-translational modifications. Covalent modifications are traditionally introduced by reacting targeted amino acid residues of the protein with an organic derivatizing agent that is capable of reacting with selected side-chains or terminal residues, or by harnessing mechanisms of post-translational modifications that function in selected recombinant host cells. The resultant covalent derivatives are useful in programs directed at identifying residues important for biological activity, for immunoassays, or for the preparation of anti-protein antibodies for immunoaffinity purification of the recombinant glycoprotein. Such modifications are within the ordinary skill in the art and are performed without undue experimentation.

[0418] Certain post-translational modifications are the result of the action of recombinant host cells on the expressed polypeptide. Glutaminyl and asparaginyl residues are frequently post-translationally deamidated to the corresponding glutamyl and aspartyl residues. Alternatively, these residues are deamidated under mildly acidic conditions. Either form of these residues may be present in the proteins used in accordance with the present disclosure.

[0419] Other post-translational modifications include hydroxylation of proline and lysine, phosphorylation of hydroxyl groups of seryl or threonyl residues, methylation of the alpha-amino groups of lysine, arginine, and histidine side chains (T. E. Creighton, Proteins: Structure and Molecular Properties, W.H. Freeman & Co., San Francisco, pp. 79-86 (1983)).

[0420] “Features” when referring to proteins are defined as distinct amino acid sequence-based components of a molecule. Features of the proteins of the present disclosure include surface manifestations, local conformational shape, folds, loops, half-loops, domains, half-domains, sites, termini or any combination thereof.

[0421] As used herein when referring to proteins the term “surface manifestation” refers to a polypeptide-based component of a protein appearing on an outermost surface.

[0422] As used herein when referring to proteins the term “local conformational shape” means a polypeptide based structural manifestation of a protein which is located within a definable space of the protein.

[0423] As used herein when referring to proteins the term “fold” means the resultant conformation of an amino acid sequence upon energy minimization. A fold may occur at the secondary or tertiary level of the folding process. Examples of secondary level folds include beta sheets and alpha helices. Examples of tertiary folds include domains and regions formed due to aggregation or separation of energetic forces. Regions formed in this way include hydrophobic and hydrophilic pockets, and the like.

[0424] As used herein the term “turn” as it relates to protein conformation means a bend which alters the direction of the backbone of a peptide or polypeptide and may involve one, two, three or more amino acid residues.

[0425] As used herein when referring to proteins the term “loop” refers to a structural feature of a peptide or polypeptide which reverses the direction of the backbone of a peptide or polypeptide and comprises four or more amino acid residues. Oliva et al. have identified at least 5 classes of protein loops (J. Mol Biol 266 (4): 814-830: 1997).

[0426] As used herein when referring to proteins the term “half-loop” refers to a portion of an identified loop having at least half the number of amino acid residues as the loop from which it is derived. It is understood that loops may not always contain an even number of amino acid residues. Therefore, in those cases where a loop contains or is identified to comprise an odd number of amino acids, a half-loop of the odd-numbered loop will comprise the whole number portion or next whole number portion of the loop (number of amino acids of the loop/2+/−0.5 amino acids). For example, a loop identified as a 7-amino acid loop could produce half-loops of 3 amino acids or 4 amino acids (7/2=3.5+/−0.5 being 3 or 4).

[0427] As used herein when referring to proteins the term “domain” refers to a motif of a polypeptide having one or more identifiable structural or functional characteristics or properties (e.g., binding capacity, serving as a site for protein-protein interactions).

[0428] As used herein when referring to proteins the term “half-domain” means portion of an identified domain having at least half the number of amino acid residues as the domain from which it is derived. It is understood that domains may not always contain an even number of amino acid residues. Therefore, in those cases where a domain contains or is identified to comprise an odd number of amino acids, a half-domain of the odd-numbered domain will comprise the whole number portion or next whole number portion of the domain (number of amino acids of the domain/2+/−0.5 amino acids). For example, a domain identified as a 7-amino acid domain could produce half-domains of 3 amino acids or 4 amino acids (7/2=3.5+/−0.5 being 3 or 4). It is also understood that sub-domains may be identified within domains or half-domains, these subdomains possessing less than all of the structural or functional properties identified in the domains or half domains from which they were derived. It is also understood that the amino acids that comprise any of the domain types herein need not be contiguous along the backbone of the polypeptide (i.e., nonadjacent amino acids may fold structurally to produce a domain, half-domain or subdomain).

[0429] As used herein when referring to proteins the terms “site” as it pertains to amino acid-based embodiments is used synonymous with “amino acid residue” and “amino acid side chain”. A site represents a position within a peptide or polypeptide that may be modified, manipulated, altered, derivatized or varied within the polypeptide-based molecules of the present disclosure.

[0430] As used herein the terms “termini or terminus” when referring to proteins refers to an extremity of a peptide or polypeptide. Such extremity is not limited only to the first or final site of the peptide or polypeptide but may include additional amino acids in the terminal regions. The polypeptide-based molecules of the present disclosure may be characterized as having both an N-terminus (terminated by an amino acid with a free amino group (NH2)) and a C-terminus (terminated by an amino acid with a free carboxyl group (COOH)). Proteins are in some cases made up of multiple polypeptide chains brought together by disulfide bonds or by non-covalent forces (multimers, oligomers). These sorts of proteins will have multiple N- and C-termini. Alternatively, the termini of the polypeptides may be modified such that they begin or end, as the case may be, with a non-polypeptide-based moiety such as an organic conjugate.

[0431] Once any of the features have been identified or defined as a component of a molecule, any of several manipulations and/or modifications of these features may be performed by moving, swapping, inverting, deleting, randomizing, or duplicating. Furthermore, it is understood that manipulation of features may result in the same outcome as a modification to the molecules. For example, a manipulation which involves deleting a domain would result in the alteration of the length of a molecule just as modification of a nucleic acid to encode less than a full-length molecule would.

[0432] Modifications and manipulations can be accomplished by methods known in the art such as site directed mutagenesis. The resulting modified molecules may then be tested for activity using in vitro or in vivo assays such as those described herein or any other suitable screening assay known in the art.

### AAV Production

[0433] The present disclosure provides methods for the generation of parvoviral particles, e.g. AAV particles, by viral genome replication in a viral replication cell.

[0434] In accordance with the disclosure, the viral genome comprising a payload region encoding an antibody, an antibody-based composition or fragment thereof, will be incorporated into the AAV particle produced in the viral replication cell. Methods of making AAV particles are well known in the art and are described in e.g., U.S. Pat. Nos. 6,204,059, 5,756,283, 6,258,595, 6,261,551, 6,270,996, 6,281,010, 6,365,394, 6,475,769, 6,482,634, 6,485,966, 6,943,019, 6,953,690, 7,022,519, 7,238,526, 7,291,498 and 7,491,508, 5,064,764, 6,194,191, 6,566,118, 8,137,948; or International Publication Nos. WO1996039530, WO1998010088. WO1999014354, WO1999015685, WO1999047691, WO2000055342. WO2000075353, and WO2001023597; Methods In Molecular Biology, ed. Richard. Humana Press, N J (1995); O'Reilly et al., Baculovirus Expression Vectors, A Laboratory Manual, Oxford Univ. Press (1994); Samulski et al., J. Vir. 63:3822-8 (1989); Kajigaya et al., Proc. Nat'l. Acad. Sci. USA 88: 4646-50 (1991); Ruffing et al., J. Vir. 66:6922-30 (1992); Kimbauer et al., Vir., 219:37-44 (1996); Zhao et al., Vir. 272:382-93 (2000); the contents of each of which are herein incorporated by reference in their entirety. In some embodiments, the AAV particles are made using the methods described in WO2015191508, the contents of which are herein incorporated by reference in their entirety.

[0435] Viral replication cells commonly used for production of recombinant AAV viral vectors include but are not limited to 293 cells, COS cells, HeLa cells, KB cells, and other mammalian cell lines as described in U.S. Pat. Nos. U.S. Pat. Nos. 6,156,303, 5,387,484, 5,741,683, 5,691,176, and 5,688,676; U.S. patent publication No. 2002/0081721, and International Patent Publication Nos. WO 00/47757, WO 00/24916, and WO 96/17947, the contents of each of which are herein incorporated by reference in their entireties.

[0436] In some embodiments, the AAV particles of the present disclosure may be produced in insect cells (e.g., Sf9 cells).

[0437] In some embodiments, the AAV particles of the present disclosure may be produced using triple transfection.

[0438] In some embodiments, the AAV particles of the present disclosure may be produced in mammalian cells.

[0439] In some embodiments, the AAV particles of the present disclosure may be produced by triple transfection in mammalian cells.

[0440] In some embodiments, the AAV particles of the present disclosure may be produced by triple transfection in HEK293 cells.

[0441] The present disclosure provides a method for producing an AAV particle comprising the steps of: 1) co-transfecting competent bacterial cells with a bacmid vector and either a viral construct vector and/or AAV payload construct vector, 2) isolating the resultant viral construct expression vector and AAV payload construct expression vector and separately transfecting viral replication cells, 3) isolating and purifying resultant payload and viral construct particles comprising viral construct expression vector or AAV payload construct expression vector, 4) co-infecting a viral replication cell with both the AAV payload and viral construct particles comprising viral construct expression vector or AAV payload construct expression vector, 5) harvesting and purifying the viral particle comprising a parvoviral genome.

[0442] In some embodiments, the present disclosure provides a method for producing an AAV particle comprising the steps of 1) simultaneously co-transfecting mammalian cells, such as, but not limited to HEK293 cells, with a payload region, a construct expressing rep and cap genes and a helper construct, 2) harvesting and purifying the AAV particle comprising a viral genome.

[0443] In some embodiments, the viral construct vector(s) used for AAV production may contain a nucleotide sequence encoding the AAV capsid proteins where the initiation codon of the AAV VP1 capsid protein is a non-ATG, i.e., a suboptimal initiation codon, allowing the expression of a modified ratio of the viral capsid proteins in the production system, to provide improved infectivity of the host cell. In a non-limiting example, a viral construct vector may contain a nucleic acid construct comprising a nucleotide sequence encoding AAV VP1, VP2, and VP3 capsid proteins, wherein the initiation codon for translation of the AAV VP1 capsid protein is CTG, TTG, or GTG, as described in U.S. Pat. No. 8,163,543, the contents of which are herein incorporated by reference in its entirety.

[0444] In some embodiments, the viral construct vector(s) used for AAV production may contain a nucleotide sequence encoding the AAV rep proteins where the initiation codon of the AAV rep protein or proteins is a non-ATG. In some embodiments, a single coding sequence is used for the Rep78 and Rep52 proteins, wherein initiation codon for translation of the Rep78 protein is a suboptimal initiation codon, selected from the group consisting of ACG, TTG, CTG and GTG, that effects partial exon skipping upon expression in insect cells, as described in U.S. Pat. No. 8,512,981, the contents of which is herein incorporated by reference in its entirety, for example to promote less abundant expression of Rep78 as compared to Rep52, which may be advantageous in that it promotes high vector yields.

[0445] In some embodiments, the viral genome of the AAV particle optionally encodes a selectable marker. The selectable marker may comprise a cell-surface marker, such as any protein expressed on the surface of the cell including, but not limited to receptors, CD markers, lectins, integrins, or truncated versions thereof.

[0446] In some embodiments, selectable marker reporter genes are selected from those described in International Application No. WO 96/23810; Heim et al., Current Biology 2:178-182 (1996); Heim et al., Proc. Natl. Acad. Sci. USA (1995); or Heim et al., Science 373:663-664 (1995); WO 96/30540, the contents of each of which are incorporated herein by reference in their entireties).

[0447] The AAV viral genomes encoding an anti-tau antibody payload described herein may be useful in the fields of human disease, veterinary applications and a variety of in vivo and in vitro settings. The AAV particles of the present disclosure may be useful in the field of medicine for the treatment, prophylaxis, palliation or amelioration of neurological diseases and/or disorders. In some embodiments, the AAV particles are used for the prevention and/or treatment of a tauopathy.

[0448] Various embodiments herein provide a pharmaceutical composition comprising the AAV particles described herein and a pharmaceutically acceptable excipient.

[0449] Various embodiments herein provide a method of treating a subject in need thereof comprising administering to the subject a therapeutically effective amount of the pharmaceutical composition described herein.

[0450] Certain embodiments of the method provide that the subject is treated by a route of administration of the pharmaceutical composition selected from the group consisting of intravenous, intracerebroventricular, intraparenchymal, intrathecal, subpial and intramuscular, or a combination thereof. Certain embodiments of the method provide that the subject is treated for a tauopathy and/or other neurological disorder. In one aspect of the method, a pathological feature of the tauopathy or other neurological disorder is alleviated and/or the progression of the tauopathy or other neurological disorder is halted, slowed, ameliorated or reversed.

[0451] Various embodiments herein describe a method of decreasing the level of soluble tau in the central nervous system of a subject in need thereof comprising administering to said subject an effective amount of the pharmaceutical composition described herein.

[0452] Also described herein are compositions, methods, processes, kits and devices for the design, preparation, manufacture and/or formulation of AAV particles. In some embodiments, payloads, such as but not limited to anti-tau antibodies, may be encoded by payload constructs or contained within plasmids or vectors or recombinant adeno-associated viruses (AAVs).

[0453] The present disclosure also provides administration and/or delivery methods for vectors and viral particles, e.g., AAV particles, for the treatment or amelioration of neurological disease, such as, but not limited to tauopathy.

### AAV Particles Comprising Anti-Tau Antibody Payloads

[0454] In some embodiments, the AAV particle comprises a viral genome with a payload region comprising one or more anti-tau antibody polynucleotide sequences. In such an embodiment, a viral genome encoding more than one polypeptide may be replicated and packaged into a viral particle. A target cell transduced with a viral particle comprising one or more anti-tau antibody polynucleotides may express the encoded antibody or antibodies in a single cell.

[0455] In some embodiments, the AAV particles are useful in the field of medicine for the treatment, prophylaxis, palliation or amelioration of neurological diseases and/or disorders.

[0456] Non-limiting examples of ITR to ITR sequences of AAV particles comprising a viral genome with a payload region comprising an anti-tau antibody polynucleotide sequence are described in Table 4-6.

TABLE 4
ITR to ITR Sequences of AAV particles comprising
anti-tau antibody polynucleotide sequences

| ITR to ITR | Sequence | ITR to ITR |
|---|---|---|
| Construct Name | Length (nt) | SEQ ID NO |
| TAU_ITR1 | 4450 | 1990 |
| TAU_ITR2 | 4471 | 1991 |
| TAU_ITR3 | 3983 | 1992 |
| TAU_ITR4 | 3962 | 1993 |
| TAU_ITR5 | 4041 | 1994 |
| TAU_ITR6 | 4020 | 1995 |
| TAU_ITR7 | 3899 | 1996 |
| TAU_ITR8 | 3878 | 1997 |
| TAU_ITR9 | 4459 | 1998 |
| TAU_ITR10 | 4438 | 1999 |
| TAU_ITR11 | 3971 | 2000 |
| TAU_ITR12 | 4029 | 2001 |
| TAU_ITR13 | 4008 | 2002 |
| TAU_ITR14 | 3887 | 2003 |
| TAU_ITR15 | 3866 | 2004 |
| TAU_ITR16 | 3932 | 2005 |
| TAU_ITR17 | 3932 | 2006 |
| TAU_ITR18 | 3932 | 2007 |
| TAU_ITR19 | 3932 | 2008 |
| TAU_ITR20 | 3932 | 2009 |
| TAU_ITR21 | 3932 | 2010 |
| TAU_ITR22 | 3932 | 2011 |
| TAU_ITR23 | 3932 | 2012 |
| TAU_ITR24 | 3932 | 2013 |
| TAU_ITR25 | 3932 | 2014 |
| TAU_ITR26 | 4309 | 2015 |
| TAU_ITR27 | 4309 | 2016 |
| TAU_ITR28 | 4309 | 2017 |
| TAU_ITR29 | 4309 | 2018 |
| TAU_ITR30 | 4309 | 2019 |
| TAU_ITR31 | 4309 | 2020 |
| TAU_ITR32 | 4309 | 2021 |
| TAU_ITR33 | 4309 | 2022 |
| TAU_ITR34 | 4309 | 2023 |
| TAU_ITR35 | 4309 | 2024 |
| TAU_ITR87 | 3950 | 2137 |
| TAU_ITR88 | 3962 | 2138 |
| TAU_ITR89 | 4450 | 2139 |
| TAU_ITR90 | 4020 | 2140 |
| TAU_ITR91 | 3878 | 2141 |
| TAU_ITR92 | 3950 | 2142 |
| TAU_ITR93 | 4438 | 2143 |
| TAU_ITR94 | 4008 | 2144 |
| TAU_ITR95 | 3866 | 2145 |
| TAU_ITR96 | 3941 | 2146 |
| TAU_ITR97 | 4429 | 2147 |
| TAU_ITR98 | 3999 | 2148 |
| TAU_ITR99 | 3857 | 2149 |
| TAU_ITR100 | 4420 | 2150 |
| TAU_ITR101 | 3990 | 2151 |
| TAU_ITR102 | 3848 | 2152 |
| TAU_ITR103 | 3971 | 2153 |
| TAU_ITR104 | 4459 | 2154 |
| TAU_ITR105 | 4029 | 2155 |
| TAU_ITR106 | 3887 | 2156 |
| TAU_ITR107 | 3938 | 2157 |
| TAU_ITR108 | 4447 | 2158 |
| TAU_ITR109 | 4017 | 2159 |
| TAU_ITR110 | 3875 | 2160 |
| TAU_ITR111 | 3950 | 2161 |
| TAU_ITR112 | 4438 | 2162 |
| TAU_ITR113 | 4008 | 2163 |
| TAU_ITR114 | 3866 | 2164 |
| TAU_ITR115 | 3938 | 2165 |
| TAU_ITR116 | 4426 | 2166 |
| TAU_ITR117 | 3996 | 2167 |
| TAU_ITR118 | 3854 | 2168 |
| TAU_ITR119 | 3950 | 2161 |
| TAU_ITR120 | 4438 | 2162 |
| TAU_ITR121 | 3455 | 2171 |
| TAU_ITR122 | 3498 | 2172 |
| TAU_ITR123 | 3282 | 2173 |
| TAU_ITR124 | 3300 | 2174 |
| TAU_ITR125 | 3943 | 2175 |
| TAU_ITR126 | 3988 | 2176 |
| TAU_ITR127 | 3772 | 2177 |
| TAU_ITR128 | 3790 | 2178 |
| TAU_ITR129 | 3324 | 2179 |
| TAU_ITR130 | 3814 | 2180 |
| TAU_ITR131 | 2567 | 2181 |
| TAU_ITR132 | 2582 | 2182 |
| TAU_ITR133 | 2597 | 2183 |
| TAU_ITR134 | 2612 | 2184 |
| TAU_ITR135 | 2627 | 2185 |
| TAU_ITR136 | 2642 | 2186 |
| TAU_ITR137 | 3055 | 2187 |
| TAU_ITR138 | 3070 | 2188 |
| TAU_ITR139 | 3085 | 2189 |
| TAU_ITR140 | 3100 | 2190 |
| TAU_ITR141 | 3115 | 2191 |
| TAU_ITR142 | 3130 | 2192 |
| TAU_ITR143 | 3160 | 2193 |
| TAU_ITR144 | 2569 | 2194 |
| TAU_ITR145 | 2584 | 2195 |
| TAU_ITR146 | 2599 | 2196 |
| TAU_ITR147 | 2614 | 2197 |
| TAU_ITR148 | 2627 | 2198 |
| TAU_ITR149 | 2642 | 2199 |
| TAU_ITR150 | 3055 | 2200 |
| TAU_ITR151 | 3070 | 2201 |
| TAU_ITR152 | 3084 | 2202 |
| TAU_ITR153 | 3100 | 2203 |
| TAU_ITR154 | 3115 | 2204 |
| TAU_ITR155 | 3130 | 2205 |
| TAU_ITR156 | 3097 | 2206 |
| TAU_ITR157 | 3082 | 2207 |
| TAU_ITR158 | 3097 | 2208 |
| TAU_ITR159 | 3112 | 2209 |
| TAU_ITR160 | 3097 | 2210 |
| TAU_ITR161 | 3082 | 2211 |
| TAU_ITR162 | 3097 | 2212 |
| TAU_ITR163 | 3112 | 2213 |
| TAU_ITR164 | 2652 | 2214 |
| TAU_ITR165 | 2667 | 2215 |
| TAU_ITR166 | 2730 | 2216 |
| TAU_ITR167 | 2510 | 2217 |
| TAU_ITR168 | 2525 | 2218 |
| TAU_ITR169 | 2540 | 2219 |
| TAU_ITR170 | 3091 | 2220 |
| TAU_ITR171 | 3082 | 2221 |
| TAU_ITR172 | 3103 | 2222 |
| TAU_ITR173 | 3109 | 2223 |
| TAU_ITR174 | 3115 | 2224 |
| TAU_ITR175 | 3121 | 2225 |
| TAU_ITR176 | 3097 | 2226 |
| TAU_ITR177 | 3124 | 2227 |
| TAU_ITR178 | 3109 | 2228 |
| TAU_ITR179 | 3157 | 2229 |
| TAU_ITR180 | 3760 | 2230 |
| TAU_ITR181 | 3781 | 2231 |
| TAU_ITR182 | 3778 | 2232 |
| TAU_ITR183 | 3748 | 2233 |
| TAU_ITR184 | 3769 | 2234 |
| TAU_ITR185 | 3766 | 2235 |
| TAU_ITR186 | 3760 | 2236 |
| TAU_ITR187 | 3778 | 2237 |
| TAU_ITR188 | 3188 | 2260 |
| TAU_ITR189 | 3330 | 2261 |
| TAU_ITR190 | 3976 | 2262 |
| TAU_ITR191 | 3404 | 2263 |
| TAU_ITR192 | 3546 | 2264 |
| TAU_ITR193 | 3997 | 2265 |
| TAU_ITR194 | 3425 | 2266 |
| TAU_ITR195 | 3567 | 2267 |
| TAU_ITR196 | 3088 | 2268 |
| TAU_ITR197 | 3558 | 2269 |
| TAU_ITR198 | 3360 | 2270 |
| TAU_ITR199 | 3384 | 2271 |
| TAU_ITR200 | 2625 | 2272 |
| TAU_ITR201 | 2655 | 2273 |
| TAU_ITR202 | 2685 | 2274 |
| TAU_ITR203 | 2730 | 2275 |
| TAU_ITR204 | 2625 | 2276 |
| TAU_ITR205 | 2655 | 2277 |
| TAU_ITR206 | 2685 | 2278 |
| TAU_ITR207 | 3416 | 2279 |
| TAU_ITR208 | 3218 | 2280 |
| TAU_ITR209 | 3242 | 2281 |
| TAU_ITR210 | 2483 | 2282 |
| TAU_ITR211 | 2513 | 2283 |
| TAU_ITR212 | 2543 | 2284 |
| TAU_ITR213 | 2588 | 2285 |
| TAU_ITR214 | 2483 | 2286 |
| TAU_ITR215 | 2513 | 2287 |
| TAU_ITR216 | 2543 | 2288 |
| TAU_ITR217 | 3967 | 2289 |
| TAU_ITR218 | 3769 | 2290 |
| TAU_ITR219 | 3792 | 2291 |
| TAU_ITR220 | 3751 | 2292 |
| TAU_ITR221 | 3058 | 2293 |
| TAU_ITR222 | 3088 | 2294 |
| TAU_ITR223 | 3118 | 2295 |
| TAU_ITR224 | 3163 | 2296 |
| TAU_ITR225 | 3537 | 2297 |
| TAU_ITR226 | 3339 | 2298 |
| TAU_ITR227 | 3362 | 2299 |
| TAU_ITR228 | 3321 | 2300 |
| TAU_ITR229 | 2628 | 2301 |
| TAU_ITR230 | 2658 | 2302 |
| TAU_ITR231 | 2688 | 2303 |
| TAU_ITR232 | 2733 | 2304 |
| TAU_ITR233 | 3395 | 2305 |
| TAU_ITR234 | 3197 | 2306 |
| TAU_ITR235 | 3220 | 2307 |
| TAU_ITR236 | 3179 | 2308 |
| TAU_ITR237 | 2486 | 2309 |
| TAU_ITR238 | 2516 | 2310 |
| TAU_ITR239 | 2546 | 2311 |
| TAU_ITR240 | 2591 | 2312 |

TABLE 5
ITR to ITR Sequences of AAV particles comprising
anti-tau antibody polynucleotide sequences

| ITR to ITR | Sequence | ITR to ITR |
|---|---|---|
| Construct Name | Length (nt) | SEQ ID NO |
| TAU_ITR36 | 4253 | 2025 |
| TAU_ITR37 | 4716 | 2026 |
| TAU_ITR38 | 4716 | 2027 |
| TAU_ITR39 | 4698 | 2028 |
| TAU_ITR40 | 4689 | 2029 |
| TAU_ITR41 | 4716 | 2030 |
| TAU_ITR42 | 4716 | 2031 |
| TAU_ITR43 | 4698 | 2032 |
| TAU_ITR44 | 4689 | 2033 |
| TAU_ITR45 | 4253 | 2034 |
| TAU_ITR46 | 2350 | 2035 |
| TAU_ITR47 | 2370 | 2036 |
| TAU_ITR48 | 2282 | 2037 |
| TAU_ITR49 | 2314 | 2038 |
| TAU_ITR50 | 2350 | 2039 |
| TAU_ITR51 | 2370 | 2040 |
| TAU_ITR52 | 2624 | 2041 |
| TAU_ITR53 | 3778 | 2042 |
| TAU_ITR54 | 2029 | 2043 |
| TAU_ITR55 | 2218 | 2044 |
| TAU_ITR56 | 3778 | 2045 |
| TAU_ITR57 | 2624 | 2046 |
| TAU_ITR58 | 2350 | 2047 |
| TAU_ITR59 | 2029 | 2048 |
| TAU_ITR60 | 2218 | 2049 |
| TAU_ITR61 | 4188 | 2050 |
| TAU_ITR62 | 3435 | 2051 |
| TAU_ITR63 | 4395 | 2052 |
| TAU_ITR64 | 3510 | 2053 |
| TAU_ITR65 | 4131 | 2054 |
| TAU_ITR66 | 3378 | 2055 |
| TAU_ITR67 | 4395 | 2056 |
| TAU_ITR68 | 3510 | 2057 |
| TAU_ITR69 | 4016 | 2058 |
| TAU_ITR70 | 4016 | 2059 |
| TAU_ITR71 | 3608 | 2060 |
| TAU_ITR241 | 3900 | 2313 |
| TAU_ITR242 | 4042 | 2314 |
| TAU_ITR243 | 3984 | 2315 |
| TAU_ITR244 | 4472 | 2316 |
| TAU_ITR245 | 2549 | 2317 |
| TAU_ITR246 | 2445 | 2318 |
| TAU_ITR247 | 2350 | 2319 |
| TAU_ITR248 | 4698 | 2320 |
| TAU_ITR249 | 4223 | 2321 |

TABLE 6
ITR to ITR Sequences of AAV particles comprising
anti-tau antibody polynucleotide sequences

| ITR to ITR | Sequence | ITR to ITR |
|---|---|---|
| Construct Name | Length (nt) | SEQ ID NO |
| TAU_ITR72 | 3619 | 2061 |
| TAU_ITR73 | 3610 | 2062 |
| TAU_ITR74 | 3607 | 2063 |
| TAU_ITR75 | 4158 | 2064 |
| TAU_ITR76 | 3598 | 2065 |
| TAU_ITR77 | 3622 | 2066 |
| TAU_ITR78 | 3619 | 2067 |
| TAU_ITR79 | 3607 | 2068 |
| TAU_ITR80 | 4158 | 2069 |
| TAU_ITR81 | 3607 | 2070 |
| TAU_ITR82 | 3598 | 2071 |
| TAU_ITR83 | 3610 | 2072 |
| TAU_ITR84 | 3610 | 2073 |
| TAU_ITR85 | 3622 | 2074 |
| TAU_ITR86 | 3610 | 2075 |

[0457] In some embodiments, the AAV particle comprises a viral genome which comprises a sequence which has a percent identity to any of SEQ ID NOs: 1990-2075, 2137-2168, 2171-2237, and 2260-2321. The viral genome may have 1%, 2%, 3%, 4%, 5%, 6%, 7%, 8%, 9%, 10%, 15%, 20%, 25%, 30%, 35%, 40%, 45%, 50%, 55%, 60%, 65%, 70%, 75%, 80%, 85%, 90%, 95%, 99% or 100% identity to any of SEQ ID NOs: 1990-2075, 2137-2168, 2171-2237, and 2260-2321. The viral genome may have 1-10%, 10-20%, 30-40%, 50-60%, 50-70%, 50-80%, 50-90/o. 50-99%, 50-100/6, 60-70%, 60-80%, 60-90%, 60-99%, 60-100%, 70-80%, 70-90%, 70-99%, 70-100%, 80-85%, 80-90%, 80-95%, 80-99%, 80-100%, 90-95%, 90-99%, or 90-100% to any of SEQ ID NOs: 1990-2075, 2137-2168, 2171-2237, and 2260-2321. As a non-limiting example, the viral genome comprises a sequence which has 80% identity to any of SEQ ID NO: 1990-2075, 2137-2168, 2171-2237, and 2260-2321. As another non-limiting example, the viral genome comprises a sequence which has 85% identity to any of SEQ ID NO: 1990-2075, 2137-2168, 2171-2237, and 2260-2321. As another non-limiting example, the viral genome comprises a sequence which has 90% identity to any of SEQ ID NO: 1990-2075, 2137-2168, 2171-2237, and 2260-2321. As another non-limiting example, the viral genome comprises a sequence which has 95% identity to any of SEQ ID NO: 1990-2075, 2137-2168, 2171-2237, and 2260-2321. As another non-limiting example, the viral genome comprises a sequence which has 99% identity to any of SEQ ID NO: 1990-2075, 2137-2168, 2171-2237, and 2260-2321.

[0458] In some embodiments, the AAV particles comprising anti-tau antibody polynucleotide sequences which comprise a nucleic acid sequence encoding at least one antibody heavy and/or light chain may be introduced into mammalian cells.

[0459] The AAV viral genomes encoding anti-tau antibody polynucleotides described herein may be useful in the fields of human disease, viruses, infections veterinary applications and a variety of in vivo and in vitro settings. In some embodiments, the AAV viral genomes encoding anti-tau antibody polynucleotides are used for the prevention and/or treatment of a tauopathy.

[0460] The viral genome of the AAV particles of the present disclosure may comprise any combination of the sequence regions described in Tables 7-14 encapsulated in any of the capsids listed in Table 1 or described herein.

[0461] In some embodiments, the AAV particle viral genome may comprise at least one sequence region as described in Tables 7-14. The regions may be located before or after any of the other sequence regions described herein. Viral genomes may further comprise more than one copy of one or more sequence regions as described in Tables 7-14.

[0462] In some embodiments, the AAV particle viral genome may comprise at least one inverted terminal repeat (ITR) region. The ITR region(s) may, independently, have a length such as, but not limited to, 75, 76, 77, 78, 79, 80, 81, 82, 83, 84, 85, 86, 87, 88, 89, 90, 91, 92, 93, 94, 95, 96, 97, 98, 99, 100, 101, 102, 103, 104, 105, 106, 107, 108, 109, 110, 111, 112, 113, 114, 115, 116, 117, 118, 119, 120, 121, 122, 123, 124, 125, 126, 127, 128, 129, 130, 131, 132, 133, 134, 135, 136, 137, 138, 139, 140, 141, 142, 143, 144, 145, 146, 147, 148, 149, 150, 151, 152, 153, 154, 155, 156, 157, 158, 159, 160, 161, 162, 163, 164, 165, 166, 167, 168, 169, 170, 171, 172, 173, 174, and 175 nucleotides. The length of the ITR region for the viral genome may be 75-80, 75-85, 75-100, 80-85, 80-90, 80-105, 85-90, 85-95, 85-110, 90-95, 90-100, 90-115, 95-100, 95-105, 95-120, 100-105, 100-110, 100-125, 105-110, 105-115, 105-130, 110-115, 110-120, 110-135, 115-120, 115-125, 115-140, 120-125, 120-130, 120-145, 125-130, 125-135, 125-150, 130-135, 130-140, 130-155, 135-140, 135-145, 135-160, 140-145, 140-150, 140-165, 145-150, 145-155, 145-170, 150-155, 150-160, 150-175, 155-160, 155-165, 160-165, 160-170, 165-170, 165-175, and 170-175 nucleotides. As anon-limiting example, the viral genome comprises a 5′ ITR that is about 141 nucleotides in length. As a non-limiting example, the viral genome comprises a 5′ ITR that is about 130 nucleotides in length.

[0463] In some embodiments, the AAV particle viral genome comprises at least one 5′ inverted terminal repeat (5′ ITR) sequence region. Non-limiting examples of 5′ ITR sequence regions are described in Table 7.

TABLE 7
Inverted Terminal Repeat (ITR) Sequence Regions

| Sequence | Sequence | |
|---|---|---|
| Region Name | Length | SEQ ID NO |
| ITR1 | 130 | 2076 |
| ITR2 | 141 | 2077 |
| ITR3 | 130 | 2078 |
| ITR4 | 141 | 2079 |

[0464] In some embodiments, the AAV particle viral genome may have an ITR that comprises ITR1. In some embodiments, the AAV particle viral genome may have an ITR that comprises ITR2. In some embodiments, the AAV particle viral genome may have an ITR that comprises ITR3. In some embodiments, the AAV particle viral genome may have an ITR that comprises ITR4.

[0465] In some embodiments, the AAV particle viral genome may have two ITRs. As a non-limiting example, the two ITRs are ITR1 and ITR3. As a non-limiting example, the two ITRs are ITR1 and ITR4. As a non-limiting example, the two ITRs are ITR2 and ITR3. As a non-limiting example, the two ITRs are ITR2 and ITR4

[0466] In some embodiments, the AAV particle viral genome may comprise at least one promoter sequence region. The promoter sequence region(s) may, independently, have a length such as, but not limited to, 4, 5, 6, 7, 8, 9, 10, 11, 12, 13, 14, 15, 16, 17, 18, 19, 20, 21, 22, 23, 24, 25, 26, 27, 28, 29, 30, 31, 32, 33, 34, 35, 36, 37, 38, 39, 40, 41, 42, 43, 44, 45, 46, 47, 48, 49, 50, 51, 52, 53, 54, 55, 56, 57, 58, 59, 60, 61, 62, 63, 64, 65, 66, 67, 68, 69, 70, 71, 72, 73, 74, 75, 76, 77, 78, 79, 80, 81, 82, 83, 84, 85, 86, 87, 88, 89, 90, 91, 92, 93, 94, 95, 96, 97, 98, 99, 100, 101, 102, 103, 104, 105, 106, 107, 108, 109, 110, 111, 112, 113, 114, 115, 116, 117, 118, 119, 120, 121, 122, 123, 124, 125, 126, 127, 128, 129, 130, 131, 132, 133, 134, 135, 136, 137, 138, 139, 140, 141, 142, 143, 144, 145, 146, 147, 148, 149, 150, 151, 152, 153, 154, 155, 156, 157, 158, 159, 160, 161, 162, 163, 164, 165, 166, 167, 168, 169, 170, 171, 172, 173, 174, 175, 176, 177, 178, 179, 180, 181, 182, 183, 184, 185, 186, 187, 188, 189, 190, 191, 192, 193, 194, 195, 196, 197, 198, 199, 200, 201, 202, 203, 204, 205, 206, 207, 208, 209, 210, 211, 212, 213, 214, 215, 216, 217, 218, 219, 220, 221, 222, 223, 224, 225, 226, 227, 228, 229, 230, 231, 232, 233, 234, 235, 236, 237, 238, 239, 240, 241, 242, 243, 244, 245, 246, 247, 248, 249, 250, 251, 252, 253, 254, 255, 256, 257, 258, 259, 260, 261, 262, 263, 264, 265, 266, 267, 268, 269, 270, 271, 272, 273, 274, 275, 276, 277, 278, 279, 280, 281, 282, 283, 284, 285, 286, 287, 288, 289, 290, 291, 292, 293, 294, 295, 296, 297, 298, 299, 300, 301, 302, 303, 304, 305, 306, 307, 308, 309, 310, 311, 312, 313, 314, 315, 316, 317, 318, 319, 320, 321, 322, 323, 324, 325, 326, 327, 328, 329, 330, 331, 332, 333, 334, 335, 336, 337, 338, 339, 340, 341, 342, 343, 344, 345, 346, 347, 348, 349, 350, 351, 352, 353, 354, 355, 356, 357, 358, 359, 360, 361, 362, 363, 364, 365, 366, 367, 368, 369, 370, 371, 372, 373, 374, 375, 376, 377, 378, 379, 380, 381, 382, 383, 384, 385, 386, 387, 388, 389, 390, 391, 392, 393, 394, 395, 396, 397, 398, 399, 400, 401, 402, 403, 404, 405, 406, 407, 408, 409, 410, 411, 412, 413, 414, 415, 416, 417, 418, 419, 420, 421, 422, 423, 424, 425, 426, 427, 428, 429, 430, 431, 432, 433, 434, 435, 436, 437, 438, 439, 440, 441, 442, 443, 444, 445, 446, 447, 448, 449, 450, 451, 452, 453, 454, 455, 456, 457, 458, 459, 460, 461, 462, 463, 464, 465, 466, 467, 468, 469, 470, 471, 472, 473, 474, 475, 476, 477, 478, 479, 480, 481, 482, 483, 484, 485, 486, 487, 488, 489, 490, 491, 492, 493, 494, 495, 496, 497, 498, 499, 500, 501, 502, 503, 504, 505, 506, 507, 508, 509, 510, 511, 512, 513, 514, 515, 516, 517, 518, 519, 520, 521, 522, 523, 524, 525, 526, 527, 528, 529, 530, 531, 532, 533, 534, 535, 536, 537, 538, 539, 540, 541, 542, 543, 544, 545, 546, 547, 548, 549, 550, 551, 552, 553, 554, 555, 556, 557, 558, 559, 560, 561, 562, 563, 564, 565, 566, 567, 568, 569, 570, 571, 572, 573, 574, 575, 576, 577, 578, 579, 580, 581, 582, 583, 584, 585, 586, 587, 588, 589, 590, 591, 592, 593, 594, 595, 596, 597, 598, 599, 600 and more than 600 nucleotides. The length of the promoter region for the viral genome may be 4-10, 10-20, 10-50, 20-30, 30-40, 40-50, 50-60, 50-100, 60-70, 70-80, 80-90, 90-100, 100-110, 100-150, 110-120, 120-130, 130-140, 140-150, 150-160, 150-200, 160-170, 170-180, 180-190, 190-200, 200-210, 200-250, 210-220, 220-230, 230-240, 240-250, 250-260, 250-300, 260-270, 270-280, 280-290, 290-300, 300-310, 300-350, 310-320, 320-330, 330-340, 340-350, 350-360, 350-400, 360-370, 370-380, 380-390, 390-400, 400-410, 400-450, 410-420, 420-430, 430-440, 440-450, 450-460, 450-500, 460-470, 470-480, 480-490, 490-500, 500-510, 500-550, 510-520, 520-530, 530-540, 540-550, 550-560, 550-600, 560-570, 570-580, 580-590, 590-600 and more than 600 nucleotides. As a non-limiting example, the viral genome comprises a promoter region that is about 260 nucleotides in length. As a non-limiting example, the viral genome comprises a promoter region that is about 283 nucleotides in length. As a non-limiting example, the viral genome comprises a promoter region that is about 299 nucleotides in length. As a non-limiting example, the viral genome comprises a promoter region that is about 365 nucleotides in length. As a non-limiting example, the viral genome comprises a promoter region that is about 380 nucleotides in length. As a non-limiting example, the viral genome comprises a promoter region that is about 382 nucleotides in length. As a non-limiting example, the viral genome comprises a promoter region that is about 557 nucleotides in length. As a non-limiting example, the viral genome comprises a promoter region that is about 654 nucleotides in length. As a non-limiting example, the viral genome comprises a promoter region that is about 699 nucleotides in length. As a non-limiting example, the viral genome comprises a promoter region that is about 1714 nucleotides in length. As a non-limiting example, the viral genome comprises a promoter region that is about 1715 nucleotides in length. As a non-limiting example, the viral genome comprises a promoter region that is about 1736 nucleotides in length.

[0467] In some embodiments, the AAV particle viral genome comprises at least one promoter sequence region. Non-limiting examples of promoter sequence regions are described in Table 8.

TABLE 8
Promoter Sequence Regions

| Sequence | Sequence | |
|---|---|---|
| Region Name | Length | SEQ ID NO |
| Promoter 1 | 1715 | 2080 |
| Promoter 2 | 299 | 2081 |
| Promoter 3 | 283 | 2082 |
| Promoter 4 | 260 | 2083 |
| Promoter 5 | 654 | 2084 |
| Promoter 6 | 699 | 2085 |
| Promoter 7 | 557 | 2086 |
| Promoter 8 | 382 | 2087 |
| Promoter 9 | 1736 | 2088 |
| Promoter 10 | 365 | 2089 |
| Promoter 11 | 1714 | 2238 |
| Promoter 12 | 380 | 2239 |

[0468] In some embodiments, the AAV particle viral genome comprises one promoter sequence region. In some embodiments, the promoter sequence region is Promoter 1. In some embodiments, the promoter sequence region is Promoter 2. In some embodiments, the promoter sequence region is Promoter 3. In some embodiments, the promoter sequence region is Promoter 4. In some embodiments, the promoter sequence region is Promoter 5. In some embodiments, the promoter sequence region is Promoter 6. In some embodiments, the promoter sequence region is Promoter 7. In some embodiments, the promoter sequence region is Promoter 8. In some embodiments, the promoter sequence region is Promoter 9. In some embodiments, the promoter sequence region is Promoter 10. In some embodiments, the promoter sequence region is Promoter 11. In some embodiments, the promoter sequence region is Promoter 12. In some embodiments, the promoter sequence region further comprises at least one promoter sub-region. As a non-limiting example, the promoter sequence is Promoter 1, further comprising Promoter 2 and Promoter 3 sub-regions.

[0469] In some embodiments, the AAV particle viral genome comprises more than one promoter sequence region. In some embodiments, the AAV particle viral genome comprises two promoter sequence regions. In some embodiments, the AAV particle viral genome comprises three promoter sequence regions.

[0470] In some embodiments, the AAV particle viral genome may comprise at least one exon sequence region. The exon region(s) may, independently, have a length such as, but not limited to, 2, 3, 4, 5, 6, 7, 8, 9, 10, 11, 12, 13, 14, 15, 16, 17, 18, 19, 20, 21, 22, 23, 24, 25, 26, 27, 28, 29, 30, 31, 32, 33, 34, 35, 36, 37, 38, 39, 40, 41, 42, 43, 44, 45, 46, 47, 48, 49, 50, 51, 52, 53, 54, 55, 56, 57, 58, 59, 60, 61, 62, 63, 64, 65, 66, 67, 68, 69, 70, 71, 72, 73, 74, 75, 76, 77, 78, 79, 80, 81, 82, 83, 84, 85, 86, 87, 88, 89, 90, 91, 92, 93, 94, 95, 96, 97, 98, 99, 100, 101, 102, 103, 104, 105, 106, 107, 108, 109, 110, 111, 112, 113, 114, 115, 116, 117, 118, 119, 120, 121, 122, 123, 124, 125, 126, 127, 128, 129, 130, 131, 132, 133, 134, 135, 136, 137, 138, 139, 140, 141, 142, 143, 144, 145, 146, 147, 148, 149, and 150 nucleotides. The length of the exon region for the viral genome may be 2-10, 5-10, 5-15, 10-20, 10-30, 10-40, 15-20, 15-25, 20-30, 20-40, 20-50, 25-30, 25-35, 30-40, 30-50, 30-60, 35-40, 35-45, 40-50, 40-60, 40-70, 45-50, 45-55, 50-60, 50-70, 50-80, 55-60, 55-65, 60-70, 60-80, 60-90,65-70, 65-75, 70-80, 70-90, 70-100, 75-80, 75-85, 80-90, 80-100, 80-110, 85-90, 85-95, 90-100, 90-110, 90-120, 95-100, 95-105, 100-110, 100-120, 100-130, 105-110, 105-115, 110-120, 110-130, 110-140, 115-120, 115-125, 120-130, 120-140, 120-150, 125-130, 125-135, 130-140, 130-150, 135-140, 135-145, 140-150, and 145-150 nucleotides. As a non-limiting example, the viral genome comprises an exon region that is about 53 nucleotides in length. As a non-limiting example, the viral genome comprises an exon region that is about 54 nucleotides in length. As a non-limiting example, the viral genome comprises an exon region that is about 59 nucleotides in length. As a non-limiting example, the viral genome comprises an exon region that is about 102 nucleotides in length. As a non-limiting example, the viral genome comprises an exon region that is about 134 nucleotides in length.

[0471] In some embodiments, the AAV particle viral genome comprises at least one Exon sequence region. Non-limiting examples of Exon sequence regions are described in Table 9.

TABLE 9
Exon Sequence Regions

| Sequence | Sequence | |
|---|---|---|
| Region Name | Length | SEQ ID NO |
| Exon1 | 134 | 2090 |
| Exon2 | 102 | 2091 |
| Exon3 | 59 | 2092 |
| Exon4 | 53 | 2093 |
| Exon5 | 54 | 2094 |

[0472] In some embodiments, the AAV particle viral genome comprises one Exon sequence region. In some embodiments, the Exon sequence region is the Exon1 sequence region. In some embodiments, the Exon sequence region is the Exon2 sequence region. In some embodiments, the Exon sequence region is the Exon3 sequence region. In some embodiments, the Exon sequence region is the Exon4 sequence region. In some embodiments, the Exon sequence region is the Exon5 sequence region.

[0473] In some embodiments, the AAV particle viral genome comprises two Exon sequence regions. In some embodiments, the AAV particle viral genome comprises three Exon sequence regions. In some embodiments, the AAV particle viral genome comprises four Exon sequence regions. In some embodiments, the AAV particle viral genome comprises more than four Exon sequence regions.

[0474] In some embodiments, the AAV particle viral genome may comprise at least one intron sequence region. The intron region(s) may, independently, have a length such as, but not limited to, 10, 11, 12, 13, 14, 15, 16, 17, 18, 19, 20, 21, 22, 23, 24, 25, 26, 27, 28, 29, 30, 31, 32, 33, 34, 35, 36, 37, 38, 39, 40, 41, 42, 43, 44, 45, 46, 47, 48, 49, 50, 51, 52, 53, 54, 55, 56, 57, 58, 59, 60, 61, 62, 63, 64, 65, 66, 67, 68, 69, 70, 71, 72, 73, 74, 75, 76, 77, 78, 79, 80, 81, 82, 83, 84, 85, 86, 87, 88, 89, 90, 91, 92, 93, 94, 95, 96, 97, 98, 99, 100, 101, 102, 103, 104, 105, 106, 107, 108, 109, 110, 111, 112, 113, 114, 115, 116, 117, 118, 119, 120, 121, 122, 123, 124, 125, 126, 127, 128, 129, 130, 131, 132, 133, 134, 135, 136, 137, 138, 139, 140, 141, 142, 143, 144, 145, 146, 147, 148, 149, 150, 151, 152, 153, 154, 155, 156, 157, 158, 159, 160, 161, 162, 163, 164, 165, 166, 167, 168, 169, 170, 171, 172, 173, 174, 175, 176, 177, 178, 179, 180, 181, 182, 183, 184, 185, 186, 187, 188, 189, 190, 191, 192, 193, 194, 195, 196, 197, 198, 199, 200, 201, 202, 203, 204, 205, 206, 207, 208, 209, 210, 211, 212, 213, 214, 215, 216, 217, 218, 219, 220, 221, 222, 223, 224, 225, 226, 227, 228, 229, 230, 231, 232, 233, 234, 235, 236, 237, 238, 239, 240, 241, 242, 243, 244, 245, 246, 247, 248, 249, 250, 251, 252, 253, 254, 255, 256, 257, 258, 259, 260, 261, 262, 263, 264, 265, 266, 267, 268, 269, 270, 271, 272, 273, 274, 275, 276, 277, 278, 279, 280, 281, 282, 283, 284, 285, 286, 287, 288, 289, 290, 291, 292, 293, 294, 295, 296, 297, 298, 299, 300, 301, 302, 303, 304, 305, 306, 307, 308, 309, 310, 311, 312, 313, 314, 315, 316, 317, 318, 319, 320, 321, 322, 323, 324, 325, 326, 327, 328, 329, 330, 331, 332, 333, 334, 335, 336, 337, 338, 339, 340, 341, 342, 343, 344, 345, 346, 347, 348, 349, 350 and more than 350 nucleotides. The length of the intron region for the viral genome may be 25-35, 25-50, 35-45, 45-55, 50-75, 55-65, 65-75, 75-85, 75-100, 85-95, 95-105, 100-125, 105-115, 115-125, 125-135, 125-150, 135-145, 145-155, 150-175, 155-165, 165-175, 175-185, 175-200, 185-195, 195-205, 200-225, 205-215, 215-225, 225-235, 225-250, 235-245, 245-255, 250-275, 255-265, 265-275, 275-285, 275-300, 285-295, 295-305, 300-325, 305-315, 315-325, 325-335, 325-350, and 335-345 nucleotides. As a non-limiting example, the viral genome comprises an intron region that is about 15 nucleotides in length. As a non-limiting example, the viral genome comprises an intron region that is about 32 nucleotides in length. As a non-limiting example, the viral genome comprises an intron region that is about 41 nucleotides in length. As a non-limiting example, the viral genome comprises an intron region that is about 53 nucleotides in length. As a non-limiting example, the viral genome comprises an intron region that is about 73 nucleotides in length. As a non-limiting example, the viral genome comprises an intron region that is about 168 nucleotides in length. As a non-limiting example, the viral genome comprises an intron region that is about 172 nucleotides in length. As a non-limiting example, the viral genome comprises an intron region that is about 292 nucleotides in length. As a non-limiting example, the viral genome comprises an intron region that is about 347 nucleotides in length. As a non-limiting example, the viral genome comprises an intron region that is about 387 nucleotides in length. As a non-limiting example, the viral genome comprises an intron region that is about 491 nucleotides in length. As a non-limiting example, the viral genome comprises an intron region that is about 566 nucleotides in length. As a non-limiting example, the viral genome comprises an intron region that is about 1074 nucleotides in length.

[0475] In some embodiments, the AAV particle viral genome comprises at least one intron sequence region. Non-limiting examples of intron sequence regions are described in Table 10.

TABLE 10
Intron Sequence Regions

| Sequence | Sequence | |
|---|---|---|
| Region Name | Length | SEQ ID NO |
| Intron1 | 32 | 2095 |
| Intron2 | 15 | 2096 |
| Intron3 | 347 | 2097 |
| Intron4 | 168 | 2098 |
| Intron5 | 73 | 2099 |
| Intron6 | 73 | 2100 |
| Intron7 | 73 | 2101 |
| Intron8 | 53 | 2102 |
| Intron9 | 172 | 2103 |
| Intron10 | 1074 | 2104 |
| Intron11 | 41 | 2105 |
| Intron12 | 566 | 2240 |
| Intron13 | 491 | 2256 |
| Intron14 | 387 | 2257 |
| Intron15 | 292 | 2258 |

[0476] In some embodiments, the AAV particle viral genome comprises one intron sequence region. In some embodiments, the intron sequence region is the Intron 1 sequence region. In some embodiments, the intron sequence region is the Intron2 sequence region. In some embodiments, the intron sequence region is the Intron3 sequence region. In some embodiments, the intron sequence region is the Intron4 sequence region. In some embodiments, the intron sequence region is the Intron5 sequence region. In some embodiments, the intron sequence region is the Intron6 sequence region. In some embodiments, the intron sequence region is the Intron7 sequence region. In some embodiments, the intron sequence region is the Intron8 sequence region. In some embodiments, the intron sequence region is the Intron9 sequence region. In some embodiments, the intron sequence region is the Intron10 sequence region. In some embodiments, the intron sequence region is the Intron11 sequence region. In some embodiments, the intron sequence region is the Intron12 sequence region. In some embodiments, the intron sequence region is the Intron13 sequence region. In some embodiments, the intron sequence region is the Intron14 sequence region. In some embodiments, the intron sequence region is the Intron15 sequence region.

[0477] In some embodiments, the AAV particle viral genome comprises two intron sequence regions. In some embodiments, the AAV particle viral genome comprises three intron sequence regions. In some embodiments, the AAV particle viral genome comprises more than three intron sequence regions.

[0478] In some embodiments, the AAV particle viral genome may comprise at least one signal sequence region, not derived from an antibody. In another embodiment, the signal sequence region may be derived from an antibody sequence. The signal sequence region(s) may, independently, have a length such as, but not limited to, 10, 11, 12, 13, 14, 15, 16, 17, 18, 19, 20, 21, 22, 23, 24, 25, 26, 27, 28, 29, 30, 31, 32, 33, 34, 35, 36, 37, 38, 39, 40, 41, 42, 43, 44, 45, 46, 47, 48, 49, 50, 51, 52, 53, 54, 55, 56, 57, 58, 59, 60, 61, 62, 63, 64, 65, 66, 67, 68, 69, 70, 71, 72, 73, 74, 75, 76, 77, 78, 79, 80, 81, 82, 83, 84, 85, 86, 87, 88, 89, 90, 91, 92, 93, 94, 95, 96, 97, 98, 99, 100, 101, 102, 103, 104, 105, 106, 107, 108, 109, 110, 111, 112, 113, 114, 115, 116, 117, 118, 119, 120, 121, 122, 123, 124, 125, 126, 127, 128, 129, 130, 131, 132, 133, 134, 135, 136, 137, 138, 139, 140, 141, 142, 143, 144, 145, 146, 147, 148, 149, and 150 nucleotides. The length of the signal region in the viral genome may be 10-15, 15-25, 25-35, 25-50, 35-45, 45-55, 50-75, 55-65, 65-75, 75-85, 75-100, 85-95, 95-105, 100-125, 105-115, 115-125, 125-135, 125-150, 135-145, 145-155, 150-175, 155-165, 165-175, 175-185, 175-200, 185-195, 195-205, 200-225, 205-215, 215-225, 225-235, 225-250, 235-245, 245-255, 250-275, 255-265, 265-275, 275-285, 275-300, 285-295, 295-305, 300-325, 305-315, 315-325, 325-335, 325-350, and 335-345 nucleotides. As a non-limiting example, the viral genome comprises a signal sequence region that is about 12 nucleotides in length. As a non-limiting example, the viral genome comprises a signal sequence region that is about 57 nucleotides in length. As a non-limiting example, the viral genome comprises a signal sequence region that is about 66 nucleotides in length. As a non-limiting example, the viral genome comprises a signal sequence region that is about 69 nucleotides in length. As a non-limiting example, the viral genome comprises a signal sequence region that is about 72 nucleotides in length. As a non-limiting example, the viral genome comprises a signal sequence region that is about 78 nucleotides in length. As a non-limiting example, the viral genome comprises a signal sequence region that is about 81 nucleotides in length. As a non-limiting example, the viral genome comprises a signal sequence region that is about 84 nucleotides in length. As a non-limiting example, the viral genome comprises a signal sequence region that is about 93 nucleotides in length. As a non-limiting example, the viral genome comprises a signal sequence region that is about 96 nucleotides in length. As a non-limiting example, the viral genome comprises a signal sequence region that is about 411 nucleotides in length.

[0479] In some embodiments, the AAV particle viral genome comprises at least one signal sequence region. Non-limiting examples of signal sequence regions not derived from an antibody sequence are described in Table 11.

TABLE 11
Signal Sequence Regions

| Sequence | Sequence | |
|---|---|---|
| Region Name | Length | SEQ ID NO |
| Signal1 | 84 | 2106 |
| Signal2 | 93 | 2107 |
| Signal3 | 96 | 2108 |
| Signal4 | 66 | 2109 |
| Signal5 | 72 | 2110 |
| Signal6 | 93 | 2111 |
| Signal7 | 69 | 2112 |
| Signal8 | 81 | 2113 |
| Signal9 | 12 | 2114 |
| Signal10 | 81 | 2115 |
| Signal11 | 66 | 2116 |
| Signal12 | 78 | 2117 |
| Signal13 | 57 | 1740 |
| Signal14 | 57 | 1741 |
| Signal15 | 57 | 1861 |
| Signal16 | 411 | 2241 |

[0480] In some embodiments, the AAV particle viral genome comprises one signal sequence region. In some embodiments, the signal sequence region is the Signal1 sequence region. In some embodiments, the signal sequence region is the Signal2 sequence region. In some embodiments, the signal sequence region is the Signal3 sequence region. In some embodiments, the signal sequence region is the Signal4 sequence region. In some embodiments, the signal sequence region is the Signal5 sequence region. In some embodiments, the signal sequence region is the Signal6 sequence region. In some embodiments, the signal sequence region is the Signal7 sequence region. In some embodiments, the signal sequence region is the Signal8 sequence region. In some embodiments, the signal sequence region is the Signal9 sequence region. In some embodiments, the signal sequence region is the Signal10 sequence region. In some embodiments, the signal sequence region is the Signal11 sequence region. In some embodiments, the signal sequence region is the Signal12 sequence region. In some embodiments, the signal sequence region is the Signal13 sequence region. In some embodiments, the signal sequence region is the Signal14 sequence region. In some embodiments, the signal sequence region is the Signal15 sequence region. In some embodiments, the signal sequence region is the Signal16 sequence region.

[0481] In some embodiments, the signal sequence is derived from an antibody sequence. As a non-limiting example, a signal sequence may be derived from the heavy chain or the light chain of an anti-tau antibody, such as, but not limited to, IPN002, PHF1 and/or MC1. While not wishing to be bound by theory, the first approximately 57 nucleotides of an antibody heavy chain or light chain sequence may be considered a signal sequence. Non-limiting examples of antibody derived signal sequences include Abi (SEQ ID NO: 1740), Ab2 (SEQ ID NO: 1741), and Ab122-124 (SEQ ID NO: 1861-1863), herein.

[0482] In some embodiments, the AAV particle viral genome comprises one signal sequence region. In some embodiments, the AAV particle viral genome comprises two signal sequence regions. In some embodiments, the AAV particle viral genome comprises three signal sequence regions. In some embodiments, the AAV particle viral genome comprises more than three signal sequence regions. In some embodiments, the signal sequences of a viral genome comprising more than one signal sequence, are the same. In another embodiment, the signal sequences of a viral genome comprising more than one signal sequence, are not the same.

[0483] In some embodiments, the AAV particle viral genome may comprise at least one tag sequence region. As used herein, the term “tag” indicates a polynucleotide sequence appended to the payload, that once expressed may be used to identify the expressed payload. Alternatively, the term “tag” may indicate a polynucleotide sequence appended to the payload that signals for retention of the expressed payload in a particular region of the cell (e.g., endoplasmic reticulum). The tag sequence region(s) may, independently, have a length such as, but not limited to, 10, 11, 12, 13, 14, 15, 16, 17, 18, 19, 20, 21, 22, 23, 24, 25, 26, 27, 28, 29, 30 or more than 30 nucleotides. The length of the tag sequence region in the viral genome may be 10-15, 15-20, 20-25, 25-30, or more than 30 nucleotides. As a non-limiting example, the viral genome comprises a tag sequence region that is about 18 nucleotides in length. As a non-limiting example, the viral genome comprises a tag sequence region that is about 21 nucleotides in length. As a non-limiting example, the viral genome comprises a tag sequence region that is about 27 nucleotides in length.

[0484] In some embodiments, the AAV particle viral genome comprises at least one tag sequence region. Non-limiting examples of tag sequence regions are described in Table 12.

TABLE 12
Tag Sequence Regions

| Sequence | Sequence | |
|---|---|---|
| Region Name | Length | SEQ ID NO |
| Tag1 | 27 | 2118 |
| Tag2 | 21 | 2119 |
| Tag3 | 18 | 2120 |
| Tag4 | 18 | 2121 |
| Tag5 | 18 | 2255 |

[0485] In some embodiments, the AAV particle viral genome comprises one tag sequence region. In some embodiments, the tag sequence region is the Tag1 sequence region. In some embodiments, the tag sequence region is the Tag2 sequence region. In some embodiments, the tag sequence region is the Tag3 sequence region. In some embodiments, the tag sequence region is the Tag4 sequence region. In some embodiments, the tag sequence region is the Tag5 sequence region.

[0486] In some embodiments, the AAV particle viral genome comprises more than one tag sequence region. In some embodiments, the AAV particle viral genome comprises two tag sequence regions. In some embodiments, the AAV particle viral genome comprises three tag sequence regions. In some embodiments, the AAV particle viral genome comprises more than three tag sequence regions.

[0487] In some embodiments, the AAV particle viral genome may comprise at least one polyadenylation sequence region. The polyadenylation sequence region(s) may, independently, have a length such as, but not limited to, 4, 5, 6, 7, 8, 9, 10, 11, 12, 13, 14, 15, 16, 17, 18, 19, 20, 21, 22, 23, 24, 25, 26, 27, 28, 29, 30, 31, 32, 33, 34, 35, 36, 37, 38, 39, 40, 41, 42, 43, 44, 45, 46, 47, 48, 49, 50, 51, 52, 53, 54, 55, 56, 57, 58, 59, 60, 61, 62, 63, 64, 65, 66, 67, 68, 69, 70, 71, 72, 73, 74, 75, 76, 77, 78, 79, 80, 81, 82, 83, 84, 85, 86, 87, 88, 89, 90, 91, 92, 93, 94, 95, 96, 97, 98, 99, 100, 101, 102, 103, 104, 105, 106, 107, 108, 109, 110, 111, 112, 113, 114, 115, 116, 117, 118, 119, 120, 121, 122, 123, 124, 125, 126, 127, 128, 129, 130, 131, 132, 133, 134, 135, 136, 137, 138, 139, 140, 141, 142, 143, 144, 145, 146, 147, 148, 149, 150, 151, 152, 153, 154, 155, 156, 157, 158, 159, 160, 161, 162, 163, 164, 165, 166, 167, 168, 169, 170, 171, 172, 173, 174, 175, 176, 177, 178, 179, 180, 181, 182, 183, 184, 185, 186, 187, 188, 189, 190, 191, 192, 193, 194, 195, 196, 197, 198, 199, 200, 201, 202, 203, 204, 205, 206, 207, 208, 209, 210, 211, 212, 213, 214, 215, 216, 217, 218, 219, 220, 221, 222, 223, 224, 225, 226, 227, 228, 229, 230, 231, 232, 233, 234, 235, 236, 237, 238, 239, 240, 241, 242, 243, 244, 245, 246, 247, 248, 249, 250, 251, 252, 253, 254, 255, 256, 257, 258, 259, 260, 261, 262, 263, 264, 265, 266, 267, 268, 269, 270, 271, 272, 273, 274, 275, 276, 277, 278, 279, 280, 281, 282, 283, 284, 285, 286, 287, 288, 289, 290, 291, 292, 293, 294, 295, 296, 297, 298, 299, 300, 301, 302, 303, 304, 305, 306, 307, 308, 309, 310, 311, 312, 313, 314, 315, 316, 317, 318, 319, 320, 321, 322, 323, 324, 325, 326, 327, 328, 329, 330, 331, 332, 333, 334, 335, 336, 337, 338, 339, 340, 341, 342, 343, 344, 345, 346, 347, 348, 349, 350, 351, 352, 353, 354, 355, 356, 357, 358, 359, 360, 361, 362, 363, 364, 365, 366, 367, 368, 369, 370, 371, 372, 373, 374, 375, 376, 377, 378, 379, 380, 381, 382, 383, 384, 385, 386, 387, 388, 389, 390, 391, 392, 393, 394, 395, 396, 397, 398, 399, 400, 401, 402, 403, 404, 405, 406, 407, 408, 409, 410, 411, 412, 413, 414, 415, 416, 417, 418, 419, 420, 421, 422, 423, 424, 425, 426, 427, 428, 429, 430, 431, 432, 433, 434, 435, 436, 437, 438, 439, 440, 441, 442, 443, 444, 445, 446, 447, 448, 449, 450, 451, 452, 453, 454, 455, 456, 457, 458, 459, 460, 461, 462, 463, 464, 465, 466, 467, 468, 469, 470, 471, 472, 473, 474, 475, 476, 477, 478, 479, 480, 481, 482, 483, 484, 485, 486, 487, 488, 489, 490, 491, 492, 493, 494, 495, 496, 497, 498, 499, 500, 501, 502, 503, 504, 505, 506, 507, 508, 509, 510, 511, 512, 513, 514, 515, 516, 517, 518, 519, 520, 521, 522, 523, 524, 525, 526, 527, 528, 529, 530, 531, 532, 533, 534, 535, 536, 537, 538, 539, 540, 541, 542, 543, 544, 545, 546, 547, 548, 549, 550, 551, 552, 553, 554, 555, 556, 557, 558, 559, 560, 561, 562, 563, 564, 565, 566, 567, 568, 569, 570, 571, 572, 573, 574, 575, 576, 577, 578, 579, 580, 581, 582, 583, 584, 585, 586, 587, 588, 589, 590, 591, 592, 593, 594, 595, 596, 597, 598, 599, and 600 nucleotides. The length of the polyadenylation sequence region for the viral genome may be 4-10, 10-20, 10-50, 20-30, 30-40, 40-50, 50-60, 50-100, 60-70, 70-80, 80-90, 90-100, 100-110, 100-150, 110-120, 120-130, 130-140, 140-150, 150-160, 150-200, 160-170, 170-180, 180-190, 190-200, 200-210, 200-250, 210-220, 220-230, 230-240, 240-250, 250-260, 250-300, 260-270, 270-280, 280-290, 290-300, 300-310, 300-350, 310-320, 320-330, 330-340, 340-350, 350-360, 350-400, 360-370, 370-380, 380-390, 390-400, 400-410, 400-450, 410-420, 420-430, 430-440, 440-450, 450-460, 450-500, 460-470, 470-480, 480-490, 490-500, 500-510, 500-550, 510-520, 520-530, 530-540, 540-550, 550-560, 550-600, 560-570, 570-580, 580-590, and 590-600 nucleotides. As a non-limiting example, the viral genome comprises a polyadenylation sequence region that is about 127 nucleotides in length. As a non-limiting example, the viral genome comprises a polyadenylation sequence region that is about 477 nucleotides in length. As a non-limiting example, the viral genome comprises a polyadenylation sequence region that is about 552 nucleotides in length.

[0488] In some embodiments, the AAV particle viral genome comprises at least one polyadenylation (polyA) sequence region. Non-limiting examples of polyA sequence regions are described in Table 13.

TABLE 13
Poly-A Signal Sequence Regions

| Sequence | Sequence | |
|---|---|---|
| Region Name | Length | SEQ ID NO |
| PolyA1 | 127 | 2122 |
| PolyA2 | 477 | 2123 |
| PolyA3 | 552 | 2124 |

[0489] In some embodiments, the AAV particle viral genome comprises one polyA sequence region. In some embodiments, the polyA sequence region is the PolyA1 sequence. In some embodiments, the polyA sequence region is the PolyA2 sequence. In some embodiments, the polyA signal sequence region is the PolyA3 sequence.

[0490] In some embodiments, the AAV particle viral genome comprises more than one polyA sequence region.

[0491] In some embodiments, the AAV particle viral genome may comprise at least one or multiple filler sequence regions. The filler region(s) may, independently, have a length such as, but not limited to, 50, 51, 52, 53, 54, 55, 56, 57, 58, 59, 60, 61, 62, 63, 64, 65, 66, 67, 68, 69, 70, 71, 72, 73, 74, 75, 76, 77, 78, 79, 80, 81, 82, 83, 84, 85, 86, 87, 88, 89, 90, 91, 92, 93, 94, 95, 96, 97, 98, 99, 100, 101, 102, 103, 104, 105, 106, 107, 108, 109, 110, 111, 112, 113, 114, 115, 116, 117, 118, 119, 120, 121, 122, 123, 124, 125, 126, 127, 128, 129, 130, 131, 132, 133, 134, 135, 136, 137, 138, 139, 140, 141, 142, 143, 144, 145, 146, 147, 148, 149, 150, 151, 152, 153, 154, 155, 156, 157, 158, 159, 160, 161, 162, 163, 164, 165, 166, 167, 168, 169, 170, 171, 172, 173, 174, 175, 176, 177, 178, 179, 180, 181, 182, 183, 184, 185, 186, 187, 188, 189, 190, 191, 192, 193, 194, 195, 196, 197, 198, 199, 200, 201, 202, 203, 204, 205, 206, 207, 208, 209, 210, 211, 212, 213, 214, 215, 216, 217, 218, 219, 220, 221, 222, 223, 224, 225, 226, 227, 228, 229, 230, 231, 232, 233, 234, 235, 236, 237, 238, 239, 240, 241, 242, 243, 244, 245, 246, 247, 248, 249, 250, 251, 252, 253, 254, 255, 256, 257, 258, 259, 260, 261, 262, 263, 264, 265, 266, 267, 268, 269, 270, 271, 272, 273, 274, 275, 276, 277, 278, 279, 280, 281, 282, 283, 284, 285, 286, 287, 288, 289, 290, 291, 292, 293, 294, 295, 296, 297, 298, 299, 300, 301, 302, 303, 304, 305, 306, 307, 308, 309, 310, 311, 312, 313, 314, 315, 316, 317, 318, 319, 320, 321, 322, 323, 324, 325, 326, 327, 328, 329, 330, 331, 332, 333, 334, 335, 336, 337, 338, 339, 340, 341, 342, 343, 344, 345, 346, 347, 348, 349, 350, 351, 352, 353, 354, 355, 356, 357, 358, 359, 360, 361, 362, 363, 364, 365, 366, 367, 368, 369, 370, 371, 372, 373, 374, 375, 376, 377, 378, 379, 380, 381, 382, 383, 384, 385, 386, 387, 388, 389, 390, 391, 392, 393, 394, 395, 396, 397, 398, 399, 400, 401, 402, 403, 404, 405, 406, 407, 408, 409, 410, 411, 412, 413, 414, 415, 416, 417, 418, 419, 420, 421, 422, 423, 424, 425, 426, 427, 428, 429, 430, 431, 432, 433, 434, 435, 436, 437, 438, 439, 440, 441, 442, 443, 444, 445, 446, 447, 448, 449, 450, 451, 452, 453, 454, 455, 456, 457, 458, 459, 460, 461, 462, 463, 464, 465, 466, 467, 468, 469, 470, 471, 472, 473, 474, 475, 476, 477, 478, 479, 480, 481, 482, 483, 484, 485, 486, 487, 488, 489, 490, 491, 492, 493, 494, 495, 496, 497, 498, 499, 500, 501, 502, 503, 504, 505, 506, 507, 508, 509, 510, 511, 512, 513, 514, 515, 516, 517, 518, 519, 520, 521, 522, 523, 524, 525, 526, 527, 528, 529, 530, 531, 532, 533, 534, 535, 536, 537, 538, 539, 540, 541, 542, 543, 544, 545, 546, 547, 548, 549, 550, 551, 552, 553, 554, 555, 556, 557, 558, 559, 560, 561, 562, 563, 564, 565, 566, 567, 568, 569, 570, 571, 572, 573, 574, 575, 576, 577, 578, 579, 580, 581, 582, 583, 584, 585, 586, 587, 588, 589, 590, 591, 592, 593, 594, 595, 596, 597, 598, 599, 600, 601, 602, 603, 604, 605, 606, 607, 608, 609, 610, 611, 612, 613, 614, 615, 616, 617, 618, 619, 620, 621, 622, 623, 624, 625, 626, 627, 628, 629, 630, 631, 632, 633, 634, 635, 636, 637, 638, 639, 640, 641, 642, 643, 644, 645, 646, 647, 648, 649, 650, 651, 652, 653, 654, 655, 656, 657, 658, 659, 660, 661, 662, 663, 664, 665, 666, 667, 668, 669, 670, 671, 672, 673, 674, 675, 676, 677, 678, 679, 680, 681, 682, 683, 684, 685, 686, 687, 688, 689, 690, 691, 692, 693, 694, 695, 696, 697, 698, 699, 700, 701, 702, 703, 704, 705, 706, 707, 708, 709, 710, 711, 712, 713, 714, 715, 716, 717, 718, 719, 720, 721, 722, 723, 724, 725, 726, 727, 728, 729, 730, 731, 732, 733, 734, 735, 736, 737, 738, 739, 740, 741, 742, 743, 744, 745, 746, 747, 748, 749, 750, 751, 752, 753, 754, 755, 756, 757, 758, 759, 760, 761, 762, 763, 764, 765, 766, 767, 768, 769, 770, 771, 772, 773, 774, 775, 776, 777, 778, 779, 780, 781, 782, 783, 784, 785, 786, 787, 788, 789, 790, 791, 792, 793, 794, 795, 796, 797, 798, 799, 800, 801, 802, 803, 804, 805, 806, 807, 808, 809, 810, 811, 812, 813, 814, 815, 816, 817, 818, 819, 820, 821, 822, 823, 824, 825, 826, 827, 828, 829, 830, 831, 832, 833, 834, 835, 836, 837, 838, 839, 840, 841, 842, 843, 844, 845, 846, 847, 848, 849, 850, 851, 852, 853, 854, 855, 856, 857, 858, 859, 860, 861, 862, 863, 864, 865, 866, 867, 868, 869, 870, 871, 872, 873, 874, 875, 876, 877, 878, 879, 880, 881, 882, 883, 884, 885, 886, 887, 888, 889, 890, 891, 892, 893, 894, 895, 896, 897, 898, 899, 900, 901, 902, 903, 904, 905, 906, 907, 908, 909, 910, 911, 912, 913, 914, 915, 916, 917, 918, 919, 920, 921, 922, 923, 924, 925, 926, 927, 928, 929, 930, 931, 932, 933, 934, 935, 936, 937, 938, 939, 940, 941, 942, 943, 944, 945, 946, 947, 948, 949, 950, 951, 952, 953, 954, 955, 956, 957, 958, 959, 960, 961, 962, 963, 964, 965, 966, 967, 968, 969, 970, 971, 972, 973, 974, 975, 976, 977, 978, 979, 980, 981, 982, 983, 984, 985, 986, 987, 988, 989, 990, 991, 992, 993, 994, 995, 996, 997, 998, 999, 1000, 1001, 1002, 1003, 1004, 1005, 1006, 1007, 1008, 1009, 1010, 1011, 1012, 1013, 1014, 1015, 1016, 1017, 1018, 1019, 1020, 1021, 1022, 1023, 1024, 1025, 1026, 1027, 1028, 1029, 1030, 1031, 1032, 1033, 1034, 1035, 1036, 1037, 1038, 1039, 1040, 1041, 1042, 1043, 1044, 1045, 1046, 1047, 1048, 1049, 1050, 1051, 1052, 1053, 1054, 1055, 1056, 1057, 1058, 1059, 1060, 1061, 1062, 1063, 1064, 1065, 1066, 1067, 1068, 1069, 1070, 1071, 1072, 1073, 1074, 1075, 1076, 1077, 1078, 1079, 1080, 1081, 1082, 1083, 1084, 1085, 1086, 1087, 1088, 1089, 1090, 1091, 1092, 1093, 1094, 1095, 1096, 1097, 1098, 1099, 1100, 1101, 1102, 1103, 1104, 1105, 1106, 1107, 1108, 1109, 1110, 1111, 1112, 1113, 1114, 1115, 1116, 1117, 1118, 1119, 1120, 1121, 1122, 1123, 1124, 1125, 1126, 1127, 1128, 1129, 1130, 1131, 1132, 1133, 1134, 1135, 1136, 1137, 1138, 1139, 1140, 1141, 1142, 1143, 1144, 1145, 1146, 1147, 1148, 1149, 1150, 1151, 1152, 1153, 1154, 1155, 1156, 1157, 1158, 1159, 1160, 1161, 1162, 1163, 1164, 1165, 1166, 1167, 1168, 1169, 1170, 1171, 1172, 1173, 1174, 1175, 1176, 1177, 1178, 1179, 1180, 1181, 1182, 1183, 1184, 1185, 1186, 1187, 1188, 1189, 1190, 1191, 1192, 1193, 1194, 1195, 1196, 1197, 1198, 1199, 1200, 1201, 1202, 1203, 1204, 1205, 1206, 1207, 1208, 1209, 1210, 1211, 1212, 1213, 1214, 1215, 1216, 1217, 1218, 1219, 1220, 1221, 1222, 1223, 1224, 1225, 1226, 1227, 1228, 1229, 1230, 1231, 1232, 1233, 1234, 1235, 1236, 1237, 1238, 1239, 1240, 1241, 1242, 1243, 1244, 1245, 1246, 1247, 1248, 1249, 1250, 1251, 1252, 1253, 1254, 1255, 1256, 1257, 1258, 1259, 1260, 1261, 1262, 1263, 1264, 1265, 1266, 1267, 1268, 1269, 1270, 1271, 1272, 1273, 1274, 1275, 1276, 1277, 1278, 1279, 1280, 1281, 1282, 1283, 1284, 1285, 1286, 1287, 1288, 1289, 1290, 1291, 1292, 1293, 1294, 1295, 1296, 1297, 1298, 1299, 1300, 1301, 1302, 1303, 1304, 1305, 1306, 1307, 1308, 1309, 1310, 1311, 1312, 1313, 1314, 1315, 1316, 1317, 1318, 1319, 1320, 1321, 1322, 1323, 1324, 1325, 1326, 1327, 1328, 1329, 1330, 1331, 1332, 1333, 1334, 1335, 1336, 1337, 1338, 1339, 1340, 1341, 1342, 1343, 1344, 1345, 1346, 1347, 1348, 1349, 1350, 1351, 1352, 1353, 1354, 1355, 1356, 1357, 1358, 1359, 1360, 1361, 1362, 1363, 1364, 1365, 1366, 1367, 1368, 1369, 1370, 1371, 1372, 1373, 1374, 1375, 1376, 1377, 1378, 1379, 1380, 1381, 1382, 1383, 1384, 1385, 1386, 1387, 1388, 1389, 1390, 1391, 1392, 1393, 1394, 1395, 1396, 1397, 1398, 1399, 1400, 1401, 1402, 1403, 1404, 1405, 1406, 1407, 1408, 1409, 1410, 1411, 1412, 1413, 1414, 1415, 1416, 1417, 1418, 1419, 1420, 1421, 1422, 1423, 1424, 1425, 1426, 1427, 1428, 1429, 1430, 1431, 1432, 1433, 1434, 1435, 1436, 1437, 1438, 1439, 1440, 1441, 1442, 1443, 1444, 1445, 1446, 1447, 1448, 1449, 1450, 1451, 1452, 1453, 1454, 1455, 1456, 1457, 1458, 1459, 1460, 1461, 1462, 1463, 1464, 1465, 1466, 1467, 1468, 1469, 1470, 1471, 1472, 1473, 1474, 1475, 1476, 1477, 1478, 1479, 1480, 1481, 1482, 1483, 1484, 1485, 1486, 1487, 1488, 1489, 1490, 1491, 1492, 1493, 1494, 1495, 1496, 1497, 1498, 1499, 1500, 1501, 1502, 1503, 1504, 1505, 1506, 1507, 1508, 1509, 1510, 1511, 1512, 1513, 1514, 1515, 1516, 1517, 1518, 1519, 1520, 1521, 1522, 1523, 1524, 1525, 1526, 1527, 1528, 1529, 1530, 1531, 1532, 1533, 1534, 1535, 1536, 1537, 1538, 1539, 1540, 1541, 1542, 1543, 1544, 1545, 1546, 1547, 1548, 1549, 1550, 1551, 1552, 1553, 1554, 1555, 1556, 1557, 1558, 1559, 1560, 1561, 1562, 1563, 1564, 1565, 1566, 1567, 1568, 1569, 1570, 1571, 1572, 1573, 1574, 1575, 1576, 1577, 1578, 1579, 1580, 1581, 1582, 1583, 1584, 1585, 1586, 1587, 1588, 1589, 1590, 1591, 1592, 1593, 1594, 1595, 1596, 1597, 1598, 1599, 1600, 1601, 1602, 1603, 1604, 1605, 1606, 1607, 1608, 1609, 1610, 1611, 1612, 1613, 1614, 1615, 1616, 1617, 1618, 1619, 1620, 1621, 1622, 1623, 1624, 1625, 1626, 1627, 1628, 1629, 1630, 1631, 1632, 1633, 1634, 1635, 1636, 1637, 1638, 1639, 1640, 1641, 1642, 1643, 1644, 1645, 1646, 1647, 1648, 1649, 1650, 1651, 1652, 1653, 1654, 1655, 1656, 1657, 1658, 1659, 1660, 1661, 1662, 1663, 1664, 1665, 1666, 1667, 1668, 1669, 1670, 1671, 1672, 1673, 1674, 1675, 1676, 1677, 1678, 1679, 1680, 1681, 1682, 1683, 1684, 1685, 1686, 1687, 1688, 1689, 1690, 1691, 1692, 1693, 1694, 1695, 1696, 1697, 1698, 1699, 1700, 1701, 1702, 1703, 1704, 1705, 1706, 1707, 1708, 1709, 1710, 1711, 1712, 1713, 1714, 1715, 1716, 1717, 1718, 1719, 1720, 1721, 1722, 1723, 1724, 1725, 1726, 1727, 1728, 1729, 1730, 1731, 1732, 1733, 1734, 1735, 1736, 1737, 1738, 1739, 1740, 1741, 1742, 1743, 1744, 1745, 1746, 1747, 1748, 1749, 1750, 1751, 1752, 1753, 1754, 1755, 1756, 1757, 1758, 1759, 1760, 1761, 1762, 1763, 1764, 1765, 1766, 1767, 1768, 1769, 1770, 1771, 1772, 1773, 1774, 1775, 1776, 1777, 1778, 1779, 1780, 1781, 1782, 1783, 1784, 1785, 1786, 1787, 1788, 1789, 1790, 1791, 1792, 1793, 1794, 1795, 1796, 1797, 1798, 1799, 1800, 1801, 1802, 1803, 1804, 1805, 1806, 1807, 1808, 1809, 1810, 1811, 1812, 1813, 1814, 1815, 1816, 1817, 1818, 1819, 1820, 1821, 1822, 1823, 1824, 1825, 1826, 1827, 1828, 1829, 1830, 1831, 1832, 1833, 1834, 1835, 1836, 1837, 1838, 1839, 1840, 1841, 1842, 1843, 1844, 1845, 1846, 1847, 1848, 1849, 1850, 1851, 1852, 1853, 1854, 1855, 1856, 1857, 1858, 1859, 1860, 1861, 1862, 1863, 1864, 1865, 1866, 1867, 1868, 1869, 1870, 1871, 1872, 1873, 1874, 1875, 1876, 1877, 1878, 1879, 1880, 1881, 1882, 1883, 1884, 1885, 1886, 1887, 1888, 1889, 1890, 1891, 1892, 1893, 1894, 1895, 1896, 1897, 1898, 1899, 1900, 1901, 1902, 1903, 1904, 1905, 1906, 1907, 1908, 1909, 1910, 1911, 1912, 1913, 1914, 1915, 1916, 1917, 1918, 1919, 1920, 1921, 1922, 1923, 1924, 1925, 1926, 1927, 1928, 1929, 1930, 1931, 1932, 1933, 1934, 1935, 1936, 1937, 1938, 1939, 1940, 1941, 1942, 1943, 1944, 1945, 1946, 1947, 1948, 1949, 1950, 1951, 1952, 1953, 1954, 1955, 1956, 1957, 1958, 1959, 1960, 1961, 1962, 1963, 1964, 1965, 1966, 1967, 1968, 1969, 1970, 1971, 1972, 1973, 1974, 1975, 1976, 1977, 1978, 1979, 1980, 1981, 1982, 1983, 1984, 1985, 1986, 1987, 1988, 1989, 1990, 1991, 1992, 1993, 1994, 1995, 1996, 1997, 1998, 1999, 2000, 2001, 2002, 2003, 2004, 2005, 2006, 2007, 2008, 2009, 2010, 2011, 2012, 2013, 2014, 2015, 2016, 2017, 2018, 2019, 2020, 2021, 2022, 2023, 2024, 2025, 2026, 2027, 2028, 2029, 2030, 2031, 2032, 2033, 2034, 2035, 2036, 2037, 2038, 2039, 2040, 2041, 2042, 2043, 2044, 2045, 2046, 2047, 2048, 2049, 2050, 2051, 2052, 2053, 2054, 2055, 2056, 2057, 2058, 2059, 2060, 2061, 2062, 2063, 2064, 2065, 2066, 2067, 2068, 2069, 2070, 2071, 2072, 2073, 2074, 2075, 2076, 2077, 2078, 2079, 2080, 2081, 2082, 2083, 2084, 2085, 2086, 2087, 2088, 2089, 2090, 2091, 2092, 2093, 2094, 2095, 2096, 2097, 2098, 2099, 2100, 2101, 2102, 2103, 2104, 2105, 2106, 2107, 2108, 2109, 2110, 2111, 2112, 2113, 2114, 2115, 2116, 2117, 2118, 2119, 2120, 2121, 2122, 2123, 2124, 2125, 2126, 2127, 2128, 2129, 2130, 2131, 2132, 2133, 2134, 2135, 2136, 2137, 2138, 2139, 2140, 2141, 2142, 2143, 2144, 2145, 2146, 2147, 2148, 2149, 2150, 2151, 2152, 2153, 2154, 2155, 2156, 2157, 2158, 2159, 2160, 2161, 2162, 2163, 2164, 2165, 2166, 2167, 2168, 2169, 2170, 2171, 2172, 2173, 2174, 2175, 2176, 2177, 2178, 2179, 2180, 2181, 2182, 2183, 2184, 2185, 2186, 2187, 2188, 2189, 2190, 2191, 2192, 2193, 2194, 2195, 2196, 2197, 2198, 2199, 2200, 2201, 2202, 2203, 2204, 2205, 2206, 2207, 2208, 2209, 2210, 2211, 2212, 2213, 2214, 2215, 2216, 2217, 2218, 2219, 2220, 2221, 2222, 2223, 2224, 2225, 2226, 2227, 2228, 2229, 2230, 2231, 2232, 2233, 2234, 2235, 2236, 2237, 2238, 2239, 2240, 2241, 2242, 2243, 2244, 2245, 2246, 2247, 2248, 2249, 2250, 2251, 2252, 2253, 2254, 2255, 2256, 2257, 2258, 2259, 2260, 2261, 2262, 2263, 2264, 2265, 2266, 2267, 2268, 2269, 2270, 2271, 2272, 2273, 2274, 2275, 2276, 2277, 2278, 2279, 2280, 2281, 2282, 2283, 2284, 2285, 2286, 2287, 2288, 2289, 2290, 2291, 2292, 2293, 2294, 2295, 2296, 2297, 2298, 2299, 2300, 2301, 2302, 2303, 2304, 2305, 2306, 2307, 2308, 2309, 2310, 2311, 2312, 2313, 2314, 2315, 2316, 2317, 2318, 2319, 2320, 2321, 2322, 2323, 2324, 2325, 2326, 2327, 2328, 2329, 2330, 2331, 2332, 2333, 2334, 2335, 2336, 2337, 2338, 2339, 2340, 2341, 2342, 2343, 2344, 2345, 2346, 2347, 2348, 2349, 2350, 2351, 2352, 2353, 2354, 2355, 2356, 2357, 2358, 2359, 2360, 2361, 2362, 2363, 2364, 2365, 2366, 2367, 2368, 2369, 2370, 2371, 2372, 2373, 2374, 2375, 2376, 2377, 2378, 2379, 2380, 2381, 2382, 2383, 2384, 2385, 2386, 2387, 2388, 2389, 2390, 2391, 2392, 2393, 2394, 2395, 2396, 2397, 2398, 2399, 2400, 2401, 2402, 2403, 2404, 2405, 2406, 2407, 2408, 2409, 2410, 2411, 2412, 2413, 2414, 2415, 2416, 2417, 2418, 2419, 2420, 2421, 2422, 2423, 2424, 2425, 2426, 2427, 2428, 2429, 2430, 2431, 2432, 2433, 2434, 2435, 2436, 2437, 2438, 2439, 2440, 2441, 2442, 2443, 2444, 2445, 2446, 2447, 2448, 2449, 2450, 2451, 2452, 2453, 2454, 2455, 2456, 2457, 2458, 2459, 2460, 2461, 2462, 2463, 2464, 2465, 2466, 2467, 2468, 2469, 2470, 2471, 2472, 2473, 2474, 2475, 2476, 2477, 2478, 2479, 2480, 2481, 2482, 2483, 2484, 2485, 2486, 2487, 2488, 2489, 2490, 2491, 2492, 2493, 2494, 2495, 2496, 2497, 2498, 2499, 2500, 2501, 2502, 2503, 2504, 2505, 2506, 2507, 2508, 2509, 2510, 2511, 2512, 2513, 2514, 2515, 2516, 2517, 2518, 2519, 2520, 2521, 2522, 2523, 2524, 2525, 2526, 2527, 2528, 2529, 2530, 2531, 2532, 2533, 2534, 2535, 2536, 2537, 2538, 2539, 2540, 2541, 2542, 2543, 2544, 2545, 2546, 2547, 2548, 2549, 2550, 2551, 2552, 2553, 2554, 2555, 2556, 2557, 2558, 2559, 2560, 2561, 2562, 2563, 2564, 2565, 2566, 2567, 2568, 2569, 2570, 2571, 2572, 2573, 2574, 2575, 2576, 2577, 2578, 2579, 2580, 2581, 2582, 2583, 2584, 2585, 2586, 2587, 2588, 2589, 2590, 2591, 2592, 2593, 2594, 2595, 2596, 2597, 2598, 2599, 2600, 2601, 2602, 2603, 2604, 2605, 2606, 2607, 2608, 2609, 2610, 2611, 2612, 2613, 2614, 2615, 2616, 2617, 2618, 2619, 2620, 2621, 2622, 2623, 2624, 2625, 2626, 2627, 2628, 2629, 2630, 2631, 2632, 2633, 2634, 2635, 2636, 2637, 2638, 2639, 2640, 2641, 2642, 2643, 2644, 2645, 2646, 2647, 2648, 2649, 2650, 2651, 2652, 2653, 2654, 2655, 2656, 2657, 2658, 2659, 2660, 2661, 2662, 2663, 2664, 2665, 2666, 2667, 2668, 2669, 2670, 2671, 2672, 2673, 2674, 2675, 2676, 2677, 2678, 2679, 2680, 2681, 2682, 2683, 2684, 2685, 2686, 2687, 2688, 2689, 2690, 2691, 2692, 2693, 2694, 2695, 2696, 2697, 2698, 2699, 2700, 2701, 2702, 2703, 2704, 2705, 2706, 2707, 2708, 2709, 2710, 2711, 2712, 2713, 2714, 2715, 2716, 2717, 2718, 2719, 2720, 2721, 2722, 2723, 2724, 2725, 2726, 2727, 2728, 2729, 2730, 2731, 2732, 2733, 2734, 2735, 2736, 2737, 2738, 2739, 2740, 2741, 2742, 2743, 2744, 2745, 2746, 2747, 2748, 2749, 2750, 2751, 2752, 2753, 2754, 2755, 2756, 2757, 2758, 2759, 2760, 2761, 2762, 2763, 2764, 2765, 2766, 2767, 2768, 2769, 2770, 2771, 2772, 2773, 2774, 2775, 2776, 2777, 2778, 2779, 2780, 2781, 2782, 2783, 2784, 2785, 2786, 2787, 2788, 2789, 2790, 2791, 2792, 2793, 2794, 2795, 2796, 2797, 2798, 2799, 2800, 2801, 2802, 2803, 2804, 2805, 2806, 2807, 2808, 2809, 2810, 2811, 2812, 2813, 2814, 2815, 2816, 2817, 2818, 2819, 2820, 2821, 2822, 2823, 2824, 2825, 2826, 2827, 2828, 2829, 2830, 2831, 2832, 2833, 2834, 2835, 2836, 2837, 2838, 2839, 2840, 2841, 2842, 2843, 2844, 2845, 2846, 2847, 2848, 2849, 2850, 2851, 2852, 2853, 2854, 2855, 2856, 2857, 2858, 2859, 2860, 2861, 2862, 2863, 2864, 2865, 2866, 2867, 2868, 2869, 2870, 2871, 2872, 2873, 2874, 2875, 2876, 2877, 2878, 2879, 2880, 2881, 2882, 2883, 2884, 2885, 2886, 2887, 2888, 2889, 2890, 2891, 2892, 2893, 2894, 2895, 2896, 2897, 2898, 2899, 2900, 2901, 2902, 2903, 2904, 2905, 2906, 2907, 2908, 2909, 2910, 2911, 2912, 2913, 2914, 2915, 2916, 2917, 2918, 2919, 2920, 2921, 2922, 2923, 2924, 2925, 2926, 2927, 2928, 2929, 2930, 2931, 2932, 2933, 2934, 2935, 2936, 2937, 2938, 2939, 2940, 2941, 2942, 2943, 2944, 2945, 2946, 2947, 2948, 2949, 2950, 2951, 2952, 2953, 2954, 2955, 2956, 2957, 2958, 2959, 2960, 2961, 2962, 2963, 2964, 2965, 2966, 2967, 2968, 2969, 2970, 2971, 2972, 2973, 2974, 2975, 2976, 2977, 2978, 2979, 2980, 2981, 2982, 2983, 2984, 2985, 2986, 2987, 2988, 2989, 2990, 2991, 2992, 2993, 2994, 2995, 2996, 2997, 2998, 2999, 3000, 3001, 3002, 3003, 3004, 3005, 3006, 3007, 3008, 3009, 3010, 3011, 3012, 3013, 3014, 3015, 3016, 3017, 3018, 3019, 3020, 3021, 3022, 3023, 3024, 3025, 3026, 3027, 3028, 3029, 3030, 3031, 3032, 3033, 3034, 3035, 3036, 3037, 3038, 3039, 3040, 3041, 3042, 3043, 3044, 3045, 3046, 3047, 3048, 3049, 3050, 3051, 3052, 3053, 3054, 3055, 3056, 3057, 3058, 3059, 3060, 3061, 3062, 3063, 3064, 3065, 3066, 3067, 3068, 3069, 3070, 3071, 3072, 3073, 3074, 3075, 3076, 3077, 3078, 3079, 3080, 3081, 3082, 3083, 3084, 3085, 3086, 3087, 3088, 3089, 3090, 3091, 3092, 3093, 3094, 3095, 3096, 3097, 3098, 3099, 3100, 3101, 3102, 3103, 3104, 3105, 3106, 3107, 3108, 3109, 3110, 3111, 3112, 3113, 3114, 3115, 3116, 3117, 3118, 3119, 3120, 3121, 3122, 3123, 3124, 3125, 3126, 3127, 3128, 3129, 3130, 3131, 3132, 3133, 3134, 3135, 3136, 3137, 3138, 3139, 3140, 3141, 3142, 3143, 3144, 3145, 3146, 3147, 3148, 3149, 3150, 3151, 3152, 3153, 3154, 3155, 3156, 3157, 3158, 3159, 3160, 3161, 3162, 3163, 3164, 3165, 3166, 3167, 3168, 3169, 3170, 3171, 3172, 3173, 3174, 3175, 3176, 3177, 3178, 3179, 3180, 3181, 3182, 3183, 3184, 3185, 3186, 3187, 3188, 3189, 3190, 3191, 3192, 3193, 3194, 3195, 3196, 3197, 3198, 3199, 3200, 3201, 3202, 3203, 3204, 3205, 3206, 3207, 3208, 3209, 3210, 3211, 3212, 3213, 3214, 3215, 3216, 3217, 3218, 3219, 3220, 3221, 3222, 3223, 3224, 3225, 3226, 3227, 3228, 3229, 3230, 3231, 3232, 3233, 3234, 3235, 3236, 3237, 3238, 3239, 3240, 3241, 3242, 3243, 3244, 3245, 3246, 3247, 3248, 3249, and 3250 nucleotides. The length of any filler region for the viral genome may be 50-100, 100-150, 150-200, 200-250, 250-300, 300-350, 350-400, 400-450, 450-500, 500-550, 550-600, 600-650, 650-700, 700-750, 750-800, 800-850, 850-900,900-950, 950-1000, 1000-1050, 1050-1100, 1100-1150, 1150-1200, 1200-1250, 1250-1300, 1300-1350, 1350-1400, 1400-1450, 1450-1500, 1500-1550, 1550-1600, 1600-1650, 1650-1700, 1700-1750, 1750-1800, 1800-1850, 1850-1900, 1900-1950, 1950-2000, 2000-2050, 2050-2100, 2100-2150, 2150-2200, 2200-2250, 2250-2300, 2300-2350, 2350-2400, 2400-2450, 2450-2500, 2500-2550, 2550-2600, 2600-2650, 2650-2700, 2700-2750, 2750-2800, 2800-2850, 2850-2900, 2900-2950, 2950-3000, 3000-3050, 3050-3100, 3100-3150, 3150-3200, and 3200-3250 nucleotides. As a non-limiting example, the viral genome comprises a filler region that is about 1153 nucleotides in length. As a non-limiting example, the viral genome comprises a filler region that is about 1240 nucleotides in length.

[0492] In some embodiments, the AAV particle viral genome comprises at least one filler sequence region. Non-limiting examples of filler sequence regions are described in Table 14.

TABLE 14
Filler Sequence Regions

| Sequence | Sequence | |
|---|---|---|
| Region Name | Length | SEQ ID NO |
| FILLER1 | 1153 | 2125 |
| FILLER2 | 1240 | 2126 |

[0493] In some embodiments, the AAV particle viral genome comprises filler sequence region FILLER1. In some embodiments, the AAV particle viral genome comprises filler sequence region FILLER2. In some embodiments, the AAV particle viral genome comprises both FILLER1 and FILLER2. In some embodiments, the AAV particle viral genome does not comprise a filler sequence region.

[0494] In some embodiments, the AAV particle viral genome may comprise any of the sequences shown in Tables 15-91.

TABLE 15
Sequence Regions in ITR to ITR Sequences

| | |
|---|---|
| TAU_ITR1 | TAU_ITR2 |
| (SEQ ID NO: 1990) | (SEQ ID NO: 1991) |

| Sequence | Region | Region | Region | Region |
|---|---|---|---|---|
| Regions | SEQ ID NO | length | SEQ ID NO | length |
| 5′ ITR | 2076 | 130 | 2076 | 130 |
| CAG | 2080 | 1715 | 2080 | 1715 |
| promoter | | | | |
| CMVie | 2081 | 299 | 2081 | 299 |
| CBA min. | 2082 | 283 | 2082 | 283 |
| Signal | 1740 | 57 | 1740 | 57 |
| VH | 1821 | 351 | 1821 | 351 |
| Constant | 1742 | 969 | 1742 | 969 |
| Linker | 1724 | 12 | 1725 | 12 |
| Linker | 1726 | 54 | 1727 | 75 |
| Signal | 1861 | 57 | 1861 | 57 |
| VL | 1939 | 336 | 1939 | 336 |
| Constant | 1864 | 321 | 1864 | 321 |
| PolyA | 2122 | 127 | 2122 | 127 |
| 3′ ITR | 2078 | 130 | 2078 | 130 |

[0495] In some embodiments, the AAV particle genome comprises SEQ ID NO: 1990 (TAU_ITR1) which comprises a 5′ inverted terminal repeat (ITR) sequence region and a 3′ ITR sequence region, a CAG promoter comprising a CMVie region and a minimal CBA promoter region, an IPN002 antibody heavy chain signal sequence, an IPN002 antibody heavy chain variable region and heavy chain constant region, a furin cleavage site, a T2A linker, an IPN002 antibody light chain signal sequence, an IPN002 antibody light chain variable region and light chain constant region, and a rabbit globin polyadenylation sequence.

[0496] In some embodiments, the AAV particle genome comprises SEQ ID NO: 3815 (TAU_ITR2) which comprises a 5 inverted terminal repeat (ITR) sequence region and a 3′ ITR sequence region, a CAG promoter comprising a CMVie region and a minimal CBA promoter region, an IPN002 antibody heavy chain signal sequence, an IPN002 antibody heavy chain variable region and heavy chain constant region, a furin cleavage site, an F2A linker, an IPN002 antibody light chain signal sequence, an IPN002 antibody light chain variable region and light chain constant region, and a rabbit globin polyadenylation sequence.

TABLE 16
Sequence Regions in ITR to ITR Sequences

| | |
|---|---|
| TAU_ITR3 | TAU_ITR4 |
| (SEQ ID NO: 1992) | (SEQ ID NO: 1993) |

| Sequence | Region | Region | Region | Region |
|---|---|---|---|---|
| Regions | SEQ ID NO | length | SEQ ID NO | length |
| 5′ ITR | 2076 | 130 | 2076 | 130 |
| CB | 2083 | 260 | 2083 | 260 |
| promoter | | | | |
| Exon | 2090 | 134 | 2090 | 134 |
| Intron | 2095 | 32 | 2095 | 32 |
| Intron | 2097 | 347 | 2097 | 347 |
| Exon | 2093 | 53 | 2093 | 53 |
| Signal | 1740 | 57 | 1740 | 57 |
| VH | 1821 | 351 | 1821 | 351 |
| Constant | 1742 | 969 | 1742 | 969 |
| Linker | 1725 | 12 | 1724 | 12 |
| Linker | 1727 | 75 | 1726 | 54 |
| Signal | 1861 | 57 | 1861 | 57 |
| VL | 1939 | 336 | 1939 | 336 |
| Constant | 1864 | 321 | 1864 | 321 |
| PolyA | 2122 | 127 | 2122 | 127 |
| 3′ ITR | 2078 | 130 | 2078 | 130 |

[0497] In some embodiments, the AAV particle genome comprises SEQ ID NO: 1992 (TAU_ITR3) which comprises a 5′ inverted terminal repeat (ITR) sequence region and a 3′ ITR sequence region, a CB promoter, an ie1 exon 1 region, an ie1 intron 1 region, a human beta-globin intron region, a human beta-globin exon region, an IPN002 antibody heavy chain signal sequence, an IPN002 antibody heavy chain variable region and heavy chain constant region, a furin cleavage site, an F2A linker, an IPN002 antibody light chain signal sequence, an IPN002 antibody light chain variable region and light chain constant region, and a rabbit globin polyadenylation sequence.

[0498] In some embodiments, the AAV particle genome comprises SEQ ID NO: 1993 (TAU_ITR4) which comprises a 5′ inverted terminal repeat (ITR) sequence region and a 3′ ITR sequence region, a CB promoter, an ie1 exon 1 region, an ie1 intron 1 region, a human beta-globin intron region, a human beta-globin exon region, an IPN002 antibody heavy chain signal sequence, an IPN002 antibody heavy chain variable region and heavy chain constant region, a furin cleavage site, a T2A linker, an IPN002 antibody light chain signal sequence, an IPN002 antibody light chain variable region and light chain constant region, and a rabbit globin polyadenylation sequence.

TABLE 17
Sequence Regions in ITR to ITR Sequences

| | TAU_ITR5 | | TAU_ITR6 | | TAU_ITR7 | | TAU_ITR8 | |
|---|---|---|---|---|---|---|---|---|
| | (SEQ ID NO: | | (SEQ ID NO: | | (SEQ ID NO: | | (SEQ ID NO: | |
| | 1994) | | 1995) | | 1996) | | 1997) | |
| | Region | | Region | | Region | | Region | |
| Sequence | SEQ | Region | SEQ | Region | SEQ | Region | SEQ | Region |
| Regions | ID NO | length | ID NO | length | ID NO | length | ID NO | length |
| 5′ ITR | 2076 | 130 | 2076 | 130 | 2076 | 130 | 2076 | 130 |
| Promoter | 2085 | 699 | 2085 | 699 | 2086 | 557 | 2086 | 557 |
| Exon | 2090 | 134 | 2090 | 134 | 2090 | 134 | 2090 | 134 |
| Intron | 2095 | 32 | 2095 | 32 | 2095 | 32 | 2095 | 32 |
| Intron | 2097 | 347 | 2097 | 347 | 2097 | 347 | 2097 | 347 |
| Exon | 2093 | 53 | 2093 | 53 | 2093 | 53 | 2093 | 53 |
| Signal | 1740 | 57 | 1740 | 57 | 1740 | 57 | 1740 | 57 |
| VH | 1821 | 351 | 1821 | 351 | 1821 | 351 | 1821 | 351 |
| Constant | 1742 | 969 | 1742 | 969 | 1742 | 969 | 1742 | 969 |
| Linker | 1725 | 12 | 1724 | 12 | 1725 | 12 | 1724 | 12 |
| Linker | 1727 | 75 | 1726 | 54 | 1727 | 75 | 1726 | 54 |
| Signal | 1861 | 57 | 1861 | 57 | 1861 | 57 | 1861 | 57 |
| VL | 1939 | 336 | 1939 | 336 | 1939 | 336 | 1939 | 336 |
| Constant | 1864 | 321 | 1864 | 321 | 1864 | 321 | 1864 | 321 |
| Poly A | 2122 | 127 | 2122 | 127 | 2122 | 127 | 2122 | 127 |
| 3′ ITR | 2078 | 130 | 2078 | 130 | 2078 | 130 | 2078 | 130 |

[0499] In some embodiments, the AAV particle genome comprises SEQ ID NO: 1994 (TAU_ITR5) which comprises a 5′ inverted terminal repeat (ITR) sequence region and a 3′ ITR sequence region, a GFAP promoter, an ie1 exon 1 region, an ie1 intron 1 region, a human beta-globin intron region, a human beta-globin exon region, an IPN002 antibody heavy chain signal sequence, an IPN002 antibody heavy chain variable region and heavy chain constant region, a furin cleavage site, an F2A linker, an IPN002 antibody light chain signal sequence, an IPN002 antibody light chain variable region and light chain constant region, and a rabbit globin polyadenylation sequence.

[0500] In some embodiments, the AAV particle genome comprises SEQ ID NO: 1995 (TAU_ITR6) which comprises a 5′ inverted terminal repeat (ITR) sequence region and a 3′ ITR sequence region, a GFAP promoter, an ie1 exon 1 region, an ie1 intron 1 region, a human beta-globin intron region, a human beta-globin exon region, an IPN002 antibody heavy chain signal sequence, an IPN002 antibody heavy chain variable region and heavy chain constant region, a furin cleavage site, a T2A linker, an IPN002 antibody light chain signal sequence, an IPN002 antibody light chain variable region and light chain constant region, and a rabbit globin polyadenylation sequence.

[0501] In some embodiments, the AAV particle genome comprises SEQ ID NO: 1996 (TAU_ITR7) which comprises a 5′ inverted terminal repeat (ITR) sequence region and a 3′ ITR sequence region, a synapsin promoter, an ie1 exon 1 region, an ie1 intron 1 region, a human beta-globin intron region, a human beta-globin exon region, an IPN002 antibody heavy chain signal sequence, an IPN002 antibody heavy chain variable region and heavy chain constant region, a furin cleavage site, an F2A linker, an IPN002 antibody light chain signal sequence, an IPN002 antibody light chain variable region and light chain constant region, and a rabbit globin polyadenylation sequence.

[0502] In some embodiments, the AAV particle genome comprises SEQ ID NO: 1997 (TAU_ITR8) which comprises a 5′ inverted terminal repeat (ITR) sequence region and a 3′ ITR sequence region, a synapsin promoter, an ie1 exon 1 region, an ie1 intron 1 region, a human beta-globin intron region, a human beta-globin exon region, an IPN002 antibody heavy chain signal sequence, an IPN002 antibody heavy chain variable region and heavy chain constant region, a furin cleavage site, a T2A linker, an IPN002 antibody light chain signal sequence, an IPN002 antibody light chain variable region and light chain constant region, and a rabbit globin polyadenylation sequence.

TABLE 18
Sequence Regions in ITR to ITR Sequences

| | TAU_ITR9 | | TAU_ITR10 | |
|---|---|---|---|---|
| | (SEQ ID NO: 1998) | | (SEQ ID NO: 1999) | |
| Sequence | Region | Region | Region | Region |
| Regions | SEQ ID NO | length | SEQ ID NO | length |
| 5′ ITR | 2076 | 130 | 2076 | 130 |
| CAG promoter | 2080 | 1715 | 2080 | 1715 |
| CMVie | 2081 | 299 | 2081 | 299 |
| CBA min. | 2082 | 283 | 2082 | 283 |
| Signal | 1861 | 57 | 1861 | 57 |
| VL | 1939 | 336 | 1939 | 336 |
| Constant | 1864 | 321 | 1864 | 321 |
| Linker | 1727 | 75 | 1726 | 54 |
| Signal | 1740 | 57 | 1740 | 57 |
| VH | 1821 | 351 | 1821 | 351 |
| Constant | 1742 | 969 | 1742 | 969 |
| PolyA | 2122 | 127 | 2122 | 127 |
| 3′ ITR | 2078 | 130 | 2078 | 130 |

[0503] In some embodiments, the AAV particle genome comprises SEQ ID NO: 1998 (TAU_ITR9) which comprises a 5′ inverted terminal repeat (ITR) sequence region and a 3′ ITR sequence region, a CAG promoter comprising a CMVie region and a minimal CBA promoter region, an IPN002 antibody light chain signal sequence, an IPN002 antibody light chain variable region and light chain constant region, an F2A linker, an IPN002 antibody heavy chain signal sequence, an IPN002 antibody heavy chain variable region and heavy chain constant region, and a rabbit globin polyadenylation sequence.

[0504] In some embodiments, the AAV particle genome comprises SEQ ID NO: 1999 (TAU_ITR10) which comprises a 5′ inverted terminal repeat (ITR) sequence region and a 3′ ITR sequence region, a CAG promoter comprising a CMVie region and a minimal CBA promoter region, an IPN002 antibody light chain signal sequence, an IPN002 antibody light chain variable region and light chain constant region, a T2A linker, an IPN002 antibody heavy chain signal sequence, an IPN002 antibody heavy chain variable region and heavy chain constant region, and a rabbit globin polyadenylation sequence.

TABLE 19
Sequence Regions in ITR to ITR Sequences

| | |
|---|---|
| TAU_ITR11 | TAU_ITR87 |
| (SEQ ID NO: 2000) | (SEQ ID NO: 2137) |

| Sequence | Region | Region | Region | Region |
|---|---|---|---|---|
| Regions | SEQ ID NO | length | SEQ ID NO | length |
| 5′ ITR | 2076 | 130 | 2076 | 130 |
| Promoter | 2083 | 260 | 2083 | 260 |
| Exon | 2090 | 134 | 2090 | 134 |
| Intron | 2095 | 32 | 2095 | 32 |
| Intron | 2097 | 347 | 2097 | 347 |
| Exon | 2093 | 53 | 2093 | 53 |
| Signal | 1861 | 57 | 1861 | 57 |
| VL | 1939 | 336 | 1939 | 336 |
| Constant | 1864 | 321 | 1864 | 321 |
| Linker | 1727 | 75 | 1726 | 54 |
| Signal | 1740 | 57 | 1740 | 57 |
| VH | 1821 | 351 | 1821 | 351 |
| Constant | 1742 | 969 | 1742 | 969 |
| PolyA | 2122 | 127 | 2122 | 127 |
| 3′ ITR | 2078 | 130 | 2078 | 130 |

[0505] In some embodiments, the AAV particle genome comprises SEQ ID NO: 2000 (TAU_ITR11) which comprises a 5′ inverted terminal repeat (ITR) sequence region and a 3′ ITR sequence region, a CB promoter, an ie1 exon 1 region, an ie1 intron 1 region, a human beta-globin intron region, a human beta-globin exon region, an IPN002 antibody light chain signal sequence, an IPN002 antibody light chain variable region and light chain constant region, an F2A linker, an IPN002 antibody heavy chain signal sequence, an IPN002 antibody heavy chain variable region and heavy chain constant region, and a rabbit globin polyadenylation sequence.

[0506] In some embodiments, the AAV particle genome comprises SEQ ID NO: 2137 (TAU_ITR87) which comprises a 5′ inverted terminal repeat (ITR) sequence region and a 3′ ITR sequence region, a CB promoter, an ie1 exon 1 region, an ie1 intron 1 region, a human beta-globin intron region, a human beta-globin exon region, an IPN002 antibody light chain signal sequence, an IPN002 antibody light chain variable region and light chain constant region, an T2A linker, an IPN002 antibody heavy chain signal sequence, an IPN002 antibody heavy chain variable region and heavy chain constant region, and a rabbit globin polyadenylation sequence.

TABLE 20
Sequence Regions in ITR to ITR Sequences

| | TAU_ITR12 | | TAU_ITR13 | | TAU_ITR14 | | TAU_ITR15 | |
|---|---|---|---|---|---|---|---|---|
| | (SEQ ID NO: | | (SEQ ID NO: | | (SEQ ID NO: | | (SEQ ID NO: | |
| | 2001) | | 2002) | | 2003) | | 2004) | |
| | Region | | Region | | Region | | Region | |
| Sequence | SEQ | Region | SEQ | Region | SEQ | Region | SEQ | Region |
| Regions | ID NO | length | ID NO | length | ID NO | length | ID NO | length |
| 5′ ITR | 2076 | 130 | 2076 | 130 | 2076 | 130 | 2076 | 130 |
| Promoter | 2085 | 699 | 2085 | 699 | 2086 | 557 | 2086 | 557 |
| Exon | 2090 | 134 | 2090 | 134 | 2090 | 134 | 2090 | 134 |
| Intron | 2095 | 32 | 2095 | 32 | 2095 | 32 | 2095 | 32 |
| Intron | 2097 | 347 | 2097 | 347 | 2097 | 347 | 2097 | 347 |
| Exon | 2093 | 53 | 2093 | 53 | 2093 | 53 | 2093 | 53 |
| Signal | 1861 | 57 | 1861 | 57 | 1861 | 57 | 1861 | 57 |
| VL | 1939 | 336 | 1939 | 336 | 1939 | 336 | 1939 | 336 |
| Constant | 1864 | 321 | 1864 | 321 | 1864 | 321 | 1864 | 321 |
| Linker | 1727 | 75 | 1726 | 54 | 1727 | 75 | 1726 | 54 |
| Signal | 1740 | 57 | 1740 | 57 | 1740 | 57 | 1740 | 57 |
| VH | 1821 | 351 | 1821 | 351 | 1821 | 351 | 1821 | 351 |
| Constant | 1742 | 969 | 1742 | 969 | 1742 | 969 | 1742 | 969 |
| Poly A | 2122 | 127 | 2122 | 127 | 2122 | 127 | 2122 | 127 |
| 3′ ITR | 2078 | 130 | 2078 | 130 | 2078 | 130 | 2078 | 130 |

[0507] In some embodiments, the AAV particle genome comprises SEQ ID NO: 2001 (TAU_ITR12) which comprises a 5′ inverted terminal repeat (ITR) sequence region and a 3′ ITR sequence region, a GFAP promoter, an ie1 exon 1 region, an ie1 intron 1 region, a human beta-globin intron region, a human beta-globin exon region, an IPN002 antibody light chain signal sequence, an IPN002 antibody light chain variable region and light chain constant region, an F2A linker, an IPN002 antibody heavy chain signal sequence, an IPN002 antibody heavy chain variable region and heavy chain constant region, and a rabbit globin polyadenylation sequence.

[0508] In some embodiments, the AAV particle genome comprises SEQ ID NO: 2002 (TAU_ITR13) which comprises a 5′ inverted terminal repeat (ITR) sequence region and a 3′ ITR sequence region, a GFAP promoter, an ie1 exon 1 region, an ie1 intron 1 region, a human beta-globin intron region, a human beta-globin exon region, an IPN002 antibody light chain signal sequence, an IPN002 antibody light chain variable region and light chain constant region, a T2A linker, an IPN002 antibody heavy chain signal sequence, an IPN002 antibody heavy chain variable region and heavy chain constant region, and a rabbit globin polyadenylation sequence.

[0509] In some embodiments, the AAV particle genome comprises SEQ ID NO: 2003 (TAU_ITR14) which comprises a 5′ inverted terminal repeat (ITR) sequence region and a 3′ ITR sequence region, a synapsin promoter, an ie1 exon 1 region, an ie1 intron 1 region, a human beta-globin intron region, a human beta-globin exon region, an IPN002 antibody light chain signal sequence, an IPN002 antibody light chain variable region and light chain constant region, an F2A linker, an IPN002 antibody heavy chain signal sequence, an IPN002 antibody heavy chain variable region and heavy chain constant region, and a rabbit globin polyadenylation sequence.

[0510] In some embodiments, the AAV particle genome comprises SEQ ID NO: 2004 (TAU_ITR15) which comprises a 5′ inverted terminal repeat (ITR) sequence region and a 3′ ITR sequence region, a synapsin promoter, an ie1 exon 1 region, an ie1 intron 1 region, a human beta-globin intron region, a human beta-globin exon region, an IPN002 antibody light chain signal sequence, an IPN002 antibody light chain variable region and light chain constant region, a T2A linker, an IPN002 antibody heavy chain signal sequence, an IPN002 antibody heavy chain variable region and heavy chain constant region, and a rabbit globin polyadenylation sequence.

TABLE 21
Sequence Regions in ITR to ITR Sequences

| | TAU_ITR16 | | TAU_ITR17 | | TAU_ITR18 | | TAU_ITR19 | | TAU_ITR20 | |
|---|---|---|---|---|---|---|---|---|---|---|
| | (SEQ ID NO: | | (SEQ ID NO: | | (SEQ ID NO: | | (SEQ ID NO: | | (SEQ ID NO: | |
| | 2005) | | 2006) | | 2007) | | 2008) | | 2009) | |
| | Region | | Region | | Region | | Region | | Region | |
| Sequence | SEQ | Region | SEQ | Region | SEQ | Region | SEQ | Region | SEQ | Region |
| Regions | ID NO | length | ID NO | length | ID NO | length | ID NO | length | ID NO | length |
| 5′ ITR | 2076 | 130 | 2076 | 130 | 2076 | 130 | 2076 | 130 | 2076 | 130 |
| Promoter | 2083 | 260 | 2083 | 260 | 2083 | 260 | 2083 | 260 | 2083 | 260 |
| Exon | 2090 | 134 | 2090 | 134 | 2090 | 134 | 2090 | 134 | 2090 | 134 |
| Intron | 2095 | 32 | 2095 | 32 | 2095 | 32 | 2095 | 32 | 2095 | 32 |
| Intron | 2097 | 347 | 2097 | 347 | 2097 | 347 | 2097 | 347 | 2097 | 347 |
| Exon | 2093 | 53 | 2093 | 53 | 2093 | 53 | 2093 | 53 | 2093 | 53 |
| Signal | 1861 | 57 | 1861 | 57 | 1861 | 57 | 1861 | 57 | 1861 | 57 |
| VL | 1921 | 321 | 1922 | 321 | 1923 | 321 | 1924 | 321 | 1925 | 321 |
| Constant | 1864 | 321 | 1864 | 321 | 1864 | 321 | 1864 | 321 | 1864 | 321 |
| Linker | 1726 | 54 | 1726 | 54 | 1726 | 54 | 1726 | 54 | 1726 | 54 |
| Signal | 1740 | 57 | 1740 | 57 | 1740 | 57 | 1740 | 57 | 1740 | 57 |
| VH | 1804 | 345 | 1805 | 345 | 1806 | 345 | 1807 | 345 | 1808 | 345 |
| Constant | 1743 | 972 | 1743 | 972 | 1743 | 972 | 1743 | 972 | 1743 | 972 |
| Poly A | 2122 | 127 | 2122 | 127 | 2122 | 127 | 2122 | 127 | 2122 | 127 |
| 3′ ITR | 2078 | 130 | 2078 | 130 | 2078 | 130 | 2078 | 130 | 2078 | 130 |

[0511] In some embodiments, the AAV particle genome comprises SEQ ID NO: 2005 (TAU_ITR16) which comprises a 5′ inverted terminal repeat (ITR) sequence region and a 3′ ITR sequence region, a CB promoter, an ie1 exon 1 region, an ie1 intron 1 region, a human beta-globin intron region, a human beta-globin exon region, an IPN002 antibody light chain signal sequence, a codon-optimized (Bioinformatics) C10.2 antibody light chain variable region, a light chain constant region, a T2A linker, an IPN002 antibody heavy chain signal sequence, a codon-optimized C10.2 antibody heavy chain variable region, a heavy chain constant region, and a rabbit globin polyadenylation sequence.

[0512] In some embodiments, the AAV particle genome comprises SEQ ID NO: 2006 (TAU_ITR17) which comprises a 5′ inverted terminal repeat (ITR) sequence region and a 3′ ITR sequence region, a CB promoter, an ie1 exon 1 region, an ie1 intron 1 region, a human beta-globin intron region, a human beta-globin exon region, an IPN002 antibody light chain signal sequence, a codon-optimized (EMBOSS) C10.2 antibody light chain variable region, a light chain constant region, a T2A linker, an IPN002 antibody heavy chain signal sequence, a codon-optimized C10.2 antibody heavy chain variable region, a heavy chain constant region, and a rabbit globin polyadenylation sequence.

[0513] In some embodiments, the AAV particle genome comprises SEQ ID NO: 2007 (TAU_ITR18) which comprises a 5′ inverted terminal repeat (ITR) sequence region and a 3′ ITR sequence region, a CB promoter, an ie1 exon 1 region, an ie1 intron 1 region, a human beta-globin intron region, a human beta-globin exon region, an IPN002 antibody light chain signal sequence, a codon-optimized (GeneInfinity) C10.2 antibody light chain variable region, a light chain constant region, a T2A linker, an IPN002 antibody heavy chain signal sequence, a codon-optimized C10.2 antibody heavy chain variable region, a heavy chain constant region, and a rabbit globin polyadenylation sequence.

[0514] In some embodiments, the AAV particle genome comprises SEQ ID NO: 2008 (TAU_ITR19) which comprises a 5′ inverted terminal repeat (ITR) sequence region and a 3′ ITR sequence region, a CB promoter, an ie1 exon 1 region, an ie1 intron 1 region, a human beta-globin intron region, a human beta-globin exon region, an IPN002 antibody light chain signal sequence, a codon-optimized (GregThatcher) C10.2 antibody light chain variable region, a light chain constant region, a T2A linker, an IPN002 antibody heavy chain signal sequence, a codon-optimized C10.2 antibody heavy chain variable region, a heavy chain constant region, and a rabbit globin polyadenylation sequence.

[0515] In some embodiments, the AAV particle genome comprises SEQ ID NO: 2009 (TAU_ITR20) which comprises a 5′ inverted terminal repeat (ITR) sequence region and a 3′ ITR sequence region, a CB promoter, an ie1 exon 1 region, an ie1 intron 1 region, a human beta-globin intron region, a human beta-globin exon region, an IPN002 antibody light chain signal sequence, a codon-optimized (IDT) C10.2 antibody light chain variable region, a light chain constant region, a T2A linker, an IPN002 antibody heavy chain signal sequence, a codon-optimized C10.2 antibody heavy chain variable region, a heavy chain constant region, and a rabbit globin polyadenylation sequence.

TABLE 22
Sequence Regions in ITR to ITR Sequences

| | TAU_ITR21 | | TAU_ITR22 | | TAU_ITR23 | | TAU_ITR24 | | TAU_ITR25 | |
|---|---|---|---|---|---|---|---|---|---|---|
| | (SEQ ID NO: | | (SEQ ID NO: | | (SEQ ID NO: | | (SEQ ID NO: | | (SEQ ID NO: | |
| | 2010) | | 2011) | | 2012) | | 2013) | | 2014) | |
| | Region | | Region | | Region | | Region | | Region | |
| Sequence | SEQ | Region | SEQ | Region | SEQ | Region | SEQ | Region | SEQ | Region |
| Regions | ID NO | length | ID NO | length | ID NO | length | ID NO | length | ID NO | length |
| 5′ ITR | 2076 | 130 | 2076 | 130 | 2076 | 130 | 2076 | 130 | 2076 | 130 |
| Promoter | 2083 | 260 | 2083 | 260 | 2083 | 260 | 2083 | 260 | 2083 | 260 |
| Exon | 2090 | 134 | 2090 | 134 | 2090 | 134 | 2090 | 134 | 2090 | 134 |
| Intron | 2095 | 32 | 2095 | 32 | 2095 | 32 | 2095 | 32 | 2095 | 32 |
| Intron | 2097 | 347 | 2097 | 347 | 2097 | 347 | 2097 | 347 | 2097 | 347 |
| Exon | 2093 | 53 | 2093 | 53 | 2093 | 53 | 2093 | 53 | 2093 | 53 |
| Signal | 1861 | 57 | 1861 | 57 | 1861 | 57 | 1861 | 57 | 1861 | 57 |
| VL | 1926 | 321 | 1927 | 321 | 1928 | 321 | 1929 | 321 | 1930 | 321 |
| Constant | 1864 | 321 | 1864 | 321 | 1864 | 321 | 1864 | 321 | 1864 | 321 |
| Linker | 1726 | 54 | 1726 | 54 | 1726 | 54 | 1726 | 54 | 1726 | 54 |
| Signal | 1740 | 57 | 1740 | 57 | 1740 | 57 | 1740 | 57 | 1740 | 57 |
| VH | 1809 | 345 | 1810 | 345 | 1811 | 345 | 1812 | 345 | 1813 | 345 |
| Constant | 1743 | 972 | 1743 | 972 | 1743 | 972 | 1743 | 972 | 1743 | 972 |
| Poly A | 2122 | 127 | 2122 | 127 | 2122 | 127 | 2122 | 127 | 2122 | 127 |
| 3′ ITR | 2078 | 130 | 2078 | 130 | 2078 | 130 | 2078 | 130 | 2078 | 130 |

[0516] In some embodiments, the AAV particle genome comprises SEQ ID NO: 2010 (TAU_ITR21) which comprises a 5′ inverted terminal repeat (ITR) sequence region and a 3′ ITR sequence region, a CB promoter, an ie1 exon 1 region, an ie1 intron 1 region, a human beta-globin intron region, a human beta-globin exon region, an IPN002 antibody light chain signal sequence, a codon-optimized (InSilico) C10.2 antibody light chain variable region, a light chain constant region, a T2A linker, an IPN002 antibody heavy chain signal sequence, a codon-optimized C10.2 antibody heavy chain variable region, a heavy chain constant region, and a rabbit globin polyadenylation sequence.

[0517] In some embodiments, the AAV particle genome comprises SEQ ID NO: 2011 (TAU_ITR22) which comprises a 5′ inverted terminal repeat (ITR) sequence region and a 3′ ITR sequence region, a CB promoter, an ie1 exon 1 region, an ie1 intron 1 region, a human beta-globin intron region, a human beta-globin exon region, an IPN002 antibody light chain signal sequence, a codon-optimized (MolBio) C10.2 antibody light chain variable region, a light chain constant region, a T2A linker, an IPN002 antibody heavy chain signal sequence, a codon-optimized C10.2 antibody heavy chain variable region, a heavy chain constant region, and a rabbit globin polyadenylation sequence.

[0518] In some embodiments, the AAV particle genome comprises SEQ ID NO: 2012 (TAU_ITR23) which comprises a 5′ inverted terminal repeat (ITR) sequence region and a 3′ ITR sequence region, a CB promoter, an ie1 exon 1 region, an ie1 intron 1 region, a human beta-globin intron region, a human beta-globin exon region, an IPN002 antibody light chain signal sequence, a codon-optimized (N2P) C10.2 antibody light chain variable region, a light chain constant region, a T2A linker, an IPN002 antibody heavy chain signal sequence, a codon-optimized C10.2 antibody heavy chain variable region, a heavy chain constant region, and a rabbit globin polyadenylation sequence.

[0519] In some embodiments, the AAV particle genome comprises SEQ ID NO: 2013 (TAU_ITR24) which comprises a 5′ inverted terminal repeat (ITR) sequence region and a 3′ ITR sequence region, a CB promoter, an ie1 exon 1 region, an ie1 intron 1 region, a human beta-globin intron region, a human beta-globin exon region, an IPN002 antibody light chain signal sequence, a codon-optimized (SnapGene) C10.2 antibody light chain variable region, a light chain constant region, a T2A linker, an IPN002 antibody heavy chain signal sequence, a codon-optimized C10.2 antibody heavy chain variable region, a heavy chain constant region, and a rabbit globin polyadenylation sequence.

[0520] In some embodiments, the AAV particle genome comprises SEQ ID NO: 2014 (TAU_ITR25) which comprises a 5′ inverted terminal repeat (ITR) sequence region and a 3′ ITR sequence region, a CB promoter, an ie1 exon 1 region, an ie1 intron 1 region, a human beta-globin intron region, a human beta-globin exon region, an IPN002 antibody light chain signal sequence, a codon-optimized (Vector NTI) C10.2 antibody light chain variable region, a light chain constant region, a T2A linker, an IPN002 antibody heavy chain signal sequence, a codon-optimized C10.2 antibody heavy chain variable region, a heavy chain constant region, and a rabbit globin polyadenylation sequence.

TABLE 23
Sequence Regions in ITR to ITR Sequences

| | TAU_ITR26 | | TAU_ITR27 | | TAU_ITR28 | | TAU_ITR29 | | TAU_ITR30 | |
|---|---|---|---|---|---|---|---|---|---|---|
| | (SEQ ID NO: | | (SEQ ID NO: | | (SEQ ID NO: | | (SEQ ID NO: | | (SEQ ID NO: | |
| | 2015) | | 2016) | | 2017) | | 2018) | | 2019) | |
| | Region | | Region | | Region | | Region | | Region | |
| Sequence | SEQ | Region | SEQ | Region | SEQ | Region | SEQ | Region | SEQ | Region |
| Regions | ID NO | length | ID NO | length | ID NO | length | ID NO | length | ID NO | length |
| 5′ ITR | 2077 | 141 | 2077 | 141 | 2077 | 141 | 2077 | 141 | 2077 | 141 |
| Promoter | 2084 | 654 | 2084 | 654 | 2084 | 654 | 2084 | 654 | 2084 | 654 |
| Exon | 2090 | 134 | 2090 | 134 | 2090 | 134 | 2090 | 134 | 2090 | 134 |
| Intron | 2095 | 32 | 2095 | 32 | 2095 | 32 | 2095 | 32 | 2095 | 32 |
| Intron | 2097 | 347 | 2097 | 347 | 2097 | 347 | 2097 | 347 | 2097 | 347 |
| Exon | 2093 | 53 | 2093 | 53 | 2093 | 53 | 2093 | 53 | 2093 | 53 |
| Signal | 1740 | 57 | — | — | 1740 | 57 | 1740 | 57 | 1740 | 57 |
| VH | 1854 | 354 | 1859 | 354 | 1852 | 354 | 1850 | 354 | 1856 | 354 |
| Constant | 1742 | 969 | 1742 | 969 | 1742 | 969 | 1742 | 969 | 1742 | 969 |
| Linker | 1724 | 12 | 1724 | 12 | 1724 | 12 | 1724 | 12 | 1724 | 12 |
| Linker | 1726 | 54 | 1726 | 54 | 1726 | 54 | 1726 | 54 | 1726 | 54 |
| Signal | 1861 | 57 | 1861 | 57 | 1861 | 57 | 1861 | 57 | 1861 | 57 |
| VL | 1975 | 321 | 1980 | 321 | 1973 | 321 | 1971 | 321 | 1977 | 321 |
| Constant | 1864 | 321 | 1864 | 321 | 1864 | 321 | 1864 | 321 | 1864 | 321 |
| Poly A | 2123 | 477 | 2123 | 477 | 2123 | 477 | 2123 | 477 | 2123 | 477 |
| 3′ HR | 2079 | 141 | 2079 | 141 | 2079 | 141 | 2079 | 141 | 2079 | 141 |

[0521] In some embodiments, the AAV particle genome comprises SEQ ID NO: 2015 (TAU_ITR26) which comprises a 5′ inverted terminal repeat (ITR) sequence region and a 3′ ITR sequence region, a CBA promoter, an ie1 exon 1 region, an ie1 intron 1 region, a human beta-globin intron region, a human beta-globin exon region, an IPN002 antibody heavy chain signal sequence, a codon-optimized (GeneScript) PT3 antibody heavy chain variable region, a heavy chain constant region, a furin cleavage site, a T2A linker, an IPN002 antibody light chain signal sequence, a codon-optimized PT3 antibody light chain variable region, a light chain constant region, and a human growth hormone polyadenylation sequence.

[0522] In some embodiments, the AAV particle genome comprises SEQ ID NO: 2016 (TAU_ITR27) which comprises a 5′ inverted terminal repeat (ITR) sequence region and a 3′ ITR sequence region, a CBA promoter, an ie1 exon 1 region, an ie1 intron 1 region, a human beta-globin intron region, a human beta-globin exon region, a codon-optimized (SnapGene) PT3 antibody heavy chain variable region, a heavy chain constant region, a furin cleavage site, a T2A linker, an IPN002 antibody light chain signal sequence, a codon-optimized PT3 antibody light chain variable region, a light chain constant region, and a human growth hormone polyadenylation sequence.

[0523] In some embodiments, the AAV particle genome comprises SEQ ID NO: 2017 (TAU_ITR28) which comprises a 5′ inverted terminal repeat (ITR) sequence region and a 3′ ITR sequence region, a CBA promoter, an ie1 exon 1 region, an ie1 intron 1 region, a human beta-globin intron region, a human beta-globin exon region, an IPN002 antibody heavy chain signal sequence, a codon-optimized (EMBOSS) PT3 antibody heavy chain variable region, a heavy chain constant region, a furin cleavage site, a T2A linker, an IPN002 antibody light chain signal sequence, a codon-optimized PT3 antibody light chain variable region, a light chain constant region, and a human growth hormone polyadenylation sequence.

[0524] In some embodiments, the AAV particle genome comprises SEQ ID NO: 2018 (TAU_ITR29) which comprises a 5′ inverted terminal repeat (ITR) sequence region and a 3′ ITR sequence region, a CBA promoter, an ie1 exon 1 region, an ie1 intron 1 region, a human beta-globin intron region, a human beta-globin exon region, an IPN002 antibody heavy chain signal sequence, a codon-optimized (Bioinformatics) PT3 antibody heavy chain variable region, a heavy chain constant region, a furin cleavage site, a T2A linker, an IPN002 antibody light chain signal sequence, a codon-optimized PT3 antibody light chain variable region, a light chain constant region, and a human growth hormone polyadenylation sequence.

[0525] In some embodiments, the AAV particle genome comprises SEQ ID NO: 2019 (TAU_ITR30) which comprises a 5′ inverted terminal repeat (ITR) sequence region and a 3′ ITR sequence region, a CBA promotcr, an el exon 1 region, an ie1 intron 1 region, a human beta-globin intron region, a human beta-globin exon region, an IPN002 antibody heavy chain signal sequence, a codon-optimized (NUS) PT3 antibody heavy chain variable region, a heavy chain constant region, a furin cleavage site, a T2A linker, an IPN002 antibody light chain signal sequence, a codon-optimized PT3 antibody light chain variable region, a light chain constant region, and a human growth hormone polyadenylation sequence.

TABLE 24
Sequence Regions in ITR to ITR Sequences

| | TAU_ITR31 | | TAU_ITR32 | | TAU_ITR33 | | TAU_ITR34 | | TAU_ITR35 | |
|---|---|---|---|---|---|---|---|---|---|---|
| | (SEQ ID NO: | | (SEQ ID NO: | | (SEQ ID NO: | | (SEQ ID NO | | (SEQ ID NO: | |
| | 2020) | | 2021) | | 2022) | | 2023) | | 2024) | |
| | Region | | Region | | Region | | Region | | Region | |
| Sequence | SEQ | Region | SEQ | Region | SEQ | Region | SEQ | Region | SEQ | Region |
| Regions | ID NO | length | ID NO | length | ID NO | length | ID NO | length | ID NO | length |
| 5′ ITR | 2077 | 141 | 2077 | 141 | 2077 | 141 | 2077 | 141 | 2077 | 141 |
| Promoter | 2084 | 654 | 2084 | 654 | 2084 | 654 | 2084 | 654 | 2084 | 654 |
| Exon | 2090 | 134 | 2090 | 134 | 2090 | 134 | 2090 | 134 | 2090 | 134 |
| Intron | 2095 | 32 | 2095 | 32 | 2095 | 32 | 2095 | 32 | 2095 | 32 |
| Intron | 2097 | 347 | 2097 | 347 | 2097 | 347 | 2097 | 347 | 2097 | 347 |
| Exon | 2093 | 53 | 2093 | 53 | 2093 | 53 | 2093 | 53 | 2093 | 53 |
| Signal | 1740 | 57 | 1740 | 57 | 1740 | 57 | 1740 | 57 | 1740 | 57 |
| VH | 1857 | 354 | 1853 | 354 | 1855 | 354 | 1851 | 354 | 1858 | 354 |
| Constant | 1742 | 969 | 1742 | 969 | 1742 | 969 | 1742 | 969 | 1742 | 969 |
| Linker | 1724 | 12 | 1724 | 12 | 1724 | 12 | 1724 | 12 | 1724 | 12 |
| Linker | 1726 | 54 | 1726 | 54 | 1726 | 54 | 1726 | 54 | 1726 | 54 |
| Signal | 1861 | 57 | 1861 | 57 | 1861 | 57 | 1861 | 57 | 1861 | 57 |
| VL | 1978 | 321 | 1974 | 321 | 1976 | 321 | 1972 | 321 | 1979 | 321 |
| Constant | 1864 | 321 | 1864 | 321 | 1864 | 321 | 1864 | 321 | 1864 | 321 |
| Poly A | 2123 | 477 | 2123 | 477 | 2123 | 477 | 2123 | 477 | 2123 | 477 |
| 3′ ITR | 2079 | 141 | 2079 | 141 | 2079 | 141 | 2079 | 141 | 2079 | 141 |

[0526] In some embodiments, the AAV particle genome comprises SEQ ID NO: 2020 (TAU_ITR31) which comprises a 5′ inverted terminal repeat (ITR) sequence region and a 3′ ITR sequence region, a CBA promoter, an ie1 exon 1 region, an ie1 intron 1 region, a human beta-globin intron region, a human beta-globin exon region, an IPN002 antibody heavy chain signal sequence, a codon-optimized (NUS2) PT3 antibody heavy chain variable region, a heavy chain constant region, a furin cleavage site, a T2A linker, an IPN002 antibody light chain signal sequence, a codon-optimized PT3 antibody light chain variable region, a light chain constant region, and a human growth hormone polyadenylation sequence.

[0527] In some embodiments, the AAV particle genome comprises SEQ ID NO: 2021 (TAU_ITR32) which comprises a 5′ inverted terminal repeat (ITR) sequence region and a 3′ ITR sequence region, a CBA promoter, an ie1 exon 1 region, an ie1 intron 1 region, a human beta-globin intron region, a human beta-globin exon region, an IPN002 antibody heavy chain signal sequence, a codon-optimized (GeneInfinity) PT3 antibody heavy chain variable region, a heavy chain constant region, a furin cleavage site, a T2A linker, an IPN002 antibody light chain signal sequence, a codon-optimized PT3 antibody light chain variable region, a light chain constant region, and a human growth hormone polyadenylation sequence.

[0528] In some embodiments, the AAV particle genome comprises SEQ ID NO: 2022 (TAU_ITR33) which comprises a 5′ inverted terminal repeat (ITR) sequence region and a 3′ ITR sequence region, a CBA promoter, an ie1 exon 1 region, an ie1 intron 1 region, a human beta-globin intron region, a human beta-globin exon region, an IPN002 antibody heavy chain signal sequence, a codon-optimized (IDT) PT3 antibody heavy chain variable region, a heavy chain constant region, a furin cleavage site, a T2A linker, an IPN002 antibody light chain signal sequence, a codon-optimized PT3 antibody light chain variable region, a light chain constant region, and a human growth hormone polyadenylation sequence.

[0529] In some embodiments, the AAV particle genome comprises SEQ ID NO: 2023 (TAU_ITR34) which comprises a 5′ inverted terminal repeat (ITR) sequence region and a 3′ ITR sequence region, a CBA promoter, an ie1 exon 1 region, an ie1 intron 1 region, a human beta-globin intron region, a human beta-globin exon region, an IPN002 antibody heavy chain signal sequence, a codon-optimized (Bioinformatics 2) PT3 antibody heavy chain variable region, a heavy chain constant region, a furin cleavage site, a T2A linker, an IPN002 antibody light chain signal sequence, a codon-optimized PT3 antibody light chain variable region, a light chain constant region, and a human growth hormone polyadenylation sequence.

[0530] In some embodiments, the AAV particle genome comprises SEQ ID NO: 2024 (TAU_ITR35) which comprises a 5′ inverted terminal repeat (ITR) sequence region and a 3′ ITR sequence region, a CBA promoter, an ie1 exon 1 region, an ie1 intron 1 region, a human beta-globin intron region, a human beta-globin exon region, an IPN002 antibody heavy chain signal sequence, a codon-optimized (NUS3) PT3 antibody heavy chain variable region, a heavy chain constant region, a furin cleavage site, a T2A linker, an IPN002 antibody light chain signal sequence, a codon-optimized PT3 antibody light chain variable region, a light chain constant region, and a human growth hormone polyadenylation sequence.

TABLE 25
Sequence Regions in ITR to ITR Sequences

| | TAU_ITR36 | | TAU_ITR37 | | TAU_ITR38 | | TAU_ITR39 | | TAU_ITR40 | |
|---|---|---|---|---|---|---|---|---|---|---|
| | (SEQ ID NO: | | (SEQ ID NO: | | (SEQ ID NO: | | (SEQ ID NO: | | (SEQ ID NO: | |
| | 2025) | | 2026) | | 2027) | | 2028) | | 2029) | |
| | Region | | Region | | Region | | Region | | Region | |
| Sequence | SEQ | Region | SEQ | Region | SEQ | Region | SEQ | Region | SEQ | Region |
| Regions | ID NO | length | ID NO | length | ID NO | length | ID NO | length | ID NO | length |
| 5′ ITR | 2077 | 141 | 2077 | 141 | 2077 | 141 | 2077 | 141 | 2077 | 141 |
| CAG | 2080 | 1715 | 2080 | 1715 | 2080 | 1715 | 2080 | 1715 | 2080 | 1715 |
| promoter | | | | | | | | | | |
| CMVie | 2081 | 299 | 2081 | 299 | 2081 | 299 | 2081 | 299 | 2081 | 299 |
| CBA min. | 2082 | 283 | 2082 | 283 | 2082 | 283 | 2082 | 283 | 2082 | 283 |
| Signal | 1741 | 57 | 2106 | 84 | 2106 | 84 | 1741 | 57 | 1741 | 57 |
| VH | 1839 | 351 | 1839 | 351 | 1839 | 351 | 1839 | 351 | 1839 | 351 |
| Linker | 1730 | 45 | 1730 | 45 | 1730 | 45 | 1730 | 45 | 1730 | 45 |
| VL | 1957 | 339 | 1957 | 339 | 1957 | 339 | 1957 | 339 | 1957 | 339 |
| Tag | 2118 | 27 | 2119 | 21 | 2121 | 18 | 2118 | 27 | 2121 | 18 |
| Poly A | 2122 | 127 | 2123 | 477 | 2123 | 477 | 2123 | 477 | 2123 | 477 |
| Filler | 2125 | 1153 | 2126 | 1240 | 2126 | 1240 | 2126 | 1240 | 2126 | 1240 |
| 3′ ITR | 2079 | 141 | 2079 | 141 | 2079 | 141 | 2079 | 141 | 2079 | 141 |

[0531] In some embodiments, the AAV particle genome comprises SEQ ID NO: 2025 (TAU_ITR36) which comprises a 5′ inverted terminal repeat (ITR) sequence region and a 3′ ITR sequence region, a CAG promoter comprising a CMVie region and a minimal CBA promoter region, a PHF1 antibody heavy chain signal sequence, a PHF1 antibody heavy chain variable region, a (G4S)3 linker (“(G4S)3” disclosed as SEQ ID NO: 4537), a PHF1 antibody light chain variable region, an HA tag, a rabbit globin polyadenylation signal sequence and a human albumin derived filler sequence.

[0532] In some embodiments, the AAV particle genome comprises SEQ ID NO: 2026 (TAU_ITR37) which comprises a 5′ inverted terminal repeat (ITR) sequence region and a 3′ ITR sequence region, a CAG promoter comprising a CMVie region and a minimal CBA promoter region, a human growth hormone-2 signal sequence, a PHF1 antibody heavy chain variable region, a (G4S)3 linker (“(G4S)3” disclosed as SEQ ID NO: 4537), a PHF1 antibody light chain variable region, an SEKDEL tag (“SEKDEL” disclosed as SEQ ID NO: 4546), a human growth hormone polyadenylation signal sequence and a human albumin derived filler sequence.

[0533] In some embodiments, the AAV particle genome comprises SEQ ID NO: 2027 (TAU_ITR38) which comprises a 5′ inverted terminal repeat (ITR) sequence region and a 3′ ITR sequence region, a CAG promoter comprising a CMVie region and a minimal CBA promoter region, a human growth hormone-2 signal sequence, a PHF1 antibody heavy chain variable region, a (G4S)3 linker (“(G4S)3” disclosed as SEQ ID NO: 4537), a PHF1 antibody light chain variable region, a His tag, a human growth hormone polyadenylation signal sequence and a human albumin derived filler sequence.

[0534] In some embodiments, the AAV particle genome comprises SEQ ID NO: 2028 (TAU_ITR39) which comprises a 5′ inverted terminal repeat (ITR) sequence region and a 3′ ITR sequence region, a CAG promoter comprising a CMVie region and a minimal CBA promoter region, a PHF1 antibody heavy chain signal sequence, a PHF1 antibody heavy chain variable region, a (G4S)3 linker (“(G4S)3” disclosed as SEQ ID NO: 4537), a PHF1 antibody light chain variable region, an HA tag, a human growth hormone polyadenylation signal sequence and a human albumin derived filler sequence.

[0535] In some embodiments, the AAV particle genome comprises SEQ ID NO: 2029 (TAU_ITR40) which comprises a 5′ inverted terminal repeat (ITR) sequence region and a 3′ ITR sequence region, a CAG promoter comprising a CMVie region and a minimal CBA promoter region, a PHF1 antibody heavy chain signal sequence, a PHF1 antibody heavy chain variable region, a (G4S)3 linker (“(G4S)3” disclosed as SEQ ID NO: 4537), a PHF1 antibody light chain variable region, a His tag, a human growth hormone polyadenylation signal sequence and a human albumin derived filler sequence.

TABLE 26
Sequence Regions in ITR to ITR Sequences

| | TAU_ITR41 | | TAU_ITR42 | | TAU_ITR43 | | TAU_ITR44 | | TAU_ITR45 | |
|---|---|---|---|---|---|---|---|---|---|---|
| | (SEQ ID NO: | | (SEQ ID NO: | | (SEQ ID NO: | | (SEQ ID NO: | | (SEQ ID NO: | |
| | 2030) | | 2031) | | 2032) | | 2033) | | 2034) | |
| | Region | | Region | | Region | | Region | | Region | |
| Sequence | SEQ | Region | SEQ | Region | SEQ | Region | SEQ | Region | SEQ | Region |
| Regions | ID NO | length | ID NO | length | ID NO | length | ID NO | length | ID NO | length |
| 5′ ITR | 2077 | 141 | 2077 | 141 | 2077 | 141 | 2077 | 141 | 2077 | 141 |
| CAG | 2080 | 1715 | 2080 | 1715 | 2080 | 1715 | 2080 | 1715 | 2080 | 1715 |
| promoter | | | | | | | | | | |
| CMVie | 2081 | 299 | 2081 | 299 | 2081 | 299 | 2081 | 299 | 2081 | 299 |
| CBA min. | 2082 | 283 | 2082 | 283 | 2082 | 283 | 2082 | 283 | 2082 | 283 |
| Signal | 2016 | 84 | 2106 | 84 | 1862 | 57 | 1862 | 57 | 1862 | 57 |
| VL | 1957 | 339 | 1957 | 339 | 1957 | 339 | 1957 | 339 | 1957 | 339 |
| Linker | 1730 | 45 | 1730 | 45 | 1730 | 45 | 1730 | 45 | 1730 | 45 |
| VH | 1839 | 351 | 1839 | 351 | 1839 | 351 | 1839 | 351 | 1839 | 351 |
| Tag | 2120 | 18 | 2121 | 18 | 2118 | 27 | 2121 | 18 | 2118 | 27 |
| Poly A | 2123 | 447 | 2123 | 477 | 2123 | 477 | 2123 | 477 | 2122 | 127 |
| Filler | 2126 | 1240 | 2126 | 1240 | 2126 | 1240 | 2126 | 1240 | 2125 | 1153 |
| 3′ ITR | 2079 | 141 | 2079 | 141 | 2079 | 141 | 2079 | 141 | 2079 | 141 |

[0536] In some embodiments, the AAV particle genome comprises SEQ ID NO: 2030 (TAU_ITR41) which comprises a 5′ inverted terminal repeat (ITR) sequence region and a 3′ ITR sequence region, a CAG promoter comprising a CMVie region and a minimal CBA promoter region, a human growth hormone-2 signal sequence, a PHF1 antibody light chain variable region, a (G4S)3 linker (“(G4S)3” disclosed as SEQ ID NO: 4537), a PHF1 antibody heavy chain variable region, a SEKDEL tag (“SEKDEL” disclosed as SEQ ID NO: 4546), a human growth hormone polyadenylation signal sequence and a human albumin derived filler sequence.

[0537] In some embodiments, the AAV particle genome comprises SEQ ID NO: 2031 (TAU_ITR42) which comprises a 5′ inverted terminal repeat (ITR) sequence region and a 3′ ITR sequence region, a CAG promoter comprising a CMVie region and a minimal CBA promoter region, a human growth hormone-2 signal sequence, a PHF1 antibody light chain variable region, a (G4S)3 linker (“(G4S)3” disclosed as SEQ ID NO: 4537), a PHF1 antibody heavy chain variable region, a His tag, a human growth hormone polyadenylation signal sequence and a human albumin derived filler sequence.

[0538] In some embodiments, the AAV particle genome comprises SEQ ID NO: 2032 (TAU_ITR43) which comprises a 5′ inverted terminal repeat (ITR) sequence region and a 3′ ITR sequence region, a CAG promoter comprising a CMVie region and a minimal CBA promoter region, a PHF1 antibody light chain signal sequence, a PHF1 antibody light chain variable region, a (G4S)3 linker (“(G4S)3” disclosed as SEQ ID NO: 4537), a PHF1 antibody heavy chain variable region, an HA tag, a human growth hormone polyadenylation signal sequence and a human albumin derived filler sequence.

[0539] In some embodiments, the AAV particle genome comprises SEQ ID NO: 2033 (TAU_ITR44) which comprises a 5′ inverted terminal repeat (ITR) sequence region and a 3′ ITR sequence region, a CAG promoter comprising a CMVie region and a minimal CBA promoter region, a PHF1 antibody light chain signal sequence, a PHF1 antibody light chain variable region, a (G4S)3 linker (“(G4S)3” disclosed as SEQ ID NO: 4537), a PHF1 antibody heavy chain variable region, a His tag, a human growth hormone polyadenylation signal sequence and a human albumin derived filler sequence.

[0540] In some embodiments, the AAV particle genome comprises SEQ ID NO: 2034 (TAU_ITR45) which comprises a 5′ inverted terminal repeat (ITR) sequence region and a 3′ ITR sequence region, a CAG promoter comprising a CMVie region and a minimal CBA promoter region, a PHF1 antibody light chain signal sequence, a PHF1 antibody light chain variable region, a (G4S)3 linker (“(G4S)3” disclosed as SEQ ID NO: 4537), a PHF1 antibody heavy chain variable region, an HA tag, a rabbit globin polyadenylation signal sequence and a human albumin derived filler sequence.

TABLE 27
Sequence Regions in ITR to ITR Sequences

| | TAU_ITR46 | | TAU_ITR47 | | TAU_ITR48 | | TAU_ITR49 | | TAU_ITR50 | |
|---|---|---|---|---|---|---|---|---|---|---|
| | (SEQ ID NO: | | (SEQ ID NO: | | (SEQ ID NO: | | (SEQ ID NO: | | (SEQ ID NO: | |
| | 2035) | | 2036) | | 2037) | | 2038) | | 2039) | |
| | Region | | Region | | Region | | Region | | Region | |
| Sequence | SEQ | Region | SEQ | Region | SEQ | Region | SEQ | Region | SEQ | Region |
| Regions | ID NO | length | ID NO | length | ID NO | length | ID NO | length | ID NO | length |
| 5′ ITR | 2077 | 141 | 2077 | 141 | 2077 | 141 | 2077 | 141 | 2077 | 141 |
| CBA | 2084 | 654 | 2084 | 654 | 2084 | 654 | 2084 | 654 | 2084 | 654 |
| promoter | | | | | | | | | | |
| Exon | 2090 | 134 | 2092 | 59 | 2091 | 102 | 2090 | 134 | 2090 | 134 |
| Intron | 2095 | 32 | 2095 | 32 | 2096 | 15 | 2096 | 15 | 2095 | 32 |
| Intron | 2099 | 73 | 2098 | 168 | 2102 | 53 | 2102 | 53 | 2100 | 73 |
| Exon | 2093 | 53 | 2093 | 53 | 2093 | 53 | 2093 | 53 | 2093 | 53 |
| Signal | 1741 | 57 | 1741 | 57 | 1741 | 57 | 1741 | 57 | 1741 | 57 |
| VH | 1839 | 351 | 1839 | 351 | 1839 | 351 | 1839 | 351 | 1839 | 351 |
| Linker | 1730 | 45 | 1730 | 45 | 1730 | 45 | 1730 | 45 | 1730 | 45 |
| VL | 1957 | 339 | 1957 | 339 | 1957 | 339 | 1957 | 339 | 1957 | 339 |
| Tag | 2118 | 27 | 2118 | 27 | 2118 | 27 | 2118 | 27 | 2118 | 27 |
| Poly A | 2122 | 127 | 2122 | 127 | 2122 | 127 | 2122 | 127 | 2122 | 127 |
| 3′ ITR | 2079 | 141 | 2079 | 141 | 2079 | 141 | 2079 | 141 | 2079 | 141 |

[0541] In some embodiments, the AAV particle genome comprises SEQ ID NO: 2035 (TAU_ITR46) which comprises a 5′ inverted terminal repeat (ITR) sequence region and a 3′ ITR sequence region, a CBA promoter, an ie1 exon 1 region, an ie1 intron 1 region, a human beta-globin intron region, a human beta-globin exon region, a PHF1 antibody heavy chain signal sequence, a PHF1 antibody heavy chain variable region, a (G4S)3 linker (“(G4S)3” disclosed as SEQ ID NO: 4537), a PHF1 antibody light chain variable region, an HA tag, and a rabbit globin polyadenylation signal sequence.

[0542] In some embodiments, the AAV particle genome comprises SEQ ID NO: 2036 (TAU_ITR47) which comprises a 5′ inverted terminal repeat (ITR) sequence region and a 3′ ITR sequence region, a CBA promoter, an ie1 exon 1 region, an ie1 intron 1 region, a human beta-globin intron region, a human beta-globin exon region, a PHF1 antibody heavy chain signal sequence, a PHF1 antibody heavy chain variable region, a (G4S)3 linker (“(G4S)3” disclosed as SEQ ID NO: 4537), a PHF1 antibody light chain variable region, an HA tag, and a rabbit globin polyadenylation signal sequence.

[0543] In some embodiments, the AAV particle genome comprises SEQ ID NO: 2037 (TAU_ITR48) which comprises a 5′ inverted terminal repeat (ITR) sequence region and a 3′ ITR sequence region, a CBA promoter, an ie1 exon 1 region, an ie1 intron 1 region, a human beta-globin intron region, a human beta-globin exon region, a PHF1 antibody heavy chain signal sequence, a PHF1 antibody heavy chain variable region, a (G4S)3 linker (“(G4S)3” disclosed as SEQ ID NO: 4537), a PHF1 antibody light chain variable region, an HA tag, and a rabbit globin polyadenylation signal sequence.

[0544] In some embodiments, the AAV particle genome comprises SEQ ID NO: 2038 (TAU_ITR49) which comprises a 5′ inverted terminal repeat (ITR) sequence region and a 3′ ITR sequence region, a CBA promoter, an ie1 exon 1 region, an ie1 intron 1 region, a human beta-globin intron region, a human beta-globin exon region, a PHF1 antibody heavy chain signal sequence, a PHF1 antibody heavy chain variable region, a (G4S)3 linker (“(G4S)3” disclosed as SEQ ID NO: 4537), a PHF1 antibody light chain variable region, an HA tag, and a rabbit globin polyadenylation signal sequence.

[0545] In some embodiments, the AAV particle genome comprises SEQ ID NO: 2039 (TAU_ITR50) which comprises a 5′ inverted terminal repeat (ITR) sequence region and a 3′ ITR sequence region, a CBA promoter, an ie1 exon 1 region, an ie1 intron 1 region, a human beta-globin intron region, a human beta-globin exon region, a PHF1 antibody heavy chain signal sequence, a PHF1 antibody heavy chain variable region, a (G4S)3 linker (“(G4S)3” disclosed as SEQ ID NO: 4537), a PHF1 antibody light chain variable region, an HA tag, and a rabbit globin polyadenylation signal sequence.

TABLE 28
Sequence Regions in ITR to ITR Sequences

| | TAU_ITR51 | | TAU_ITR52 | | TAU_ITR53 | | TAU_ITR54 | | TAU_ITR55 | |
|---|---|---|---|---|---|---|---|---|---|---|
| | (SEQ ID NO: | | (SEQ ID NO: | | (SEQ ID NO: | | (SEQ ID NO: | | (SEQ ID NO: | |
| | 2040) | | 2041) | | 2042) | | 2043) | | 2044) | |
| | Region | | Region | | Region | | Region | | Region | |
| Sequence | SEQ | Region | SEQ | Region | SEQ | Region | SEQ | Region | SEQ | Region |
| Regions | ID NO | length | ID NO | length | ID NO | length | ID NO | length | ID NO | length |
| 5′ ITR | 2077 | 141 | 2077 | 141 | 2077 | 141 | 2077 | 141 | 2077 | 141 |
| CBA | 2084 | 654 | 2084 | 654 | 2084 | 654 | 2084 | 654 | 2084 | 654 |
| promoter | | | | | | | | | | |
| Exon | 2092 | 59 | 2090 | 134 | 2090 | 134 | — | — | — | — |
| Intron | 2095 | 32 | 2095 | 32 | 2095 | 32 | — | — | 2103 | 172 |
| Intron | 2098 | 168 | 2097 | 347 | 2097 | 347 | — | — | — | — |
| Exon | 2093 | 53 | 2093 | 53 | 2093 | 53 | — | — | — | — |
| Signal | 1862 | 57 | 1862 | 57 | 1862 | 57 | 1862 | 57 | 1862 | 57 |
| VL | 1957 | 339 | 1957 | 339 | 1957 | 339 | 1957 | 339 | 1957 | 339 |
| Linker | 1730 | 45 | 1730 | 45 | 1730 | 45 | 1730 | 45 | 1736 | 45 |
| VH | 1839 | 351 | 1839 | 351 | 1839 | 351 | 1839 | 351 | 1839 | 351 |
| Tag | 2118 | 27 | 2118 | 27 | 2118 | 27 | 2118 | 27 | 2118 | 27 |
| Poly A | 2122 | 127 | 2122 | 127 | 2122 | 127 | 2122 | 127 | 2122 | 127 |
| Filler | — | — | — | — | 2125 | 1153 | — | — | — | — |
| 3′ ITR | 2079 | 141 | 2079 | 141 | 2079 | 141 | 2079 | 141 | 2079 | 141 |

[0546] In some embodiments, the AAV particle genome comprises SEQ ID NO: 2040 (TAU_ITR51) which comprises a 5′ inverted terminal repeat (ITR) sequence region and a 3′ ITR sequence region, a CBA promoter, an ie1 exon 1 region, an ie1 intron 1 region, a human beta-globin intron region, a human beta-globin exon region, a PHF1 antibody light chain signal sequence, a PHF1 antibody light chain variable region, a (G4S)3 linker (“(G4S)3” disclosed as SEQ ID NO: 4537), a PHF1 antibody heavy chain variable region, an HA tag, and a rabbit globin polyadenylation signal sequence.

[0547] In some embodiments, the AAV particle genome comprises SEQ ID NO: 2041 (TAU_ITR52) which comprises a 5′ inverted terminal repeat (ITR) sequence region and a 3′ ITR sequence region, a CBA promoter, an ie1 exon 1 region, an ie1 intron 1 region, a human beta-globin intron region, a human beta-globin exon region, a PHF1 antibody light chain signal sequence, a PHF1 antibody light chain variable region, a (G4S)3 linker (“(G4S)3” disclosed as SEQ ID NO: 4537), a PHF1 antibody heavy chain variable region, an HA tag, and a rabbit globin polyadenylation signal sequence.

[0548] In some embodiments, the AAV particle genome comprises SEQ ID NO: 2042 (TAU_ITR53) which comprises a 5′ inverted terminal repeat (ITR) sequence region and a 3′ ITR sequence region, a CBA promoter, an ie1 exon 1 region, an ie1 intron 1 region, a human beta-globin intron region, a human beta-globin exon region, a PHF1 antibody light chain signal sequence, a PHF1 antibody light chain variable region, a (G4S)3 linker (“(G4S)3” disclosed as SEQ ID NO: 4537), a PHF1 antibody heavy chain variable region, an HA tag, a rabbit globin polyadenylation signal sequence and a human albumin derived filler sequence.

[0549] In some embodiments, the AAV particle genome comprises SEQ ID NO: 2043 (TAU_ITR54) which comprises a 5′ inverted terminal repeat (ITR) sequence region and a 3′ ITR sequence region, a CBA promoter, a PHF1 antibody light chain signal sequence, a PHF1 antibody light chain variable region, a (G4S)3 linker (“(G4S)3” disclosed as SEQ ID NO: 4537), a PHF1 antibody heavy chain variable region, an HA tag, and a rabbit globin polyadenylation signal sequence.

[0550] In some embodiments, the AAV particle genome comprises SEQ ID NO: 2044 (TAU_ITR55) which comprises a 5′ inverted terminal repeat (ITR) sequence region and a 3′ ITR sequence region, a CBA promoter, an SV40 intron, a PHF1 antibody light chain signal sequence, a PHF1 antibody light chain variable region, a (G4S)3 linker (“(G4S)3” disclosed as SEQ ID NO: 4537), a PHF1 antibody heavy chain variable region, an HA tag, and a rabbit globin polyadenylation signal sequence.

TABLE 29
Sequence Regions in ITR to ITR Sequences

| | TAU_ITR56 | | TAU_ITR57 | | TAU_ITR58 | | TAU_ITR59 | | TAU_ITR60 | |
|---|---|---|---|---|---|---|---|---|---|---|
| | (SEQ ID NO: | | (SEQ ID NO: | | (SEQ ID NO: | | (SEQ ID NO: | | (SEQ ID NO: | |
| | 2045) | | 2046) | | 2047) | | 2048) | | 2049) | |
| | Region | | Region | | Region | | Region | | Region | |
| Sequence | SEQ | Region | SEQ | Region | SEQ | Region | SEQ | Region | SEQ | Region |
| Regions | ID NO | length | ID NO | length | ID NO | length | ID NO | length | ID NO | length |
| 5′ ITR | 2077 | 141 | 2077 | 141 | 2077 | 141 | 2077 | 141 | 2077 | 141 |
| CBA | 2084 | 654 | 2084 | 654 | 2084 | 654 | 2084 | 654 | 2084 | 654 |
| promoter | | | | | | | | | | |
| Exon | 2090 | 134 | 2090 | 134 | 2090 | 134 | — | — | — | — |
| Intron | 2095 | 32 | 2095 | 32 | 2095 | 32 | — | — | 2103 | 172 |
| Intron | 2097 | 347 | 2097 | 347 | 2101 | 73 | — | — | — | — |
| Exon | 2093 | 53 | 2093 | 53 | 2093 | 53 | — | — | — | — |
| Signal | 1741 | 57 | 1741 | 57 | 1741 | 57 | 1741 | 57 | 1741 | 57 |
| VH | 1839 | 351 | 1839 | 351 | 1839 | 351 | 1839 | 351 | 1839 | 351 |
| Linker | 1730 | 45 | 1730 | 45 | 1730 | 45 | 1730 | 45 | 1730 | 45 |
| VL | 1957 | 339 | 1957 | 339 | 1957 | 339 | 1957 | 339 | 1957 | 339 |
| Tag | 2118 | 27 | 2118 | 27 | 2118 | 27 | 2118 | 27 | 2118 | 27 |
| Poly A | 2122 | 127 | 2122 | 127 | 2122 | 127 | 2122 | 127 | 2122 | 127 |
| Filler | 2125 | 1153 | — | — | — | — | — | — | — | — |
| 3′ ITR | 2079 | 141 | 2079 | 141 | 2079 | 141 | 2079 | 141 | 2079 | 141 |

[0551] In some embodiments, the AAV particle genome comprises SEQ ID NO: 2045 (TAU_ITR56) which comprises a 5′ inverted terminal repeat (ITR) sequence region and a 3′ ITR sequence region, a CBA promoter, an ie1 exon 1 region, an ie1 intron 1 region, a human beta-globin intron region, a human beta-globin exon region, a PHF1 antibody heavy chain signal sequence, a PHF1 antibody heavy chain variable region, a (G4S)3 linker (“(G4S)3” disclosed as SEQ ID NO: 4537), a PHF1 antibody light chain variable region, an HA tag, a rabbit globin polyadenylation signal sequence and a human albumin derived filler sequence.

[0552] In some embodiments, the AAV particle genome comprises SEQ ID NO: 2046 (TAU_ITR57) which comprises a 5′ inverted terminal repeat (ITR) sequence region and a 3′ ITR sequence region, a CBA promoter, an ie1 exon 1 region, an ie1 intron 1 region, a human beta-globin intron region, a human beta-globin exon region, a PHF1 antibody heavy chain signal sequence, a PHF1 antibody heavy chain variable region, a (G4S)3 linker (“(G4S)3” disclosed as SEQ ID NO: 4537), a PHF1 antibody light chain variable region, an HA tag, and a rabbit globin polyadenylation signal sequence.

[0553] In some embodiments, the AAV particle genome comprises SEQ ID NO: 2047 (TAU_ITR58) which comprises a 5′ inverted terminal repeat (ITR) sequence region and a 3′ ITR sequence region, a CBA promoter, an ie1 exon 1 region, an ie1 intron 1 region, a human beta-globin intron region, a human beta-globin exon region, a PHF11 antibody heavy chain signal sequence, a PHF1 antibody heavy chain variable region, a (G4S)3 linker (“(G4S)3” disclosed as SEQ ID NO: 4537), a PHF1 antibody light chain variable region, an HA tag, and a rabbit globin polyadenylation signal sequence.

[0554] In some embodiments, the AAV particle genome comprises SEQ ID NO: 2048 (TAU_ITR59) which comprises a 5′ inverted terminal repeat (ITR) sequence region and a 3′ ITR sequence region, a CBA promoter, a PHF1 antibody heavy chain signal sequence, a PHF1 antibody heavy chain variable region, a (G4S)3 linker (“(G4S)3” disclosed as SEQ ID NO: 4537), a PHF1 antibody light chain variable region, an HA tag, and a rabbit globin polyadenylation signal sequence.

[0555] In some embodiments, the AAV particle genome comprises SEQ ID NO: 2049 (TAU_ITR60) which comprises a 5′ inverted terminal repeat (ITR) sequence region and a 3′ ITR sequence region, a CBA promoter, an SV40 intron, a PHF1 antibody heavy chain signal sequence, a PHF1 antibody heavy chain variable region, a (G4S)3 linker (“(G4S)3” disclosed as SEQ ID NO: 4537), a PHF1 antibody light chain variable region, an HA tag, and a rabbit globin polyadenylation signal sequence.

TABLE 30
Sequence Regions in ITR to ITR Sequences

| | TAU_ITR61 | | TAU_ITR62 | | TAU_ITR63 | | TAU_ITR64 | |
|---|---|---|---|---|---|---|---|---|
| | (SEQ ID NO: | | (SEQ ID NO: | | (SEQ ID NO: | | (SEQ ID NO: | |
| | 2050) | | 2051) | | 2052) | | 2053) | |
| | Region | | Region | | Region | | Region | |
| Sequence | SEQ | Region | SEQ | Region | SEQ | Region | SEQ | Region |
| Regions | ID NO | length | ID NO | length | ID NO | length | ID NO | length |
| 5′ ITR | 2077 | 141 | 2077 | 141 | 2077 | 141 | 2077 | 141 |
| CBA | 2084 | 654 | 2084 | 654 | 2084 | 654 | 2084 | 654 |
| promoter | | | | | | | | |
| Exon | 2090 | 134 | 2090 | 134 | 2090 | 134 | 2090 | 134 |
| Intron | 2095 | 32 | 2095 | 32 | 2095 | 32 | 2095 | 32 |
| Intron | 2097 | 347 | 2097 | 347 | 2097 | 347 | 2097 | 347 |
| Exon | 2093 | 53 | 2093 | 53 | 2093 | 53 | 2093 | 53 |
| Signal | 1741 | 57 | 1741 | 57 | 1741 | 57 | 1741 | 57 |
| VH1 | 1839 | 351 | 1839 | 351 | 1839 | 351 | 1839 | 351 |
| Linker | 1730 | 45 | 1730 | 45 | 1730 | 45 | 1730 | 45 |
| VL | 1957 | 339 | 1957 | 339 | 1957 | 339 | 1957 | 339 |
| Tag | — | — | — | — | 2118 | 27 | 2118 | 27 |
| Linker | — | — | — | — | 1724 | 12 | 1724 | 12 |
| Linker | 1729 | 18 | 1729 | 18 | 1726 | 54 | 1726 | 54 |
| Signal | 1741 | 57 | 1741 | 57 | 1741 | 57 | 1741 | 57 |
| VH | 1839 | 351 | 1839 | 351 | 1839 | 351 | 1839 | 351 |
| Linker | 1730 | 45 | 1730 | 45 | 1730 | 45 | 1730 | 45 |
| VL | 1957 | 339 | 1957 | 339 | 1957 | 339 | 1957 | 339 |
| Tag | — | — | — | — | 2118 | 27 | — | — |
| Linker | — | — | — | — | 1724 | 12 | — | — |
| Linker | 1729 | 18 | — | — | 1726 | 54 | — | — |
| Signal | — | — | — | — | 1741 | 57 | — | — |
| VH | 1839 | 351 | — | — | 1839 | 351 | — | — |
| Linker | 1730 | 45 | — | — | 1730 | 45 | — | — |
| VL | 1957 | 339 | — | — | 1957 | 339 | — | — |
| Tag | 2118 | 27 | 2118 | 27 | 2118 | 27 | 2118 | 27 |
| Poly A | 2122 | 127 | 2122 | 127 | 2122 | 127 | 2122 | 127 |
| 3′ ITR | 2079 | 141 | 2079 | 141 | 2079 | 141 | 2079 | 141 |

[0556] In some embodiments, the AAV particle genome comprises SEQ ID NO: 2050 (TAU_ITR61) which comprises a 5′ inverted terminal repeat (ITR) sequence region and a 3′ ITR sequence region, a CBA promotcr, an ie1 exon 1 region, an ie1 intron 1 region, a human beta-globin intron region, a human beta-globin exon region, a PHF1 antibody heavy chain signal sequence, a PHF1 antibody heavy chain variable region, a (G4S)3 linker (“(G4S)3” disclosed as SEQ ID NO: 4537), a PHF1 antibody light chain variable region, a G4S linker (“G4S” disclosed as SEQ ID NO: 4535), a second PHF1 antibody heavy chain signal sequence, a second PHF1 antibody heavy chain variable region, a (G4S)3 linker (“(G4S)3” disclosed as SEQ ID NO: 4537), a second PHF1 antibody light chain variable region, a G4S linker (“G4S” disclosed as SEQ ID NO: 4535), a third PHF1 antibody heavy chain variable region, a (G4S)3 linker (“(G4S)3” disclosed as SEQ ID NO: 4537), a third PHF1 antibody light chain variable region, an HA tag, and a rabbit globin polyadenylation signal sequence.

[0557] In some embodiments, the AAV particle genome comprises SEQ ID NO: 2051 (TAU_ITR62) which comprises a 5′ inverted terminal repeat (ITR) sequence region and a 3′ ITR sequence region, a CBA promoter, an ie1 exon 1 region, an ie1 intron 1 region, a human beta-globin intron region, a human beta-globin exon region, a PHF1 antibody heavy chain signal sequence, a PHF1 antibody heavy chain variable region, a (G4S)3 linker (“(G4S)3” disclosed as SEQ ID NO: 4537), a PHF1 antibody light chain variable region, a G4S linker (“G4S” disclosed as SEQ ID NO: 4535), a second PHF1 antibody heavy chain signal sequence, a second PHF1 antibody heavy chain variable region, a (G4S)3 linker (“(G4S)3” disclosed as SEQ ID NO: 4537), a second PHF1 antibody light chain variable region, an HA tag, and a rabbit globin polyadenylation signal sequence.

[0558] In some embodiments, the AAV particle genome comprises SEQ ID NO: 2052 (TAU_ITR63) which comprises a 5′ inverted terminal repeat (ITR) sequence region and a 3′ ITR sequence region, a CBA promoter, an ie1 exon 1 region, an ie1 intron 1 region, a human beta-globin intron region, a human beta-globin exon region, a PHF1 antibody heavy chain signal sequence, a PHF1 antibody heavy chain variable region, a (G4S)3 linker (“(G4S)3” disclosed as SEQ ID NO: 4537), a PHF1 antibody light chain variable region, an HA tag, a furin cleavage site, a T2A linker, a second PHF1 antibody heavy chain signal sequence, a second PHF1 antibody heavy chain variable region, a (G4S)3 linker (“(G4S)3” disclosed as SEQ ID NO: 4537), a second PHF1 antibody light chain variable region, a second HA tag, a second furin cleavage site, a second T2A linker, a third PHF1 antibody heavy chain signal sequence, a third PHF1 antibody heavy chain variable region, a (G4S)3 linker (“(G4S)3” disclosed as SEQ ID NO: 4537), a third PHF1 antibody light chain variable region, a third HA tag, and a rabbit globin polyadenylation signal sequence.

[0559] In some embodiments, the AAV particle genome comprises SEQ ID NO: 2053 (TAU_ITR64) which comprises a 5′ inverted terminal repeat (ITR) sequence region and a 3′ ITR sequence region, a CBA promoter, an ie1 exon 1 region, an ie1 intron 1 region, a human beta-globin intron region, a human beta-globin exon region, a PHF1 antibody heavy chain signal sequence, a PHF1 antibody heavy chain variable region, a (G4S)3 linker (“(G4S)3” disclosed as SEQ ID NO: 4537), a PHF1 antibody light chain variable region, an HA tag, a furin cleavage site, a T2A linker, a second PHF1 antibody heavy chain signal sequence, a second PHF1 antibody heavy chain variable region, a (G4S)3 linker (“(G4S)3” disclosed as SEQ ID NO: 4537), a second PHF1 antibody light chain variable region, a second HA tag, and a rabbit globin polyadenylation signal sequence.

TABLE 31
Sequence Regions in ITR to ITR Sequences

| | TAU_ITR65 | | TAU_ITR66 | | TAU_ITR67 | | TAU_ITR68 | |
|---|---|---|---|---|---|---|---|---|
| | (SEQ ID NO: | | (SEQ ID NO: | | (SEQ ID NO: | | (SEQ ID NO: | |
| | 2054) | | 2055) | | 2056) | | 2057) | |
| | Region | | Region | | Region | | Region | |
| Sequence | SEQ | Region | SEQ | Region | SEQ | Region | SEQ | Region |
| Regions | ID NO | length | ID NO | length | ID NO | length | ID NO | length |
| 5′ ITR | 2077 | 141 | 2077 | 141 | 2077 | 141 | 2077 | 141 |
| CBA | 2084 | 654 | 2084 | 654 | 2084 | 654 | 2084 | 654 |
| promoter | | | | | | | | |
| Exon | 2090 | 134 | 2090 | 134 | 2090 | 134 | 2090 | 134 |
| Intron | 2095 | 32 | 2095 | 32 | 2095 | 32 | 2095 | 32 |
| Intron | 2097 | 347 | 2097 | 347 | 2097 | 347 | 2097 | 347 |
| Exon | 2093 | 53 | 2093 | 53 | 2093 | 53 | 2093 | 53 |
| Signal | 1862 | 57 | 1862 | 57 | 1862 | 57 | 1862 | 57 |
| VL | 1956 | 339 | 1956 | 339 | 1956 | 339 | 1956 | 339 |
| Linker | 1730 | 45 | 1730 | 45 | 1730 | 45 | 1730 | 45 |
| VH | 1839 | 351 | 1839 | 351 | 1839 | 351 | 1839 | 351 |
| Tag | — | — | — | — | 2118 | 27 | 2118 | 27 |
| Linker | — | — | — | — | 1724 | 12 | 1724 | 12 |
| Linker | 1729 | 18 | — | — | 1726 | 54 | 1726 | 54 |
| Signal | — | — | — | — | 1862 | 57 | 1862 | 57 |
| VL | 1956 | 339 | 1956 | 339 | 1956 | 339 | 1956 | 339 |
| Linker | 1730 | 45 | 1730 | 45 | 1730 | 45 | 1730 | 45 |
| VH | 1839 | 351 | 1839 | 351 | 1839 | 351 | 1839 | 351 |
| Tag | — | — | — | — | 2118 | 27 | — | — |
| Linker | — | — | — | — | 1724 | 12 | — | — |
| Linker | 1729 | 18 | | — | 1726 | 54 | — | — |
| Signal | — | — | — | — | 1862 | 57 | — | — |
| VL | 1956 | 339 | — | — | 1956 | 339 | — | — |
| Linker | 1730 | 45 | — | — | 1730 | 45 | — | — |
| VH | 1839 | 351 | — | — | 1839 | 351 | — | — |
| Tag | 2118 | 27 | 2118 | — | 2118 | 27 | 2118 | 27 |
| Poly A | 2122 | 127 | 2122 | 127 | 2122 | 127 | 2122 | 127 |
| 3′ ITR | 2079 | 141 | 2079 | 141 | 2079 | 141 | 2079 | 141 |

[0560] In some embodiments, the AAV particle genome comprises SEQ ID NO: 2054 (TAU_ITR65) which comprises a 5′ inverted terminal repeat (ITR) sequence region and a 3′ ITR sequence region, a CBA promoter, an ie1 exon 1 region, an ie1 intron 1 region, a human beta-globin intron region, a human beta-globin exon region, a PHF1 antibody light chain signal sequence, a PHF1 antibody light chain variable region, a (G4S).3 linker (“(G4S)3” disclosed as SEQ ID NO: 4537), a PHF1 antibody heavy chain variable region, a G4S linker (“G4S” disclosed as SEQ ID NO: 4535), a second PHF1 antibody light chain variable region, a (G4S)3 linker (“(G4S)3” disclosed as SEQ ID NO: 4537), a second PHF1 antibody heavy chain variable region, a G4S linker (“G4S” disclosed as SEQ ID NO: 4535), a third PHF1 antibody light chain variable region, a (G4S)3 linker (“(G4S)3” disclosed as SEQ ID NO: 4537), a third PHF1 antibody heavy chain variable region, an HA tag, and a rabbit globin polyadenylation signal sequence.

[0561] In some embodiments, the AAV particle genome comprises SEQ ID NO: 2055 (TAU_ITR66) which comprises a 5′ inverted terminal repeat (ITR) sequence region and a 3′ ITR sequence region, a CBA promoter, an ie1 exon 1 region, an ie1 intron 1 region, a human beta-globin intron region, a human beta-globin exon region, a PHF1 antibody light chain signal sequence, a PHF1 antibody light chain variable region, a (G4S)3 linker (“(G4S)3” disclosed as SEQ ID NO: 4537), a PHF1 antibody heavy chain variable region, a second PHF1 antibody light chain variable region, a (G4S)3 linker (“(G4S)3” disclosed as SEQ ID NO: 4537), a second PHF1 antibody heavy chain variable region, an HA tag, and a rabbit globin polyadenylation signal sequence.

[0562] In some embodiments, the AAV particle genome comprises SEQ ID NO: 2056 (TAU_ITR67) which comprises a 5′ inverted terminal repeat (ITR) sequence region and a 3′ ITR sequence region, a CBA promoter, an ie1 exon 1 region, an ie1 intron 1 region, a human beta-globin intron region, a human beta-globin exon region, a PHF1 antibody light chain signal sequence, a PHF1 antibody light chain variable region, a (G4S)3 linker (“(G4S)3” disclosed as SEQ ID NO: 4537), a PHF1 antibody heavy chain variable region, an HA tag, a furin cleavage site, a T2A linker, a second PHF1 antibody light chain signal sequence, a second PHF1 antibody light chain variable region, a (G4S)3 linker (“(G4S)3” disclosed as SEQ ID NO: 4537), a second PHF1 antibody heavy chain variable region, a second HA tag, a second furin cleavage site, a second T2A linker, a third PHF1 antibody light chain signal sequence, a third PHF1 antibody light chain variable region, a (G4S)3 linker (“(G4S)3” disclosed as SEQ ID NO: 4537), a third PHF1 antibody heavy chain variable region, a third HA tag, and a rabbit globin polyadenylation signal sequence.

[0563] In some embodiments, the AAV particle genome comprises SEQ ID NO: 2057 (TAU_ITR68) which comprises a 5′ inverted terminal repeat (ITR) sequence region and a 3′ ITR sequence region, a CBA promoter, an ie1 exon 1 region, an ie1 intron 1 region, a human beta-globin intron region, a human beta-globin exon region, a PHF1 antibody light chain signal sequence, a PHF1 antibody light chain variable region, a (G4S)3 linker (“(G4S)3” disclosed as SEQ ID NO: 4537), a PHF1 antibody heavy chain variable region, an HA tag, a furin cleavage site, a T2A linker, a second PHF1 antibody light chain signal sequence, a second PHF1 antibody light chain variable region, a (G4S)3 linker (“(G4S)3” disclosed as SEQ ID NO: 4537), a second PHF1 antibody heavy chain variable region, a second HA tag, and a rabbit globin polyadenylation signal sequence.

TABLE 32
Sequence Regions in ITR to ITR Sequences

| | TAU_ITR69 | | TAU_ITR70 | | TAU_ITR71 | |
|---|---|---|---|---|---|---|
| | (SEQ ID NO: | | (SEQ ID NO: | | (SEQ ID NO: | |
| | 2058) | | 2059) | | 2060) | |
| | Region | | Region | | Region | |
| Sequence | SEQ | Region | SEQ | Region | SEQ | Region |
| Regions | ID NO | length | ID NO | length | ID NO | length |
| 5′ ITR | 2076 | 130 | 2076 | 130 | 2076 | 130 |
| Promoter | 2087 | 382 | 2087 | 382 | 2085 | 699 |
| Promoter | 2083 | 260 | 2083 | 260 | — | — |
| Exon | 2090 | 134 | 2090 | 134 | — | — |
| Intron | 2095 | 32 | 2095 | 32 | 2103 | 172 |
| Intron | 2097 | 347 | 2097 | 347 | — | — |
| Exon | 2093 | 53 | 2093 | 53 | — | — |
| VH | 1838 | 1377 | — | — | — | — |
| VL | — | — | 1962 | 714 | 1962 | 714 |
| Linker | 1727 | 75 | 1727 | 75 | 1727 | 75 |
| VL | 1962 | 714 | — | — | — | — |
| VH | — | — | 1838 | 1377 | 1838 | 1377 |
| Poly A | 2122 | 127 | 2122 | 127 | 2122 | 127 |
| 3′ ITR | 2078 | 130 | 2078 | 130 | 2078 | 130 |

[0564] In some embodiments, the AAV particle genome comprises SEQ ID NO: 2058 (TAU_ITR69) which comprises a 5′ inverted terminal repeat (ITR) sequence region and a 3′ ITR sequence region, a CMVie region, a CB promoter, an ie1 exon 1 region, an ie1 intron 1 region, a human beta-globin intron region, a human beta-globin exon region, a PHF1 antibody heavy chain region, an F2A linker, a PHF1 antibody light chain region, and a rabbit globin polyadenylation signal sequence.

[0565] In some embodiments, the AAV particle genome comprises SEQ ID NO: 2059 (TAU_ITR70) which comprises a 5′ inverted terminal repeat (ITR) sequence region and a 3′ ITR sequence region, a CMVie region, a CB promoter, an ie1 exon region, an ie1 intron 1 region, a human beta-globin intron region, a human beta-globin exon region, a PHF1 antibody light chain variable region, an F2A linker, a PHF1 antibody heavy chain variable region, and a rabbit globin polyadenylation signal sequence.

[0566] In some embodiments, the AAV particle genome comprises SEQ ID NO: 2060 (TAU_ITR71) which comprises a 5′ inverted terminal repeat (ITR) sequence region and a 3′ ITR sequence region, a GFAP promoter, an SV40 intron, a PHF1 antibody light chain variable region, an F2A linker, a PHF1 antibody heavy chain variable region, and a rabbit globin polyadenylation signal sequence.

TABLE 33
Sequence Regions in ITR to ITR Sequences

| | TAU_ITR72 | | TAU_ITR73 | | TAU_ITR74 | | TAU_ITR75 | | TAU_ITR76 | |
|---|---|---|---|---|---|---|---|---|---|---|
| | (SEQ ID NO: | | (SEQ ID NO: | | (SEQ ID NO: | | (SEQ ID NO: | | (SEQ ID NO: | |
| | 2061) | | 2062) | | 2063) | | 2064) | | 2065) | |
| | Region | | Region | | Region | | Region | | Region | |
| Sequence | SEQ | Region | SEQ | Region | SEQ | Region | SEQ | Region | SEQ | Region |
| Regions | ID NO | length | ID NO | length | ID NO | length | ID NO | length | ID NO | length |
| 5′ ITR | 2076 | 130 | 2076 | 130 | 2076 | 130 | 2076 | 130 | 2076 | 130 |
| CMVie | 2087 | 382 | 2087 | 382 | 2087 | 382 | 2087 | 382 | 2087 | 382 |
| Promoter | 2083 | 260 | 2083 | 260 | 2083 | 260 | 2083 | 260 | 2083 | 260 |
| Intron | 2103 | 172 | 2103 | 172 | 2103 | 172 | 2103 | 172 | 2103 | 172 |
| VH | 1832 | 1374 | 1832 | 1374 | 1832 | 1374 | 1832 | 1374 | 1832 | 1374 |
| Linker | 1725 | 12 | 1725 | 12 | — | — | — | — | — | — |
| Linker | 1727 | 75 | 1728 | 66 | 1727 | 75 | 1732 | 609 | 1728 | 66 |
| VL | 1950 | 714 | 1950 | 714 | 1950 | 714 | 1950 | 714 | 1950 | 714 |
| Poly A | 2122 | 127 | 2122 | 127 | 2122 | 127 | 2122 | 127 | 2122 | 127 |
| 3′ ITR | 2078 | 130 | 2078 | 130 | 2078 | 130 | 2078 | 130 | 2078 | 130 |

[0567] In some embodiments, the AAV particle genome comprises SEQ ID NO: 2061 (TAU_ITR72) which comprises a 5′ inverted terminal repeat (ITR) sequence region and a 3′ ITR sequence region, a CMVie region, a CB promoter, an SV40 intron, an MC1 antibody heavy chain variable region, a furin cleavage site, an F2A linker, an MC1 antibody light chain variable region, and a rabbit globin polyadenylation signal sequence.

[0568] In some embodiments, the AAV particle genome comprises SEQ ID NO: 2062 (TAU_ITR73) which comprises a 5′ inverted terminal repeat (ITR) sequence region and a 3′ ITR sequence region, a CMVie region, a CB promoter, an SV40 intron, an MC1 antibody heavy chain variable region, a furin cleavage site, a P2A linker, an MC1 antibody light chain variable region, and a rabbit globin polyadenylation signal sequence.

[0569] In some embodiments, the AAV particle genome comprises SEQ ID NO: 2063 (TAU_ITR74) which comprises a 5′ inverted terminal repeat (ITR) sequence region and a 3′ ITR sequence region, a CMVie region, a CB promoter, an SV40 intron, an MC1 antibody heavy chain variable region, an F2A linker, an MC1 antibody light chain variable region, and a rabbit globin polyadenylation signal sequence.

[0570] In some embodiments, the AAV particle genome comprises SEQ ID NO: 2064 (TAU_ITR75) which comprises a 5′ inverted terminal repeat (ITR) sequence region and a 3′ ITR sequence region, a CMVie region, a CB promoter, an SV40 intron, an MC1 antibody heavy chain variable region, an IRES linker, an MC1 antibody light chain variable region, and a rabbit globin polyadenylation signal sequence.

[0571] In some embodiments, the AAV particle genome comprises SEQ ID NO: 2065 (TAU_ITR76) which comprises a 5′ inverted terminal repeat (ITR) sequence region and a 3′ ITR sequence region, a CMVie region, a CB promoter, an SV40 intron, an MC1 antibody heavy chain variable region, a P2A linker, an MC1 antibody light chain variable region, and a rabbit globin polyadenylation signal sequence.

TABLE 34
Sequence Regions in ITR to ITR Sequences

| | TAU_ITR77 | | TAU_ITR85 | |
|---|---|---|---|---|
| | (SEQ ID NO: 2066) | | (SEQ ID NO: 2074) | |
| Sequence | Region | Region | Region | Region |
| Regions | SEQ ID NO | SEQ ID NO | length | length |
| 5′ ITR | 2076 | 130 | 2076 | 130 |
| CMVie | 2087 | 382 | 2087 | 382 |
| Promoter | 2083 | 260 | 2083 | 260 |
| Intron | 2103 | 172 | 2103 | 172 |
| VH | 1820 | 1377 | 1838 | 1377 |
| Linker | 1725 | 12 | 1725 | 12 |
| Linker | 1727 | 75 | 1727 | 75 |
| VL | 1940 | 714 | 1962 | 714 |
| PolyA | 2122 | 127 | 2122 | 127 |
| 3′ ITR | 2078 | 130 | 2078 | 130 |

[0572] In some embodiments, the AAV particle genome comprises SEQ ID NO: 2066 (TAU_ITR77) which comprises a 5 inverted terminal repeat (ITR) sequence region and a 3′ ITR sequence region, a CMVie region, a CB promoter, an SV40 intron, an IPN002 antibody heavy chain variable region, a furin cleavage site, an F2A linker, an IPN002 antibody light chain variable region, and a rabbit globin polyadenylation signal sequence.

[0573] In some embodiments, the AAV particle genome comprises SEQ ID NO: 2074 (TAU_ITR85) which comprises a 5′ inverted terminal repeat (ITR) sequence region and a ITR sequence region, a CMVie region, a CB promoter, an SV40 intron, an PHF1 antibody heavy chain variable region, a furin cleavage site, an F2A linker, an PHF1 antibody light chain variable region, and a rabbit globin polyadenylation signal sequence.

TABLE 35
Sequence Regions in ITR to ITR Sequences

| | TAU_ITR78 | | TAU_ITR79 | | TAU_ITR80 | | TAU_ITR81 | | TAU_ITR82 | |
|---|---|---|---|---|---|---|---|---|---|---|
| | (SEQ ID NO: | | (SEQ ID NO: | | (SEQ ID NO: | | (SEQ ID NO: | | (SEQ ID NO: | |
| | 2067) | | 2068) | | 2069) | | 2070) | | 2071) | |
| | Region | | Region | | Region | | Region | | Region | |
| Sequence | SEQ | Region | SEQ | Region | SEQ | Region | SEQ | Region | SEQ | Region |
| Regions | ID NO | length | ID NO | length | ID NO | length | ID NO | length | ID NO | length |
| 5′ ITR | 2076 | 130 | 2076 | 130 | 2076 | 130 | 2076 | 130 | 2076 | 130 |
| CMVie | 2087 | 382 | 2087 | 382 | 2087 | 382 | 2087 | 382 | 2087 | 382 |
| Promoter | 2083 | 260 | 2083 | 260 | 2083 | 260 | 2083 | 260 | 2083 | 260 |
| SV40 | 2103 | 172 | 2103 | 172 | 2103 | 172 | 2103 | 172 | 2103 | 172 |
| VL | 1950 | 714 | 1950 | 714 | 1950 | 714 | 1950 | 714 | 1950 | 714 |
| Linker | 1725 | 12 | — | — | — | — | — | — | — | — |
| Linker | 1727 | 75 | 1727 | 75 | 1732 | 609 | 1731 | 75 | 1728 | 66 |
| VH | 1832 | 1374 | 1832 | 1374 | 1832 | 1374 | 1832 | 1374 | 1832 | 1374 |
| Poly A | 2122 | 127 | 2122 | 127 | 2122 | 127 | 2122 | 127 | 2122 | 127 |
| 3′ ITR | 2078 | 130 | 2078 | 130 | 2078 | 130 | 2078 | 130 | 2078 | 130 |

[0574] In some embodiments, the AAV particle genome comprises SEQ ID NO: 2067 (TAU_ITR78) which comprises a 5′ inverted terminal repeat (ITR) sequence region and a 3′ ITR sequence region, a CMVie region, a CB promoter, an SV40 intron, an MC1 antibody light chain variable region, a furin cleavage site, an F2A linker, an MC1 antibody heavy chain variable region, and a rabbit globin polyadenylation signal sequence.

[0575] In some embodiments, the AAV particle genome comprises SEQ ID NO: 2068 (TAU_ITR79) which comprises a 5′ inverted terminal repeat (ITR) sequence region and a 3′ ITR sequence region, a CMVie region, a CB promoter, an SV40 intron, an MC1 antibody light chain variable region, an F2A linker, an MC1 antibody heavy chain variable region, and a rabbit globin polyadenylation signal sequence.

[0576] In some embodiments, the AAV particle genome comprises SEQ ID NO: 2069 (TAU_ITR80) which comprises a 5′ inverted terminal repeat (ITR) sequence region and a 3′ ITR sequence region, a CMVie region, a CB promoter, an SV40 intron, an MC1 antibody light chain variable region, an IRES linker, an MC1 antibody heavy chain variable region, and a rabbit globin polyadenylation signal sequence.

[0577] In some embodiments, the AAV particle genome comprises SEQ ID NO: 2070 (TAU_ITR81) which comprises a 5′ inverted terminal repeat (ITR) sequence region and a 3′ ITR sequence region, a CMVie region, a CB promoter, an SV40 intron, an MC1 antibody light chain variable region, a (G4S)5 linker (“(G4S)5” disclosed as SEQ ID NO: 4538), an MC1 antibody heavy chain variable region, and a rabbit globin polyadenylation signal sequence.

[0578] In some embodiments, the AAV particle genome comprises SEQ ID NO: 2071 (TAU_ITR82) which comprises a 5′ inverted terminal repeat (ITR) sequence region and a 3′ ITR sequence region, a CMVie region, a CB promoter, an SV40 intron, an MC1 antibody light chain variable region, an P2A linker, an MC1 antibody heavy chain variable region, and a rabbit globin polyadenylation signal sequence.

TABLE 36
Sequence Regions in ITR to ITR Sequences

| | TAU_ITR83 | | TAU_ITR84 | | TAU_ITR86 | |
|---|---|---|---|---|---|---|
| | (SEQ ID NO: | | (SEQ IDNO: | | (SEQ ID NO: | |
| | 2072) | | 2073) | | 2075) | |
| | Region | | Region | | Region | |
| Sequence | SEQ | Region | SEQ | Region | SEQ | Region |
| Regions | ID NO | length | ID NO | length | ID NO | length |
| 5′ ITR | 2076 | 130 | 2076 | 130 | 2076 | 130 |
| CMVie | 2087 | 382 | 2087 | 382 | 2087 | 382 |
| Promoter | 2083 | 260 | 2083 | 260 | 2083 | 260 |
| Intron | 2103 | 172 | 2103 | 172 | 2103 | 172 |
| VL | 1950 | 714 | 1940 | 714 | 1962 | 714 |
| Linker | 1725 | 12 | — | — | — | — |
| Linker | 1728 | 66 | 1727 | 75 | 1727 | 75 |
| VH | 1832 | 1374 | 1820 | 1377 | 1838 | 1377 |
| Poly A | 2122 | 127 | 2122 | 127 | 2122 | 127 |
| 3′ ITR | 2078 | 130 | 2078 | 130 | 2078 | 130 |

[0579] In some embodiments, the AAV particle genome comprises SEQ ID NO: 2072 (TAU_ITR83) which comprises a 5′ inverted terminal repeat (ITR) sequence region and a 3′ ITR sequence region, a CMVie region, a CB promoter, an SV40 intron, an MC1 antibody light chain variable region, a furin cleavage site, a P2A linker, an MC1 antibody heavy chain variable region, and a rabbit globin polyadenylation signal sequence.

[0580] In some embodiments, the AAV particle genome comprises SEQ ID NO: 2073 (TAU_ITR84) which comprises a 5′ inverted terminal repeat (ITR) sequence region and a 3′ ITR sequence region, a CMVie region, a CB promoter, an SV40 intron, an IPN002 antibody light chain variable region, an F2A linker, an IPN002 antibody heavy chain variable region, and a rabbit globin polyadenylation signal sequence.

[0581] In some embodiments, the AAV particle genome comprises SEQ ID NO: 2075 (TAU_ITR86) which comprises a 5′ inverted terminal repeat (ITR) sequence region and a 3′ ITR sequence region, a CMVie region, a CB promoter, an SV40 intron, a PHF1 antibody light chain variable region, an F2A linker, a PHF1 antibody heavy chain variable region, and a rabbit globin polyadenylation signal sequence.

TABLE 37
Sequence Regions in ITR to ITR Sequences

| | TAU_ITR89 | | TAU_ITR97 | | TAU_ITR218 | | TAU_ITR220 | |
|---|---|---|---|---|---|---|---|---|
| | (SEQ ID NO: | | (SEQ ID NO: | | (SEQ ID NO: | | (SEQ ID NO: | |
| | 2139) | | 2147) | | 2290) | | 2292) | |
| | Region | | Region | | Region | | Region | |
| Sequence | SEQ | Region | SEQ | Region | SEQ | Region | SEQ | Region |
| Regions | ID NO | length | ID NO | length | ID NO | length | ID NO | length |
| 5′ ITR | 2076 | 130 | 2076 | 130 | 2076 | 130 | 2076 | 130 |
| CAG | 2080 | 1715 | 2080 | 1715 | 2080 | 1715 | 2080 | 1715 |
| promoter | | | | | | | | |
| CMVie | 2081 | 299 | 2081 | 299 | 2081 | 299 | 2081 | 299 |
| CBA min. | 2082 | 283 | 2082 | 283 | 2082 | 283 | 2082 | 283 |
| Signal | 1740 | 57 | 1740 | 57 | 1740 | 57 | 1740 | 57 |
| VH | 1809 | 345 | 1809 | 345 | 1809 | 345 | 1809 | 345 |
| Constant | 1742 | 969 | 1742 | 969 | 2242 | 309 | 2243 | 291 |
| Linker | 1725 | 12 | 1724 | 12 | 1724 | 12 | 1724 | 12 |
| Linker | 1727 | 75 | 1726 | 54 | 1726 | 54 | 1726 | 54 |
| Signal | 1861 | 57 | 1861 | 57 | 1861 | 57 | 1861 | 57 |
| VL | 1926 | 321 | 1926 | 321 | 1926 | 321 | 1926 | 321 |
| Constant | 1864 | 321 | 1864 | 321 | 1864 | 321 | 1864 | 321 |
| Poly A | 2122 | 127 | 2122 | 127 | 2122 | 127 | 2122 | 127 |
| 3′ ITR | 2078 | 130 | 2078 | 130 | 2078 | 130 | 2078 | 130 |

[0582] In some embodiments, the AAV particle genome comprises SEQ ID NO: 2139 (TAU_ITR89) which comprises a 5′ inverted terminal repeat (ITR) sequence region and a 3′ ITR sequence region, a CAG promoter comprising a CMVie region and a minimal CBA promoter region, a heavy chain signal sequence, a C10.2 antibody heavy chain variable region, a heavy chain constant region, a furin cleavage site, a F2A linker, a light chain signal sequence, a C10.2 antibody light chain variable region, a light chain constant region, and a rabbit globin polyadenylation signal sequence.

[0583] In some embodiments, the AAV particle genome comprises SEQ ID NO: 2147 (TAU_ITR97) which comprises a 5′ inverted terminal repeat (ITR) sequence region and a 3′ ITR sequence region, a CAG promoter comprising a CMVie region and a minimal CBA promoter region, a heavy chain signal sequence, a C10.2 antibody heavy chain variable region, a heavy chain constant region, a furin cleavage site, a T2A linker, a light chain signal sequence, a C10.2 antibody light chain variable region, a light chain constant region, and a rabbit globin polyadenylation signal sequence.

[0584] In some embodiments, the AAV particle genome comprises SEQ ID NO: 2290 (TAU_ITR218) which comprises a 5′ inverted terminal repeat (ITR) sequence region and a 3′ ITR sequence region, a CAG promoter comprising a CMVie region and a minimal CBA promoter region, a heavy chain signal sequence, a C10.2 antibody heavy chain variable region, a heavy chain constant region, a furin cleavage site, a T2A linker, a light chain signal sequence, a C10.2 antibody light chain variable region, a light chain constant region, and a rabbit globin polyadenylation signal sequence.

[0585] In some embodiments, the AAV particle genome comprises SEQ ID NO: 2290 (TAU_ITR220) which comprises a 5′ inverted terminal repeat (ITR) sequence region and a 3′ ITR sequence region, a CAG promoter comprising a CMVie region and a minimal CBA promoter region, a heavy chain signal sequence, a C10.2 antibody heavy chain variable region, a heavy chain constant region, a furin cleavage site, a T2A linker, a light chain signal sequence, a C10.2 antibody light chain variable region, a light chain constant region, and a rabbit globin polyadenylation signal sequence.

TABLE 38
Sequence Regions in ITR to ITR Sequences

| | TAU_ITR217 | | TAU_ITR126 | |
|---|---|---|---|---|
| | (SEQ ID NO: 2289) | | (SEQ ID NO: 2176) | |
| Sequence | Region SEQ | Region | Region SEQ | Region |
| Regions | ID NO | length | ID NO | length |
| 5′ ITR | 2076 | 130 | 2076 | 130 |
| CAG promoter | 2080 | 1715 | 2080 | 1715 |
| CMVie | 2081 | 299 | 2081 | 299 |
| CBA min. | 2082 | 283 | 2082 | 283 |
| Signal | 1740 | 57 | 1740 | 57 |
| VH | 1809 | 345 | 1821 | 351 |
| Constant | 2242 | 309 | 2242 | 309 |
| Linker | 2244 | 198 | 2244 | 198 |
| Linker | 1724 | 12 | 1724 | 12 |
| Linker | 1726 | 54 | 1726 | 54 |
| Signal | 1861 | 57 | 1861 | 57 |
| VL | 1926 | 321 | 1939 | 336 |
| Constant | 1864 | 321 | 1864 | 321 |
| PolyA | 2122 | 127 | 2122 | 127 |
| 3′ ITR | 2078 | 130 | 2078 | 130 |

[0586] In some embodiments, the AAV particle genome comprises SEQ ID NO: 2289 (TAU_ITR217) which comprises a 5′ inverted terminal repeat (ITR) sequence region and a 3′ ITR sequence region, a CAG promoter comprising a CMVie region and a minimal CBA promoter region, a heavy chain signal sequence, a C10.2 antibody heavy chain variable region, a heavy chain constant region, a hinge region, a furin cleavage site, a T2A linker, a light chain signal sequence, a C10.2 antibody light chain variable region, a light chain constant region, and a rabbit globin polyadenylation signal sequence.

[0587] In some embodiments, the AAV particle genome comprises SEQ ID NO: 2289 (TAU_ITR217) which comprises a 5′ inverted terminal repeat (ITR) sequence region and a 3′ ITR sequence region, a CAG promoter comprising a CMVie region and a minimal CBA promoter region, a heavy chain signal sequence, a C10.2 antibody heavy chain variable region, a heavy chain constant region, a hinge region, a furin cleavage site, a T2A linker, a light chain signal sequence, a C10.2 antibody light chain variable region, a light chain constant region, and a rabbit globin polyadenylation signal sequence.

TABLE 39
Sequence Regions in ITR to ITR Sequences

| | TAU_ITR222 | | TAU_ITR223 | | TAU_ITR224 | | TAU_ITR221 | | TAU_ITR151 | |
|---|---|---|---|---|---|---|---|---|---|---|
| | (SEQ ID NO: | | (SEQ ID NO: | | (SEQ ID NO: | | (SEQ ID NO: | | (SEQ ID NO: | |
| | 2294) | | 2295) | | 2296) | | 2293) | | 2201) | |
| | Region | | Region | | Region | | Region | | Region | |
| Sequence | SEQ | Region | SEQ | Region | SEQ | Region | SEQ | Region | SEQ | Region |
| Regions | ID NO | length | ID NO | length | ID NO | length | ID NO | length | ID NO | length |
| 5′ ITR | 2076 | 130 | 2076 | 130 | 2076 | 130 | 2076 | 130 | 2076 | 130 |
| CAG | 2080 | 1715 | 2080 | 1715 | 2080 | 1715 | 2080 | 1715 | 2080 | 1715 |
| promoter | | | | | | | | | | |
| CMVie | 2081 | 299 | 2081 | 299 | 2081 | 299 | 2081 | 299 | 2081 | 299 |
| CBA min. | 2082 | 283 | 2082 | 283 | 2082 | 283 | 2082 | 283 | 2082 | 283 |
| Signal | 1861 | 57 | 1861 | 57 | 1861 | 57 | 1861 | 57 | 1861 | 57 |
| VL | 1926 | 321 | 1926 | 321 | 1926 | 321 | 1926 | 321 | 1939 | 336 |
| Linker | 2247 | 45 | 2250 | 75 | 2253 | 120 | 2245 | 15 | 2246 | 30 |
| VH | 1809 | 345 | 1809 | 345 | 1809 | 345 | 1809 | 345 | 1821 | 351 |
| Tag | 2118 | 27 | 2118 | 27 | 2118 | 27 | 2118 | 27 | 2118 | 27 |
| Poly A | 2122 | 127 | 2122 | 127 | 2122 | 127 | 2122 | 127 | 2122 | 127 |
| 3′ ITR | 2078 | 130 | 2078 | 130 | 2078 | 130 | 2078 | 130 | 2078 | 130 |

[0588] In some embodiments, the AAV particle genome comprises SEQ ID NO: 2294 (TAU_ITR222) which comprises a 5′ inverted terminal repeat (ITR) sequence region and a 3′ ITR sequence region, a CAG promoter comprising a CMVie region and a minimal CBA promoter region, a light chain signal sequence, a C10.2 antibody light chain variable region, a (G4S)3 linker (“(G4S)3” disclosed as SEQ ID NO: 4537), a C10.2 antibody heavy chain variable region, an HA tag, and a rabbit globin polyadenylation signal sequence.

[0589] In some embodiments, the AAV particle genome comprises SEQ ID NO: 2295 (TAU_ITR223) which comprises a 5′ inverted terminal repeat (ITR) sequence region and a 3′ ITR sequence region, a CAG promoter comprising a CMVie region and a minimal CBA promoter region, a light chain signal sequence, a C10.2 antibody light chain variable region, a (G4S)3 linker (“(G4S)3” disclosed as SEQ ID NO: 4537), a C10.2 antibody heavy chain variable region, an HA tag, and a rabbit globin polyadenylation signal sequence.

[0590] In some embodiments, the AAV particle genome comprises SEQ ID NO: 2296 (TAU_ITR224) which comprises a 5′ inverted terminal repeat (ITR) sequence region and a 3′ ITR sequence region, a CAG promoter comprising a CMVie region and a minimal CBA promoter region, a light chain signal sequence, a C10.2 antibody light chain variable region, a (G4S)8 linker (“(G4S)8” disclosed as SEQ ID NO: 4542), a C10.2 antibody heavy chain variable region, an HA tag, and a rabbit globin polyadenylation signal sequence.

[0591] In some embodiments, the AAV particle genome comprises SEQ ID NO: 2293 (TAU_ITR221) which comprises a 5′ inverted terminal repeat (ITR) sequence region and a 3′ ITR sequence region, a CAG promoter comprising a CMVie region and a minimal CBA promoter region, a light chain signal sequence, a C10.2 antibody light chain variable region, a G4S linker (“G4S” disclosed as SEQ ID NO: 4535), a C10.2 antibody heavy chain variable region, an HA tag, and a rabbit globin polyadenylation signal sequence.

[0592] In some embodiments, the AAV particle genome comprises SEQ ID NO: 2201 (TAU_ITR151) which comprises a 5′ inverted terminal repeat (ITR) sequence region and a 3′ ITR sequence region, a CAG promoter comprising a CMVie region and a minimal CBA promoter region, a light chain signal sequence, an IPN002 antibody light chain variable region, a (G4S)2 linker (“(G4S)2” disclosed as SEQ ID NO: 4539), an IPN002 antibody heavy chain variable region, an HA tag, and a rabbit globin polyadenylation signal sequence.

TABLE 40
Sequence Regions in ITR to ITR Sequences

| | TAU_ITR93 | | TAU_ITR100 | | TAU_ITR219 | | TAU_ITR130 | |
|---|---|---|---|---|---|---|---|---|
| | (SEQ ID NO: | | (SEQ ID NO: | | (SEQ ID NO: | | (SEQ ID NO: | |
| | 2143) | | 2150) | | 2291) | | 2180) | |
| | Region | | Region | | Region | | Region | |
| Sequence | SEQ | Region | SEQ | Region | SEQ | Region | SEQ | Region |
| Regions | ID NO | length | ID NO | length | ID NO | length | ID NO | length |
| 5′ ITR | 2076 | 130 | 2076 | 130 | 2076 | 130 | 2076 | 130 |
| CAG | 2080 | 1715 | 2080 | 1715 | 2080 | 1715 | 2080 | 1715 |
| promoter | | | | | | | | |
| CMVie | 2081 | 299 | 2081 | 299 | 2081 | 299 | 2081 | 299 |
| CBA mm. | 2082 | 283 | 2082 | 283 | 2082 | 283 | 2082 | 283 |
| Signal | 1861 | 57 | 1861 | 57 | 1861 | 57 | 1861 | 57 |
| VL | 1926 | 321 | 1926 | 321 | 1926 | 321 | 1939 | 336 |
| Constant | 1864 | 321 | 1864 | 321 | 1864 | 321 | 1864 | 321 |
| Linker | 1727 | 75 | 1726 | 54 | 1726 | 54 | 1726 | 54 |
| Signal | 1740 | 57 | 1740 | 57 | 1740 | 57 | 1740 | 57 |
| VH | 1809 | 345 | 1809 | 345 | 1809 | 345 | 1821 | 351 |
| Constant | 1742 | 969 | 1743 | 972 | 2242 | 309 | 2242 | 309 |
| Poly A | 2122 | 127 | 2122 | 127 | 2122 | 127 | 2122 | 127 |
| 3′ ITR | 2078 | 130 | 2078 | 130 | 2078 | 130 | 2078 | 130 |

[0593] In some embodiments, the AAV particle genome comprises SEQ ID NO: 2143 (TAU_ITR93) which comprises a 5′ inverted terminal repeat (ITR) sequence region and a 3′ ITR sequence region, a CAG promoter comprising a CMVie region and a minimal CBA promoter region, a light chain signal sequence, a C10.2 antibody light chain variable region, a light chain constant region, a F2A linker, a heavy chain signal sequence, a C10.2 antibody heavy chain variable region, a heavy chain constant region, and a rabbit globin polyadenylation signal sequence.

[0594] In some embodiments, the AAV particle genome comprises SEQ ID NO: 2150 (TAU_ITR100) which comprises a 5′ inverted terminal repeat (ITR) sequence region and a 3′ ITR sequence region, a CAG promoter comprising a CMVie region and a minimal CBA promoter region, a light chain signal sequence, a C10.2 antibody light chain variable region, a light chain constant region, a T2A linker, a heavy chain signal sequence, a C10.2 antibody heavy chain variable region, a heavy chain constant region, and a rabbit globin polyadenylation signal sequence.

[0595] In some embodiments, the AAV particle genome comprises SEQ ID NO: 2291 (TAU_ITR219) which comprises a 5′ inverted terminal repeat (ITR) sequence region and a 3′ ITR sequence region, a CAG promoter comprising a CMVie region and a minimal CBA promoter region, a light chain signal sequence, a C10.2 antibody light chain variable region, a light chain constant region, a T2A linker, a heavy chain signal sequence, a C10.2 antibody heavy chain variable region, a heavy chain constant region, and a rabbit globin polyadenylation signal sequence.

[0596] In some embodiments, the AAV particle genome comprises SEQ ID NO: 2180 (TAU_ITR130) which comprises a 5′ inverted terminal repeat (ITR) sequence region and a 3′ ITR sequence region, a CAG promoter comprising a CMVie region and a minimal CBA promoter region, a light chain signal sequence, an IPN002 antibody light chain variable region, a light chain constant region, a T2A linker, a heavy chain signal sequence, an IPN002 antibody heavy chain variable region, a heavy chain constant region, and a rabbit globin polyadenylation signal sequence.

TABLE 41
Sequence Regions in ITR to ITR Sequences

| | TAU_ITR90 | | TAU_ITR98 | | TAU_ITR226 | | TAU_ITR228 | | TAU_ITR198 | |
|---|---|---|---|---|---|---|---|---|---|---|
| | (SEQ ID NO: | | (SEQ ID NO: | | (SEQ ID NO: | | (SEQ ID NO: | | (SEQ ID NO: | |
| | 2140) | | 2148) | | 2298) | | 2300) | | 2270) | |
| | Region | | Region | | Region | | Region | | Region | |
| Sequence | SEQ | Region | SEQ | Region | SEQ | Region | SEQ | Region | SEQ | Region |
| Regions | ID NO | length | ID NO | length | ID NO | length | ID NO | length | ID NO | length |
| 5′ ITR | 2076 | 130 | 2076 | 130 | 2076 | 130 | 2076 | 130 | 2076 | 130 |
| Promoter | 2085 | 699 | 2085 | 699 | 2085 | 699 | 2085 | 699 | 2085 | 699 |
| Intron | 2240 | 566 | 2240 | 566 | 2240 | 566 | 2240 | 566 | 2240 | 566 |
| Signal | 1740 | 57 | 1740 | 57 | 1740 | 57 | 1740 | 57 | 1740 | 57 |
| VH | 1809 | 345 | 1809 | 345 | 1809 | 345 | 1809 | 345 | 1821 | 351 |
| Constant | 1742 | 969 | 1742 | 969 | 2242 | 309 | 2243 | 291 | 2242 | 309 |
| Linker | 1725 | 12 | 1724 | 12 | 1724 | 12 | 1724 | 12 | 1724 | 12 |
| Linker | 1727 | 75 | 1726 | 54 | 1726 | 54 | 1726 | 54 | 1726 | 54 |
| Signal | 1861 | 57 | 1861 | 57 | 1861 | 57 | 1861 | 57 | 1861 | 57 |
| VL | 1926 | 321 | 1926 | 321 | 1926 | 321 | 1926 | 321 | 1939 | 336 |
| Constant | 1864 | 321 | 1864 | 321 | 1864 | 321 | 1864 | 321 | 1864 | 321 |
| Poly A | 2122 | 127 | 2122 | 127 | 2122 | 127 | 2122 | 127 | 2122 | 127 |
| 3′ ITR | 2078 | 130 | 2078 | 130 | 2078 | 130 | 2078 | 130 | 2078 | 130 |

[0597] In some embodiments, the AAV particle genome comprises SEQ ID NO: 2140 (TAU_ITR90) which comprises a 5′ inverted terminal repeat (ITR) sequence region and a 3′ ITR sequence region, a GFAP promoter, a human beta-globin intron region, a heavy chain signal sequence, a C10.2 antibody heavy chain variable region, a heavy chain constant region, a furin cleavage site, a F2A linker, a light chain signal sequence, a C10.2 antibody light chain variable region, a light chain constant region, and a rabbit globin polyadenylation signal sequence.

[0598] In some embodiments, the AAV particle genome comprises SEQ ID NO: 2148 (TAU_ITR98) which comprises a 5′ inverted terminal repeat (ITR) sequence region and a 3′ ITR sequence region, a GFAP promoter, a human beta-globin intron region, a heavy chain signal sequence, a C10.2 antibody heavy chain variable region, a heavy chain constant region, a furin cleavage site, a T2A linker, a light chain signal sequence, a C10.2 antibody light chain variable region, a light chain constant region, and a rabbit globin polyadenylation signal sequence.

[0599] In some embodiments, the AAV particle genome comprises SEQ ID NO: 2298 (TAU_ITR226) which comprises a 5′ inverted terminal repeat (ITR) sequence region and a 3′ ITR sequence region, a GFAP promoter, a human beta-globin intron region, a heavy chain signal sequence, a C10.2 antibody heavy chain variable region, a heavy chain constant region, a furin cleavage site, a T2A linker, a light chain signal sequence, a C10.2 antibody light chain variable region, a light chain constant region, and a rabbit globin polyadenylation signal sequence.

[0600] In some embodiments, the AAV particle genome comprises SEQ ID NO: 2300 (TAU_ITR228) which comprises a 5′ inverted terminal repeat (ITR) sequence region and a 3′ ITR sequence region, a GFAP promoter, a human beta-globin intron region, a heavy chain signal sequence, a C10.2 antibody heavy chain variable region, a heavy chain constant region, a furin cleavage site, a T2A linker, a light chain signal sequence, a C10.2 antibody light chain variable region, a light chain constant region, and a rabbit globin polyadenylation signal sequence.

[0601] In some embodiments, the AAV particle genome comprises SEQ ID NO: 2270 (TAU_ITR198) which comprises a 5′ inverted terminal repeat (ITR) sequence region and a 3′ ITR sequence region, a GFAP promoter, a human beta-globin intron region, a heavy chain signal sequence, an IPN002 antibody heavy chain variable region, a heavy chain constant region, a furin cleavage site, a T2A linker, a light chain signal sequence, an IPN002 antibody light chain variable region, a light chain constant region, and a rabbit globin polyadenylation signal sequence.

TABLE 42
Sequence Regions in ITR to ITR Sequences

| | TAU_ITR225 | | TAU_ITR197 | | TAU_ITR207 | | TAU_ITR122 | |
|---|---|---|---|---|---|---|---|---|
| | (SEQ ID NO: | | (SEQ ID NO: | | (SEQ ID NO: | | (SEQ ID NO: | |
| | 2297) | | 2269) | | 2279) | | 2172) | |
| | Region | | Region | | Region | | Region | |
| Sequence | SEQ | Region | SEQ | Region | SEQ | Region | SEQ | Region |
| Regions | ID NO | length | ID NO | length | ID NO | length | ID NO | length |
| 5′ ITR | 2076 | 130 | 2076 | 130 | 2076 | 130 | 2076 | 130 |
| Promoter | 2085 | 699 | 2085 | 699 | 2086 | 557 | 2239 | 380 |
| Intron | 2240 | 566 | 2240 | 566 | 2240 | 566 | 2240 | 566 |
| Signal | 1740 | 57 | 1740 | 57 | 1740 | 57 | 2241 | 57 |
| VH | 1809 | 345 | 1821 | 351 | 1821 | 351 | 1821 | 351 |
| Constant | 2242 | 309 | 2242 | 309 | 2242 | 309 | 2242 | 309 |
| Linker | 2244 | 198 | 2244 | 198 | 2244 | 198 | 2244 | 198 |
| Linker | 1724 | 12 | 1724 | 12 | 1724 | 12 | 1724 | 12 |
| Linker | 1726 | 54 | 1726 | 54 | 1726 | 54 | 1726 | 54 |
| Signal | 1861 | 57 | 1861 | 57 | 1861 | 57 | 1861 | 57 |
| VL | 1926 | 321 | 1939 | 336 | 1939 | 336 | 1939 | 336 |
| Constant | 1864 | 321 | 1864 | 321 | 1864 | 321 | 1864 | 321 |
| Poly A | 2122 | 127 | 2122 | 127 | 2122 | 127 | 2122 | 127 |
| 3′ ITR | 2078 | 130 | 2078 | 130 | 2078 | 130 | 2078 | 130 |

[0602] In some embodiments, the AAV particle genome comprises SEQ ID NO: 2297 (TAU_ITR225) which comprises a 5′ inverted terminal repeat (ITR) sequence region and a 3′ ITR sequence region, a GFAP promoter, a human beta-globin intron region, a heavy chain signal sequence, a C10.2 antibody heavy chain variable region, a heavy chain constant region, a hinge region, a furin cleavage site, a T2A linker, a light chain signal sequence, a C10.2 antibody light chain variable region, a light chain constant region, and a rabbit globin polyadenylation signal sequence.

[0603] In some embodiments, the AAV particle genome comprises SEQ ID NO: 2269 (TAU_ITR197) which comprises a 5′ inverted terminal repeat (ITR) sequence region and a 3′ ITR sequence region, a GFAP promoter, a human beta-globin intron region, a heavy chain signal sequence, an IPN002 antibody heavy chain variable region, a heavy chain constant region, a hinge region, a furin cleavage site, a T2A linker, a light chain signal sequence, an IPN002 antibody light chain variable region, a light chain constant region, and a rabbit globin polyadenylation signal sequence.

[0604] In some embodiments, the AAV particle genome comprises SEQ ID NO: 2279 (TAU_ITR207) which comprises a 5′ inverted terminal repeat (ITR) sequence region and a 3′ ITR sequence region, a hSYN promoter, a human beta-globin intron region, a heavy chain signal sequence, an IPN002 antibody heavy chain variable region, a heavy chain constant region, a hinge region, a furin cleavage site, a T2A linker, a light chain signal sequence, an IPN002 antibody light chain variable region, a light chain constant region, and a rabbit globin polyadenylation signal sequence.

[0605] In some embodiments, the AAV particle genome comprises SEQ ID NO: 2172 (TAU_ITR122) which comprises a 5′ inverted terminal repeat (ITR) sequence region and a 3′ ITR sequence region, a CMVie region, a human beta-globin intron region, a heavy chain signal sequence, an IPN002 antibody heavy chain variable region, a heavy chain constant region, a hinge region, a furin cleavage site, a T2A linker, a light chain signal sequence, an IPN002 antibody light chain variable region, a light chain constant region, and a rabbit globin polyadenylation signal sequence.

TABLE 43
Sequence Regions in ITR to ITR Sequences

| | TAU_ITR230 | | TAU_ITR231 | | TAU_ITR232 | | TAU_ITR204 | | TAU_ITR205 | |
|---|---|---|---|---|---|---|---|---|---|---|
| | (SEQ ID NO: | | (SEQ ID NO: | | (SEQ ID NO: | | (SEQ ID NO: | | (SEQ ID NO: | |
| | 2302) | | 2303) | | 2304) | | 2276) | | 2277) | |
| | Region | | Region | | Region | | Region | | Region | |
| Sequence | SEQ | Region | SEQ | Region | SEQ | Region | SEQ | Region | SEQ | Region |
| Regions | ID NO | length | ID NO | length | ID NO | length | ID NO | length | ID NO | length |
| 5′ ITR | 2076 | 130 | 2076 | 130 | 2076 | 130 | 2076 | 130 | 2076 | 130 |
| Promoter | 2085 | 699 | 2085 | 699 | 2085 | 699 | 2085 | 699 | 2085 | 699 |
| Intron | 2240 | 566 | 2240 | 566 | 2240 | 566 | 2240 | 566 | 2240 | 566 |
| Signal | 1861 | 57 | 1861 | 57 | 1861 | 57 | 1861 | 57 | 1861 | 57 |
| VL | 1926 | 321 | 1926 | 321 | 1926 | 321 | 1939 | 336 | 1939 | 336 |
| Linker | 2247 | 45 | 2250 | 75 | 2253 | 120 | 2245 | 15 | 2247 | 45 |
| VH | 1809 | 345 | 1809 | 345 | 1809 | 345 | 1821 | 351 | 1821 | 351 |
| Tag | 2118 | 27 | 2118 | 27 | 2118 | 27 | 2118 | 27 | 2118 | 27 |
| Poly A | 2122 | 127 | 2122 | 127 | 2122 | 127 | 2122 | 127 | 2122 | 127 |
| 3′ ITR | 2078 | 130 | 2078 | 130 | 2078 | 130 | 2078 | 130 | 2078 | 130 |

[0606] In some embodiments, the AAV particle genome comprises SEQ ID NO: 2302 (TAU_ITR230) which comprises a 5′ inverted terminal repeat (ITR) sequence region and a 3′ ITR sequence region, a GFAP promoter, a human beta-globin intron region, a light chain signal sequence, a C10.2 antibody light chain variable region, a (G4S)3 linker (“(G4S)3” disclosed as SEQ ID NO: 4537), a C10.2 antibody heavy chain variable region, an HA tag, and a rabbit globin polyadenylation signal sequence.

[0607] In some embodiments, the AAV particle genome comprises SEQ ID NO: 2303 (TAU_ITR231) which comprises a 5′ inverted terminal repeat (ITR) sequence region and a 3′ ITR sequence region, a GFAP promoter, a human beta-globin intron region, a light chain signal sequence, a C10.2 antibody light chain variable region, a (G4S)5 linker (“(G4S)5” disclosed as SEQ ID NO: 4538), a C10.2 antibody heavy chain variable region, an HA tag, and a rabbit globin polyadenylation signal sequence.

[0608] In some embodiments, the AAV particle genome comprises SEQ ID NO: 2304 (TAU_ITR232) which comprises a 5′ inverted terminal repeat (ITR) sequence region and a 3′ ITR sequence region, a GFAP promoter, a human beta-globin intron region, a light chain signal sequence, a C10.2 antibody light chain variable region, a (G4S)8 linker (“G4S)8” disclosed as SEQ ID NO: 4542), a C10.2 antibody heavy chain variable region, an HA tag, and a rabbit globin polyadenylation signal sequence.

[0609] In some embodiments, the AAV particle genome comprises SEQ ID NO: 2276 (TAU_ITR204) which comprises a 5′ inverted terminal repeat (ITR) sequence region and a 3′ ITR sequence region, a GFAP promoter, a human beta-globin intron region, a light chain signal sequence, an IPN002 antibody light chain variable region, a G4S linker (“G4S” disclosed as SEQ ID NO: 4535), an IPN002 antibody heavy chain variable region, an HA tag, and a rabbit globin polyadenylation signal sequence.

[0610] In some embodiments, the AAV particle genome comprises SEQ ID NO: 2277 (TAU_ITR205) which comprises a 5′ inverted terminal repeat (ITR) sequence region and a 3′ ITR sequence region, a GFAP promoter, a human beta-globin intron region, a light chain signal sequence, an IPN002 antibody light chain variable region, a (G4S)3 linker (“(G4S)3” disclosed as SEQ ID NO: 4537), an IPN002 antibody heavy chain variable region, an HA tag, and a rabbit globin polyadenylation signal sequence.

TABLE 44
Sequence Regions in ITR to ITR Sequences

| | TAU_ITR94 | | TAU_ITR101 | | TAU_ ITR227 | | TAU_ITR95 | | TAU_ITR102 | |
|---|---|---|---|---|---|---|---|---|---|---|
| | (SEQ ID NO: | | (SEQ ID NO: | | (SEQ ID NO: | | (SEQ ID NO: | | (SEQ ID NO: | |
| | 2144) | | 2151) | | 2299) | | 2145) | | 2152) | |
| | Region | | Region | | Region | | Region | | Region | |
| Sequence | SEQ | Region | SEQ | Region | SEQ | Region | SEQ | Region | SEQ | Region |
| Regions | ID NO | length | ID NO | length | ID NO | length | ID NO | length | ID NO | length |
| 5′ ITR | 2076 | 130 | 2076 | 130 | 2076 | 130 | 2076 | 130 | 2076 | 130 |
| Promoter | 2085 | 699 | 2085 | 699 | 2085 | 699 | 2086 | 557 | 2086 | 557 |
| Intron | 2240 | 566 | 2240 | 566 | 2240 | 566 | 2240 | 566 | 2240 | 566 |
| Signal | 1861 | 57 | 1861 | 57 | 1861 | 57 | 1861 | 57 | 1861 | 57 |
| VL | 1926 | 321 | 1926 | 321 | 1926 | 321 | 1926 | 321 | 1926 | 321 |
| Constant | 1864 | 321 | 1864 | 321 | 1864 | 321 | 1864 | 321 | 1864 | 321 |
| Linker | 1727 | 75 | 1726 | 54 | 1726 | 54 | 1727 | 75 | 1726 | 54 |
| Signal | 1740 | 57 | 1740 | 57 | 1740 | 57 | 1740 | 57 | 1740 | 57 |
| VH | 1809 | 345 | 1809 | 345 | 1809 | 345 | 1809 | 345 | 1809 | 345 |
| Constant | 1742 | 969 | 1743 | 972 | 2242 | 309 | 1742 | 969 | 1743 | 972 |
| Poly A | 2122 | 127 | 2122 | 127 | 2122 | 127 | 2122 | 127 | 2122 | 127 |
| 3′ ITR | 2078 | 130 | 2078 | 130 | 2078 | 130 | 2078 | 130 | 2078 | 130 |

[0611] In some embodiments, the AAV particle genome comprises SEQ ID NO: 2144 (TAU_ITR94) which comprises a 5′ inverted terminal repeat (ITR) sequence region and a 3′ ITR sequence region, a GFAP promoter, a human beta-globin intron region, a light chain signal sequence, a C10.2 antibody light chain variable region, a light chain constant region, a F2A linker, a heavy chain signal sequence, a C10.2 antibody heavy chain variable region, a heavy chain constant region, and a rabbit globin polyadenylation signal sequence.

[0612] In some embodiments, the AAV particle genome comprises SEQ ID NO: 2151 (TAU_ITR101) which comprises a 5′ inverted terminal repeat (ITR) sequence region and a 3′ ITR sequence region, a GFAP promoter, a human beta-globin intron region, a light chain signal sequence, a C10.2 antibody light chain variable region, a light chain constant region, a T2A linker, a heavy chain signal sequence, a C10.2 antibody heavy chain variable region, a heavy chain constant region, and a rabbit globin polyadenylation signal sequence.

[0613] In some embodiments, the AAV particle genome comprises SEQ ID NO: 2299 (TAU_ITR227) which comprises a 5′ inverted terminal repeat (ITR) sequence region and a 3′ ITR sequence region, a GFAP promoter, a human beta-globin intron region, a light chain signal sequence, a C10.2 antibody light chain variable region, a light chain constant region, a T2A linker, a heavy chain signal sequence, a C10.2 antibody heavy chain variable region, a heavy chain constant region, and a rabbit globin polyadenylation signal sequence.

[0614] In some embodiments, the AAV particle genome comprises SEQ ID NO: 2145 (TAU_ITR95) which comprises a 5′ inverted terminal repeat (ITR) sequence region and a 3′ ITR sequence region, a hSYN promoter, a human beta-globin intron region, a light chain signal sequence, a C10.2 antibody light chain variable region, a light chain constant region, a F2A linker, a heavy chain signal sequence, a C10.2 antibody heavy chain variable region, a heavy chain constant region, and a rabbit globin polyadenylation signal sequence.

[0615] In some embodiments, the AAV particle genome comprises SEQ ID NO: 2152 (TAU_ITR102) which comprises a 5′ inverted terminal repeat (ITR) sequence region and a 3′ ITR sequence region, a hSYN promoter, a human beta-globin intron region, a light chain signal sequence, a C10.2 antibody light chain variable region, a light chain constant region, a T2A linker, a heavy chain signal sequence, a C10.2 antibody heavy chain variable region, a heavy chain constant region, and a rabbit globin polyadenylation signal sequence.

TABLE 45
Sequence Regions in ITR to ITR Sequences

| | TAU_ITR229 | | TAU_ITR238 | | TAU_ITR239 | | TAU_ITR240 | | TAU_ITR237 | |
|---|---|---|---|---|---|---|---|---|---|---|
| | (SEQ ID NO: | | (SEQ ID NO: | | (SEQ ID NO: | | (SEQ ID NO: | | (SEQ ID NO: | |
| | 2301) | | 2310) | | 2311) | | 2312) | | 2309) | |
| | Region | | Region | | Region | | Region | | Region | |
| Sequence | SEQ | Region | SEQ | Region | SEQ | Region | SEQ | Region | SEQ | Region |
| Regions | ID NO | length | ID NO | length | ID NO | length | ID NO | length | ID NO | length |
| 5′ ITR | 2076 | 130 | 2076 | 130 | 2076 | 130 | 2076 | 130 | 2076 | 130 |
| Promoter | 2085 | 699 | 2086 | 557 | 2086 | 557 | 2086 | 557 | 2086 | 557 |
| Intron | 2240 | 566 | 2240 | 566 | 2240 | 566 | 2240 | 566 | 2240 | 566 |
| Signal | 1861 | 57 | 1861 | 57 | 1861 | 57 | 1861 | 57 | 1861 | 57 |
| VL | 1926 | 321 | 1926 | 321 | 1926 | 321 | 1926 | 321 | 1926 | 321 |
| Linker | 2245 | 15 | 2247 | 45 | 2250 | 75 | 2253 | 120 | 2245 | 15 |
| VH | 1809 | 345 | 1809 | 345 | 1809 | 345 | 1809 | 345 | 1809 | 345 |
| Tag | 2118 | 27 | 2118 | 27 | 2118 | 27 | 2118 | 27 | 2118 | 27 |
| Poly A | 2122 | 127 | 2122 | 127 | 2122 | 127 | 2122 | 127 | 2122 | 127 |
| 3′ ITR | 2078 | 130 | 2078 | 130 | 2078 | 130 | 2078 | 130 | 2078 | 130 |

[0616] In some embodiments, the AAV particle genome comprises SEQ ID NO: 2301 (TAU_ITR229) which comprises a 5′ inverted terminal repeat (ITR) sequence region and a 3′ ITR sequence region, a GFAP promoter, a human beta-globin intron region, a light chain signal sequence, a C10.2 antibody light chain variable region, a G4S linker (“G4S” disclosed as SEQ ID NO: 4535), a C10.2 antibody heavy chain variable region, an HA tag, and a rabbit globin polyadenylation signal sequence.

[0617] In some embodiments, the AAV particle genome comprises SEQ ID NO: 2310 (TAU_ITR238) which comprises a 5′ inverted terminal repeat (ITR) sequence region and a 3′ ITR sequence region, a hSYN promoter, a human beta-globin intron region, a light chain signal sequence, a C10.2 antibody light chain variable region, a (G4S)3 linker (“(G4S)3” disclosed as SEQ ID NO: 4537), a C10.2 antibody heavy chain variable region, an HA tag, and a rabbit globin polyadenylation signal sequence.

[0618] In some embodiments, the AAV particle genome comprises SEQ ID NO: 2311 (TAU_ITR239) which comprises a 5′ inverted terminal repeat (ITR) sequence region and a 3′ ITR sequence region, a hSYN promoter, a human beta-globin intron region, a light chain signal sequence, a C10.2 antibody light chain variable region, a (G4S)5 linker (“(G4S)5” disclosed as SEQ ID NO: 4538), a C10.2 antibody heavy chain variable region, an HA tag, and a rabbit globin polyadenylation signal sequence.

[0619] In some embodiments, the AAV particle genome comprises SEQ ID NO: 2312 (TAU_ITR240) which comprises a 5′ inverted terminal repeat (ITR) sequence region and a 3′ ITR sequence region, a hSYN promoter, a human beta-globin intron region, a light chain signal sequence, a C10.2 antibody light chain variable region, a (G4S)8 linker (“(G4S)8” disclosed as SEQ ID NO: 4542), a C10.2 antibody heavy chain variable region, an HA tag, and a rabbit globin polyadenylation signal sequence.

[0620] In some embodiments, the AAV particle genome comprises SEQ ID NO: 2309 (TAU_ITR237) which comprises a 5′ inverted terminal repeat (ITR) sequence region and a 3′ ITR sequence region, a hSYN promoter, a human beta-globin intron region, a light chain signal sequence, a C10.2 antibody light chain variable region, a G4S linker (“G4S” disclosed as SEQ ID NO: 4535), a C10.2 antibody heavy chain variable region, an HA tag, and a rabbit globin polyadenylation signal sequence.

TABLE 46
Sequence Regions in ITR to ITR Sequences

| | TAU_ITR91 | | TAU_ITR99 | | TAU_ITR234 | | TAU_ITR236 | | TAU_ITR208 | |
|---|---|---|---|---|---|---|---|---|---|---|
| | (SEQ ID NO: | | (SEQ ID NO: | | (SEQ ID NO: | | (SEQ ID NO: | | (SEQ ID NO: | |
| | 2141) | | 2149) | | 2306) | | 2308) | | 2280) | |
| | Region | | Region | | Region | | Region | | Region | |
| Sequence | SEQ | Region | SEQ | Region | SEQ | Region | SEQ | Region | SEQ | Region |
| Regions | ID NO | length | ID NO | length | ID NO | length | ID NO | length | ID NO | length |
| 5′ ITR | 2076 | 130 | 2076 | 130 | 2076 | 130 | 2076 | 130 | 2076 | 130 |
| Promoter | 2086 | 557 | 2086 | 557 | 2086 | 557 | 2086 | 557 | 2086 | 557 |
| Intron | 2240 | 566 | 2240 | 566 | 2240 | 566 | 2240 | 566 | 2240 | 566 |
| Signal | 1740 | 57 | 1740 | 57 | 1740 | 57 | 1740 | 57 | 1740 | 57 |
| VH | 1809 | 345 | 1809 | 345 | 1809 | 345 | 1809 | 345 | 1821 | 351 |
| Constant | 1742 | 969 | 1742 | 969 | 2242 | 309 | 2243 | 291 | 2242 | 309 |
| Linker | 1725 | 12 | 1724 | 12 | 1724 | 12 | 1724 | 12 | 1724 | 12 |
| Linker | 1727 | 75 | 1726 | 54 | 1726 | 54 | 1726 | 54 | 1726 | 54 |
| Signal | 1861 | 57 | 1861 | 57 | 1861 | 57 | 1861 | 57 | 1861 | 57 |
| VL | 1926 | 321 | 1926 | 321 | 1926 | 321 | 1926 | 321 | 1939 | 336 |
| Constant | 1864 | 321 | 1864 | 321 | 1864 | 321 | 1864 | 321 | 1864 | 321 |
| Poly A | 2122 | 127 | 2122 | 127 | 2122 | 127 | 2122 | 127 | 2122 | 127 |
| 3′ ITR | 2078 | 130 | 2078 | 130 | 2078 | 130 | 2078 | 130 | 2078 | 130 |

[0621] In some embodiments, the AAV particle genome comprises SEQ ID NO: 2141 (TAU_ITR91) which comprises a 5′ inverted terminal repeat (ITR) sequence region and a 3′ ITR sequence region, a hSYN promoter, a human beta-globin intron region, a heavy chain signal sequence, a C10.2 antibody heavy chain variable region, a heavy chain constant region, a furin cleavage site, a F2A linker, a light chain signal sequence, a C10.2 antibody light chain variable region, a light chain constant region, and a rabbit globin polyadenylation signal sequence.

[0622] In some embodiments, the AAV particle genome comprises SEQ ID NO: 2149 (TAU_ITR99) which comprises a 5′ inverted terminal repeat (ITR) sequence region and a 3′ ITR sequence region, a hSYN promoter, a human beta-globin intron region, a heavy chain signal sequence, a C10.2 antibody heavy chain variable region, a heavy chain constant region, a furin cleavage site, a T2A linker, a light chain signal sequence, a C10.2 antibody light chain variable region, a light chain constant region, and a rabbit globin polyadenylation signal sequence.

[0623] In some embodiments, the AAV particle genome comprises SEQ ID NO: 2306 (TAU_ITR234) which comprises a 5′ inverted terminal repeat (ITR) sequence region and a 3′ ITR sequence region, a hSYN promoter, a human beta-globin intron region, a heavy chain signal sequence, a C10.2 antibody heavy chain variable region, a heavy chain constant region, a furin cleavage site, a T2A linker, a light chain signal sequence, a C10.2 antibody light chain variable region, a light chain constant region, and a rabbit globin polyadenylation signal sequence.

[0624] In some embodiments, the AAV particle genome comprises SEQ ID NO: 2308 (TAU_ITR236) which comprises a 5′ inverted terminal repeat (ITR) sequence region and a 3′ ITR sequence region, a hSYN promoter, a human beta-globin intron region, a heavy chain signal sequence, a C10.2 antibody heavy chain variable region, a heavy chain constant region, a furin cleavage site, a T2A linker, a light chain signal sequence, a C10.2 antibody light chain variable region, a light chain constant region, and a rabbit globin polyadenylation signal sequence.

[0625] In some embodiments, the AAV particle genome comprises SEQ ID NO: 2280 (TAU_ITR208) which comprises a 5′ inverted terminal repeat (ITR) sequence region and a 3′ ITR sequence region, a hSYN promoter, a human beta-globin intron region, a heavy chain signal sequence, an IPN002 antibody heavy chain variable region, a heavy chain constant region, a furin cleavage site, a T2A linker, a light chain signal sequence, an IPN002 antibody light chain variable region, a light chain constant region, and a rabbit globin polyadenylation signal sequence.

TABLE 47
Sequence Regions in ITR to ITR Sequences

| | |
|---|---|
| Sequence | TAU_ITR233 (SEQ ID NO: 2305) |

| Regions | Region SEQ ID NO | Region length |
|---|---|---|
| 5′ ITR | 2076 | 130 |
| Promoter | 2086 | 557 |
| Intron | 2240 | 566 |
| Signal | 1740 | 57 |
| VH | 1809 | 345 |
| Constant | 2242 | 309 |
| Linker | 2244 | 198 |
| Linker | 1724 | 12 |
| Linker | 1726 | 54 |
| Signal | 1861 | 57 |
| VL | 1926 | 321 |
| Constant | 1864 | 321 |
| PolyA | 2122 | 127 |
| 3′ ITR | 2078 | 130 |

[0626] In some embodiments, the AAV particle genome comprises SEQ ID NO: 2305 (TAU_ITR233) which comprises a 5′ inverted terminal repeat (ITR) sequence region and a 3′ ITR sequence region, a hSYN promoter, a human beta-globin intron region, a heavy chain signal sequence, a C10.2 antibody heavy chain variable region, a heavy chain constant region, a hinge region, a furin cleavage site, a T2A linker, a light chain signal sequence, a C10.2 antibody light chain variable region, a light chain constant region, and a rabbit globin polyadenylation signal sequence.

TABLE 48
Sequence Regions in ITR to ITR Sequences

| | TAU_ITR235 | | TAU_ITR199 | | TAU_ITR209 | | TAU_ITR129 | |
|---|---|---|---|---|---|---|---|---|
| | (SEQ ID NO: | | (SEQ ID NO: | | (SEQ ID NO: | | (SEQ ID NO: | |
| | 2307) | | 2271) | | 2281) | | 2179) | |
| | Region | | Region | | Region | | Region | |
| Sequence | SEQ | Region | SEQ | Region | SEQ | Region | SEQ | Region |
| Regions | ID NO | length | ID NO | length | ID NO | length | ID NO | length |
| 5′ ITR | 2076 | 130 | 2076 | 130 | 2076 | 130 | 2076 | 130 |
| Promoter | 2086 | 557 | 2085 | 699 | 2086 | 557 | 2239 | 380 |
| Intron | 2240 | 566 | 2240 | 566 | 2240 | 566 | 2240 | 566 |
| Signal | 1861 | 57 | 1861 | 57 | 1861 | 57 | 1861 | 57 |
| VL | 1926 | 321 | 1939 | 336 | 1939 | 336 | 1939 | 336 |
| Constant | 1864 | 321 | 1864 | 321 | 1864 | 321 | 1864 | 321 |
| Linker | 1726 | 54 | 1726 | 54 | 1726 | 54 | 1726 | 54 |
| Signal | 1740 | 57 | 1740 | 57 | 1740 | 57 | 1740 | 57 |
| VH | 1809 | 345 | 1821 | 351 | 1821 | 351 | 1821 | 351 |
| Constant | 2242 | 309 | 2242 | 309 | 2242 | 309 | 2242 | 309 |
| PolyA | 2122 | 127 | 2122 | 127 | 2122 | 127 | 2122 | 127 |
| 3′ ITR | 2078 | 130 | 2078 | 130 | 2078 | 130 | 2078 | 130 |

[0627] In some embodiments, the AAV particle genome comprises SEQ ID NO: 2307 (TAU_ITR235) which comprises a 5′ inverted terminal repeat (ITR) sequence region and a 3′ ITR sequence region, a hSYN promoter, a human beta-globin intron region, a light chain signal sequence, a C10.2 antibody light chain variable region, a light chain constant region, a T2A linker, a heavy chain signal sequence, a C10.2 antibody heavy chain variable region, a heavy chain constant region, and a rabbit globin polyadenylation signal sequence.

[0628] In some embodiments, the AAV particle genome comprises SEQ ID NO: 2271 (TAU_ITR199) which comprises a 5′ inverted terminal repeat (ITR) sequence region and a 3′ ITR sequence region, a GFAP promoter, a human beta-globin intron region, a light chain signal sequence, an IPN002 antibody light chain variable region, a light chain constant region, a T2A linker, a heavy chain signal sequence, an IPN002 antibody heavy chain variable region, a heavy chain constant region, and a rabbit globin polyadenylation signal sequence.

[0629] In some embodiments, the AAV particle genome comprises SEQ ID NO: 2281 (TAU_ITR209) which comprises a 5′ inverted terminal repeat (ITR) sequence region and a 3′ ITR sequence region, a hSYN promoter, a human beta-globin intron region, a light chain signal sequence, an IPN002 antibody light chain variable region, a light chain constant region, a T2A linker, a heavy chain signal sequence, an IPN002 antibody heavy chain variable region, a heavy chain constant region, and a rabbit globin polyadenylation signal sequence.

[0630] In some embodiments, the AAV particle genome comprises SEQ ID NO: 2179 (TAU_ITR129) which comprises a 5′ inverted terminal repeat (ITR) sequence region and a 3′ ITR sequence region, a CMVie region, a human beta-globin intron region, a light chain signal sequence, an IPN002 antibody light chain variable region, a light chain constant region, a T2A linker, a heavy chain signal sequence, an IPN002 antibody heavy chain variable region, a heavy chain constant region, and a rabbit globin polyadenylation signal sequence.

TABLE 49
Sequence Regions in ITR to ITR Sequences

| | |
|---|---|
| TAU_ITR88 | TAU_ITR96 |
| (SEQ ID NO: 2138) | (SEQ ID NO: 2146) |

| Sequence | Region SEQ | Region | Region SEQ | Region |
|---|---|---|---|---|
| Regions | ID NO | length | ID NO | length |
| 5′ ITR | 2076 | 130 | 2076 | 130 |
| Promoter | 2239 | 380 | 2239 | 380 |
| Promoter | 2083 | 260 | 2083 | 260 |
| Intron | 2240 | 566 | 2240 | 566 |
| Signal | 1740 | 57 | 1740 | 57 |
| VH | 1809 | 345 | 1809 | 345 |
| Constant | 1742 | 969 | 1742 | 969 |
| Linker | 1725 | 12 | 1724 | 12 |
| Linker | 1727 | 75 | 1726 | 54 |
| Signal | 1861 | 57 | 1861 | 57 |
| VL | 1926 | 321 | 1926 | 321 |
| Constant | 1864 | 321 | 1864 | 321 |
| PolyA | 2122 | 127 | 2122 | 127 |
| 3′ ITR | 2078 | 130 | 2078 | 130 |

[0631] In some embodiments, the AAV particle genome comprises SEQ ID NO: 2138 (TAU_ITR88) which comprises a 5′ inverted terminal repeat (ITR) sequence region and a 3′ ITR sequence region, a CMVie region, a CB promoter, a human beta-globin intron region, a heavy chain signal sequence, a C10.2 antibody heavy chain variable region, a heavy chain constant region, a furin cleavage site, an F2A linker, a light chain signal sequence, a C10.2 antibody light chain variable region, a light chain constant region, and a rabbit globin polyadenylation signal sequence.

[0632] In some embodiments, the AAV particle genome comprises SEQ ID NO: 2146 (TAU_ITR96) which comprises a 5′ inverted terminal repeat (ITR) sequence region and a 3′ ITR sequence region, a CMVie region, a CB promoter, a human beta-globin intron region, a heavy chain signal sequence, a C10.2 antibody heavy chain variable region, a heavy chain constant region, a furin cleavage site, an T2A linker, a light chain signal sequence, a C10.2 antibody light chain variable region, a light chain constant region, and a rabbit globin polyadenylation signal sequence.

TABLE 50
Sequence Regions in ITR to ITR Sequences

| | |
|---|---|
| Sequence | TAU_ITR92 (SEQ ID NO: 2142) |

| Regions | Region SEQ ID NO | Region length |
|---|---|---|
| 5′ ITR | 2076 | 130 |
| Promoter | 2239 | 380 |
| Promoter | 2083 | 260 |
| Intron | 2240 | 566 |
| Signal | 1861 | 57 |
| VL | 1926 | 321 |
| Constant | 1864 | 321 |
| Linker | 1727 | 75 |
| Signal | 1740 | 57 |
| VH | 1809 | 345 |
| Constant | 1742 | 969 |
| PolyA | 2122 | 127 |
| 3′ ITR | 2078 | 130 |

[0633] In some embodiments, the AAV particle genome comprises SEQ ID NO: 2142 (TAU_ITR92) which comprises a 5′ inverted terminal repeat (ITR) sequence region and a 3′ ITR sequence region, a CMVie region, a CB promoter, a human beta-globin intron region, a light chain signal sequence, a C10.2 antibody light chain variable region, a light chain constant region, an F2A linker, a heavy chain signal sequence, a C10.2 antibody heavy chain variable region, a heavy chain constant region, and a rabbit globin polyadenylation signal sequence.

TABLE 51
Sequence Regions in ITR to ITR Sequences

| | TAU_ITR139 | | TAU_ITR140 | | TAU_ITR141 | | TAU_ITR142 | | TAU_ITR143 | |
|---|---|---|---|---|---|---|---|---|---|---|
| | (SEQ ID NO: | | (SEQ ID NO: | | (SEQ ID NO: | | (SEQ ID NO: | | (SEQ ID NO: | |
| | 2189) | | 2190) | | 2191) | | 2192) | | 2193) | |
| | Region | | Region | | Region | | Region | | Region | |
| Sequence | SEQ | Region | SEQ | Region | SEQ | Region | SEQ | Region | SEQ | Region |
| Regions | ID NO | length | ID NO | length | ID NO | length | ID NO | length | ID NO | length |
| 5′ ITR | 2076 | 130 | 2076 | 130 | 2076 | 130 | 2076 | 130 | 2076 | 130 |
| CAG | 2080 | 1715 | 2080 | 1715 | 2080 | 1715 | 2080 | 1715 | 2080 | 1715 |
| promoter | | | | | | | | | | |
| CMVie | 2081 | 299 | 2081 | 299 | 2081 | 299 | 2081 | 299 | 2081 | 299 |
| CBA min. | 2082 | 283 | 2082 | 283 | 2082 | 283 | 2082 | 283 | 2082 | 283 |
| Signal | 1740 | 57 | 1740 | 57 | 1740 | 57 | 1740 | 57 | 1740 | 57 |
| VH | 1821 | 351 | 1821 | 351 | 1821 | 351 | 1821 | 351 | 1821 | 351 |
| Linker | 1730 | 45 | 2254 | 60 | 2249 | 75 | 2251 | 90 | 2252 | 120 |
| VL | 1939 | 336 | 1939 | 336 | 1939 | 336 | 1939 | 336 | 1939 | 336 |
| Tag | 2118 | 27 | 2118 | 27 | 2118 | 27 | 2118 | 27 | 2118 | 27 |
| PolyA | 2122 | 127 | 2122 | 127 | 2122 | 127 | 2122 | 127 | 2122 | 127 |
| 3′ ITR | 2078 | 130 | 2078 | 130 | 2078 | 136 | 2078 | 130 | 2078 | 130 |

[0634] In some embodiments, the AAV particle genome comprises SEQ ID NO: 2189 (TAU_ITR139) which comprises a 5′ inverted terminal repeat (ITR) sequence region and a 3′ ITR sequence region, a CAG promoter comprising a CMVie region and a minimal CBA promoter region, a heavy chain signal sequence, an IPN002 antibody heavy chain variable region, a (G4S)3 linker (“(G4S)3” disclosed as SEQ ID NO: 4537), an IPN002 antibody light chain variable region, an HA tag, and a rabbit globin polyadenylation signal sequence.

[0635] In some embodiments, the AAV particle genome comprises SEQ ID NO: 2190 (TAU_ITR140) which comprises a 5′ inverted terminal repeat (ITR) sequence region and a 3′ ITR sequence region, a CAG promoter comprising a CMVie region and a minimal CBA promoter region, a heavy chain signal sequence, an IPN002 antibody heavy chain variable region, a (G4S)4 linker (“(G4S)4” disclosed as SEQ ID NO: 4540), an IPN002 antibody light chain variable region, an HA tag, and a rabbit globin polyadenylation signal sequence.

[0636] In some embodiments, the AAV particle genome comprises SEQ ID NO: 2191 (TAU_ITR141) which comprises a 5′ inverted terminal repeat (ITR) sequence region and a 3′ ITR sequence region, a CAG promoter comprising a CMVie region and a minimal CBA promoter region, a heavy chain signal sequence, an IPN002 antibody heavy chain variable region, a (G4S)5 linker (“(G4S)5” disclosed as SEQ ID NO: 4538), an IPN002 antibody light chain variable region, an HA tag, and a rabbit globin polyadenylation signal sequence.

[0637] In some embodiments, the AAV particle genome comprises SEQ ID NO: 2192 (TAU_ITR142) which comprises a 5′ inverted terminal repeat (ITR) sequence region and a 3′ ITR sequence region, a CAG promoter comprising a CMVie region and a minimal CBA promoter region, a heavy chain signal sequence, an IPN002 antibody heavy chain variable region, a (G4S)6 linker (“(G4S)4” disclosed as SEQ ID NO: 4541), an IPN002 antibody light chain variable region, an HA tag, and a rabbit globin polyadenylation signal sequence.

[0638] In some embodiments, the AAV particle genome comprises SEQ ID NO: 2193 (TAU_ITR143) which comprises a 5′ inverted terminal repeat (ITR) sequence region and a 3′ ITR sequence region, a CAG promoter comprising a CMVie region and a minimal CBA promoter region, a heavy chain signal sequence, an IPN002 antibody heavy chain variable region, a (G4S)8 linker (“(G4S)8” disclosed as SEQ ID NO: 4542), an IPN002 antibody light chain variable region, an HA tag, and a rabbit globin polyadenylation signal sequence.

TABLE 52
Sequence Regions in ITR to ITR Sequences

| | |
|---|---|
| Sequence | TAU_ITR137 (SEQ ID NO: 2187) |

| Regions | Region SEQ ID NO | Region length |
|---|---|---|
| 5′ ITR | 2076 | 130 |
| CAG promoter | 2080 | 1715 |
| CMVie | 2081 | 299 |
| CBA min. | 2082 | 283 |
| Signal | 1740 | 57 |
| VH | 1821 | 351 |
| Linker | 2245 | 15 |
| VL | 1939 | 336 |
| Tag | 2118 | 27 |
| PolyA | 2122 | 127 |
| 3′ ITR | 2078 | 130 |

[0639] In some embodiments, the AAV particle genome comprises SEQ ID NO: 2187 (TAU_ITR137) which comprises a 5′ inverted terminal repeat (ITR) sequence region and a 3′ ITR sequence region, a CAG promoter comprising a CMVie region and a minimal CBA promoter region, a heavy chain signal sequence, an IPN002 antibody heavy chain variable region, a G4S linker (“G4S” disclosed as SEQ ID NO: 4535), an IPN002 antibody light chain variable region, an HA tag, and a rabbit globin polyadenylation signal sequence.

TABLE 53
Sequence Regions in ITR to ITR Sequences

| | TAU_ITR125 | | TAU_ITR127 | | TAU_ITR128 | |
|---|---|---|---|---|---|---|
| | (SEQ ID NO: | | (SEQ ID NO: | | (SEQ ID NO: | |
| | 2175) | | 2177) | | 2178) | |
| | Region | | Region | | Region | |
| Sequence | SEQ | Region | SEQ | Region | SEQ | Region |
| Regions | ID NO | length | ID NO | length | ID NO | length |
| 5′ ITR | 2076 | 130 | 2076 | 130 | 2076 | 130 |
| CAG | 2080 | 1715 | 2080 | 1715 | 2080 | 1715 |
| promoter | | | | | | |
| CMVie | 2081 | 299 | 2081 | 299 | 2081 | 299 |
| CBA min. | 2082 | 283 | 2082 | 283 | 2082 | 283 |
| Signal | 1740 | 57 | 1740 | 57 | 1740 | 57 |
| VH | 1821 | 351 | 1821 | 351 | 1821 | 351 |
| Constant | 2242 | 309 | 2243 | 291 | 2242 | 309 |
| Linker | 1724 | 12 | 1724 | 12 | 1724 | 12 |
| Linker | 1726 | 54 | 1726 | 54 | 1726 | 54 |
| Signal | 1861 | 57 | 1861 | 57 | 1861 | 57 |
| VL | 1939 | 336 | 1939 | 336 | 1939 | 336 |
| Constant | 1864 | 321 | 1864 | 321 | 1864 | 321 |
| PolyA | 2122 | 127 | 2122 | 127 | 2122 | 127 |
| 3′ ITR | 2078 | 130 | 2078 | 130 | 2078 | 130 |

[0640] In some embodiments, the AAV particle genome comprises SEQ ID NO: 2175 (TAU_ITR125) which comprises a 5′ inverted terminal repeat (ITR) sequence region and a 3′ ITR sequence region, a CAG promoter comprising a CMVie region and a minimal CBA promoter region, a heavy chain signal sequence, an IPN002 antibody heavy chain variable region, a heavy chain constant region, a furin cleavage site, a T2A linker, a light chain signal sequence, an IPN002 antibody light chain variable region, a light chain constant region, and a rabbit globin polyadenylation signal sequence.

[0641] In some embodiments, the AAV particle genome comprises SEQ ID NO: 2177 (TAU_ITR127) which comprises a 5′ inverted terminal repeat (ITR) sequence region and a 3′ ITR sequence region, a CAG promoter comprising a CMVie region and a minimal CBA promoter region, a heavy chain signal sequence, an IPN002 antibody heavy chain variable region, a heavy chain constant region, a furin cleavage site, a T2A linker, a light chain signal sequence, an IPN002 antibody light chain variable region, a light chain constant region, and a rabbit globin polyadenylation signal sequence.

[0642] In some embodiments, the AAV particle genome comprises SEQ ID NO: 2178 (TAU_ITR128) which comprises a 5′ inverted terminal repeat (ITR) sequence region and a 3′ ITR sequence region, a CAG promoter comprising a CMVie region and a minimal CBA promoter region, a heavy chain signal sequence, an IPN002 antibody heavy chain variable region, a heavy chain constant region, a furin cleavage site, a T2A linker, a light chain signal sequence, an IPN002 antibody light chain variable region, a light chain constant region, and a rabbit globin polyadenylation signal sequence.

TABLE 54
Sequence Regions in ITR to ITR Sequences

| | |
|---|---|
| Sequence | TAU_ITR126 (SEQ ID NO: 2176) |

| Regions | Region SEQ ID NO | Region length |
|---|---|---|
| 5′ ITR | 2076 | 130 |
| CAG promoter | 2080 | 1715 |
| CMVie | 2081 | 299 |
| CBA min. | 2082 | 283 |
| Signal | 1740 | 57 |
| VH | 1821 | 351 |
| Constant | 2242 | 309 |
| Linker | 2244 | 198 |
| Linker | 1724 | 12 |
| Linker | 1726 | 54 |
| Signal | 1861 | 57 |
| VL | 1939 | 336 |
| Constant | 1864 | 321 |
| PolyA | 2122 | 127 |
| 3′ ITR | 2078 | 130 |

[0643] In some embodiments, the AAV particle genome comprises SEQ ID NO: 2176 (TAU_ITR126) which comprises a 5′ inverted terminal repeat (ITR) sequence region and a 3′ ITR sequence region, a CAG promoter comprising a CMVie region and a minimal CBA promoter region, a heavy chain signal sequence, an IPN002 antibody heavy chain variable region, a heavy chain constant region, a hinge region, a furin cleavage site, a T2A linker, a light chain signal sequence, an IPN002 antibody light chain variable region, a light chain constant region, and a rabbit globin polyadenylation signal sequence.

TABLE 55
Sequence Regions in ITR to ITR Sequences

| | |
|---|---|
| Sequence | TAU_ITR138 (SEQ ID NO: 2188) |

| Regions | Region SEQ ID NO | Region length |
|---|---|---|
| 5′ ITR | 2076 | 130 |
| CAG promoter | 2080 | 1715 |
| CMVie | 2081 | 299 |
| CBA min. | 2082 | 283 |
| Signal | 1740 | 57 |
| VH | 1821 | 351 |
| VL | 1939 | 336 |
| Tag | 2118 | 27 |
| PolyA | 2122 | 127 |
| 3′ ITR | 2078 | 130 |

[0644] In some embodiments, the AAV particle genome comprises SEQ ID NO: 2188 (TAU_ITR138) which comprises a 5′ inverted terminal repeat (ITR) sequence region and a 3′ ITR sequence region, a CAG promoter comprising a CMVie region and a minimal CBA promoter region, a heavy chain signal sequence, an IPN002 antibody heavy chain variable region, an IPN002 antibody light chain variable region, an HA tag, and a rabbit globin polyadenylation signal sequence.

TABLE 56
Sequence Regions in ITR to ITR Sequences

| | TAU_ITR152 | | TAU_ITR153 | | TAU_ITR154 | | TAU_ITRI55 | | TAU_ITR150 | |
|---|---|---|---|---|---|---|---|---|---|---|
| | (SEQ ID NO: | | (SEQ ID NO: | | (SEQ ID NO: | | (SEQ ID NO: | | (SEQ ID NO: | |
| | 2202) | | 2203) | | 2204) | | 2205) | | 2200) | |
| | Region | | Region | | Region | | Region | | Region | |
| Sequence | SEQ | Region | SEQ | Region | SEQ | Region | SEQ | Region | SEQ | Region |
| Regions | ID NO | length | ID NO | length | ID NO | length | ID NO | length | ID NO | length |
| 5′ ITR | 2076 | 130 | 2076 | 130 | 2076 | 130 | 2076 | 130 | 2076 | 130 |
| CAG | 2238 | 1714 | 2238 | 1714 | 2238 | 1714 | 2238 | 1714 | 2080 | 1715 |
| promoter | | | | | | | | | | |
| CMVie | 2081 | 299 | 2081 | 299 | 2081 | 299 | 2081 | 299 | 2081 | 299 |
| CBA min. | 2082 | 283 | 2082 | 283 | 2082 | 283 | 2082 | 283 | 2082 | 283 |
| Signal | 1861 | 57 | 1861 | 57 | 1861 | 57 | 1861 | 57 | 1861 | 57 |
| VL | 1939 | 336 | 1939 | 336 | 1939 | 336 | 1939 | 336 | 1939 | 336 |
| Linker | 2247 | 45 | 2248 | 60 | 2250 | 75 | 2259 | 90 | 2245 | 15 |
| VH | 1821 | 351 | 1821 | 351 | 1821 | 351 | 1821 | 351 | 1821 | 351 |
| Tag | 2118 | 27 | 2118 | 27 | 2118 | 27 | 2118 | 27 | 2118 | 27 |
| PolyA | 2122 | 127 | 2122 | 127 | 2122 | 127 | 2122 | 127 | 2122 | 127 |
| 3′ ITR | 2078 | 130 | 2078 | 130 | 2078 | 130 | 2078 | 130 | 2078 | 130 |

[0645] In some embodiments, the AAV particle genome comprises SEQ ID NO: 2202 (TAU_ITR152) which comprises a 5′ inverted terminal repeat (ITR) sequence region and a 3′ ITR sequence region, a CAG promoter comprising a CMVie region and a minimal CBA promoter region, a light chain signal sequence, an IPN002 antibody light chain variable region, a (G4S)3 linker (“(G4S)3” disclosed as SEQ ID NO: 4537), an IPN002 antibody heavy chain variable region, an HA tag, and a rabbit globin polyadenylation signal sequence.

[0646] In some embodiments, the AAV particle genome comprises SEQ ID NO: 2203 (TAU_ITR153) which comprises a 5′ inverted terminal repeat (ITR) sequence region and a 3′ ITR sequence region, a CAG promoter comprising a CMVie region and a minimal CBA promoter region, a light chain signal sequence, an IPN002 antibody light chain variable region, a (G4S)4 linker (“(G4S)4” disclosed as SEQ ID NO: 4540), an IPN002 antibody heavy chain variable region, an HA tag, and a rabbit globin polyadenylation signal sequence.

[0647] In some embodiments, the AAV particle genome comprises SEQ ID NO: 2204 (TAU_ITR154) which comprises a 5′ inverted terminal repeat (ITR) sequence region and a 3′ ITR sequence region, a CAG promoter comprising a CMVie region and a minimal CBA promoter region, a light chain signal sequence, an IPN002 antibody light chain variable region, a (G4S)5 linker (“(G4S)5” disclosed as SEQ ID NO: 4538), an IPN002 antibody heavy chain variable region, an HA tag, and a rabbit globin polyadenylation signal sequence.

[0648] In some embodiments, the AAV particle genome comprises SEQ ID NO: 2205 (TAU_ITR155) which comprises a 5′ inverted terminal repeat (ITR) sequence region and a 3′ ITR sequence region, a CAG promoter comprising a CMVie region and a minimal CBA promoter region, a light chain signal sequence, an IPN002 antibody light chain variable region, a (G4S)6 linker (“(G4S)4” disclosed as SEQ ID NO: 4541), an IPN002 antibody heavy chain variable region, an HA tag, and a rabbit globin polyadenylation signal sequence.

[0649] In some embodiments, the AAV particle genome comprises SEQ ID NO: 2200 (TAU_ITR150) which comprises a 5′ inverted terminal repeat (ITR) sequence region and a 3′ ITR sequence region, a CAG promoter comprising a CMVie region and a minimal CBA promoter region, a light chain signal sequence, an IPN002 antibody light chain variable region, a G4S linker (“G4S” disclosed as SEQ ID NO: 4535), an IPN002 antibody heavy chain variable region, an HA tag, and a rabbit globin polyadenylation signal sequence.

TABLE 57
Sequence Regions in ITR to ITR Sequences

| | TAU_ITR200 | | TAU_ITR201 | | TAU_ITR202 | | TAU_ITR203 | | TAU_ITR211 | |
|---|---|---|---|---|---|---|---|---|---|---|
| | (SEQ ID NO: | | (SEQ ID NO: | | (SEQ ID NO: | | (SEQ ID NO: | | (SEQ ID NO: | |
| | 2272) | | 2273) | | 2274) | | 2275) | | 2283) | |
| | Region | | Region | | Region | | Region | | Region | |
| Sequence | SEQ | Region | SEQ | Region | SEQ | Region | SEQ | Region | SEQ | Region |
| Regions | ID NO | length | ID NO | length | ID NO | length | ID NO | length | ID NO | length |
| 5′ ITR | 2076 | 130 | 2076 | 130 | 2076 | 130 | 2076 | 130 | 2076 | 130 |
| Promoter | 2085 | 699 | 2085 | 699 | 2085 | 699 | 2085 | 699 | 2086 | 557 |
| Intron | 2240 | 566 | 2240 | 566 | 2240 | 566 | 2240 | 566 | 2240 | 566 |
| Signal | 1740 | 57 | 1740 | 57 | 1740 | 57 | 1740 | 57 | 1740 | 57 |
| VH | 1821 | 351 | 1821 | 351 | 1821 | 351 | 1821 | 351 | 1821 | 351 |
| Linker | 2245 | 15 | 1730 | 45 | 2249 | 75 | 2252 | 120 | 1730 | 45 |
| VL | 1939 | 336 | 1939 | 336 | 1939 | 336 | 1939 | 336 | 1939 | 336 |
| Tag | 2118 | 27 | 2118 | 27 | 2118 | 27 | 2118 | 27 | 2118 | 27 |
| PolyA | 2122 | 127 | 2122 | 127 | 2122 | 127 | 2122 | 127 | 2122 | 127 |
| 3′ ITR | 2078 | 130 | 2078 | 130 | 2078 | 130 | 2078 | 130 | 2078 | 130 |

[0650] In some embodiments, the AAV particle genome comprises SEQ ID NO: 2272 (TAU_ITR200) which comprises a 5′ inverted terminal repeat (ITR) sequence region and a 3′ ITR sequence region, a GFAP promoter, a human beta-globin intron region, a heavy chain signal sequence, an IPN002 antibody heavy chain variable region, a G4S linker (“G4S” disclosed as SEQ ID NO: 4535), an IPN002 antibody light chain variable region, an HA tag, and a rabbit globin polyadenylation signal sequence.

[0651] In some embodiments, the AAV particle genome comprises SEQ ID NO: 2273 (TAU_ITR201) which comprises a 5′ inverted terminal repeat (ITR) sequence region and a 3′ ITR sequence region, a GFAP promoter, a human beta-globin intron region, a heavy chain signal sequence, an IPN002 antibody heavy chain variable region, a (G4S)3 linker (“(G4S)3” disclosed as SEQ ID NO: 4537), an IPN002 antibody light chain variable region, an HA tag, and a rabbit globin polyadenylation signal sequence.

[0652] In some embodiments, the AAV particle genome comprises SEQ ID NO: 2274 (TAU_ITR202) which comprises a 5′ inverted terminal repeat (ITR) sequence region and a 3′ ITR sequence region, a GFAP promoter, a human beta-globin intron region, a heavy chain signal sequence, an IPN002 antibody heavy chain variable region, a (G4S)5 linker (“(G4S)5” disclosed as SEQ ID NO: 4538), an IPN002 antibody light chain variable region, an HA tag, and a rabbit globin polyadenylation signal sequence.

[0653] In some embodiments, the AAV particle genome comprises SEQ ID NO: 2275 (TAU_ITR203) which comprises a 5′ inverted terminal repeat (ITR) sequence region and a 3′ ITR sequence region, a GFAP promoter, a human beta-globin intron region, a heavy chain signal sequence, an IPN002 antibody heavy chain variable region, a (G4S)8 linker (“(G4S)8” disclosed as SEQ ID NO: 4542), an IPN002 antibody light chain variable region, an HA tag, and a rabbit globin polyadenylation signal sequence.

[0654] In some embodiments, the AAV particle genome comprises SEQ ID NO: 2283 (TAU_ITR211) which comprises a 5′ inverted terminal repeat (ITR) sequence region and a 3′ ITR sequence region, a hSYN promoter, a human beta-globin intron region, a heavy chain signal sequence, an IPN002 antibody heavy chain variable region, a (G4S)3 linker (“(G4S)3” disclosed as SEQ ID NO: 4537), an IPN002 antibody light chain variable region, an HA tag, and a rabbit globin polyadenylation signal sequence.

TABLE 58
Sequence Regions in ITR to ITR Sequences

| | TAU_ITR206 | | TAU_ITR215 | | TAU_ITR216 | | TAU_ITR214 | | TAU_ITR144 | |
|---|---|---|---|---|---|---|---|---|---|---|
| | (SEQ ID NO: | | (SEQ ID NO: | | (SEQ ID NO: | | (SEQ ID NO: | | (SEQ ID NO: | |
| | 2278) | | 2287) | | 2288) | | 2286) | | 2194) | |
| | Region | | Region | | Region | | Region | | Region | |
| Sequence | SEQ | Region | SEQ | Region | SEQ | Region | SEQ | Region | SEQ | Region |
| Regions | ID NO | length | ID NO | length | ID NO | length | ID NO | length | ID NO | length |
| 5′ ITR | 2076 | 130 | 2076 | 130 | 2076 | 130 | 2076 | 130 | 2076 | 130 |
| Promoter | 2085 | 699 | 2086 | 557 | 2086 | 557 | 2086 | 557 | 2239 | 380 |
| Intron | 2240 | 566 | 2240 | 566 | 2240 | 566 | 2240 | 566 | 2240 | 566 |
| Signal | 1861 | 57 | 1861 | 57 | 1861 | 57 | 1861 | 57 | 1861 | 57 |
| VL | 1939 | 336 | 1939 | 336 | 1939 | 336 | 1939 | 336 | 1939 | 336 |
| Linker | 2250 | 75 | 2247 | 45 | 2250 | 75 | 2245 | 15 | 2245 | 15 |
| VH | 1821 | 351 | 1821 | 351 | 1821 | 351 | 1821 | 351 | 1821 | 351 |
| Tag | 2118 | 27 | 2118 | 27 | 2118 | 27 | 2118 | 27 | 2118 | 27 |
| PolyA | 2122 | 127 | 2122 | 127 | 2122 | 127 | 2122 | 127 | 2122 | 127 |
| 3′ ITR | 2078 | 130 | 2078 | 130 | 2078 | 130 | 2078 | 130 | 2078 | 130 |

[0655] In some embodiments, the AAV particle genome comprises SEQ ID NO: 2278 (TAU_ITR206) which comprises a 5′ inverted terminal repeat (ITR) sequence region and a 3′ ITR sequence region, a GFAP promoter, a human beta-globin intron region, a light chain signal sequence, an IPN002 antibody light chain variable region, a (G4S)5 linker (“(G4S)5” disclosed as SEQ ID NO: 4538), an IPN002 antibody heavy chain variable region, an HA tag, and a rabbit globin polyadenylation signal sequence.

[0656] In some embodiments, the AAV particle genome comprises SEQ ID NO: 2287 (TAU_ITR215) which comprises a 5′ inverted terminal repeat (ITR) sequence region and a 3′ ITR sequence region, a hSYN promoter, a human beta-globin intron region, a light chain signal sequence, an IPN002 antibody light chain variable region, a (G4S)3 linker (“(G4S)3” disclosed as SEQ ID NO: 4537), an IPN002 antibody heavy chain variable region, an HA tag, and a rabbit globin polyadenylation signal sequence.

[0657] In some embodiments, the AAV particle genome comprises SEQ ID NO: 2288 (TAU_ITR216) which comprises a 5′ inverted terminal repeat (ITR) sequence region and a 3′ ITR sequence region, a hSYN promoter, a human beta-globin intron region, a light chain signal sequence, an IPN002 antibody light chain variable region, a (G4S)5 linker (“(G4S)5” disclosed as SEQ ID NO: 4538), an IPN002 antibody heavy chain variable region, an HA tag, and a rabbit globin polyadenylation signal sequence.

[0658] In some embodiments, the AAV particle genome comprises SEQ ID NO: 2286 (TAU_ITR214) which comprises a 5′ inverted terminal repeat (ITR) sequence region and a 3′ ITR sequence region, a hSYN promoter, a human beta-globin intron region, a light chain signal sequence, an IPN002 antibody light chain variable region, a G4S linker (“G4S” disclosed as SEQ ID NO: 4535), an IPN002 antibody heavy chain variable region, an HA tag, and a rabbit globin polyadenylation signal sequence.

[0659] In some embodiments, the AAV particle genome comprises SEQ ID NO: 2194 (TAU_ITR144) which comprises a 5′ inverted terminal repeat (ITR) sequence region and a 3′ ITR sequence region, a CMVie region, a human beta-globin intron region, a light chain signal sequence, an IPN002 antibody light chain variable region, a G4S linker (“G4S” disclosed as SEQ ID NO: 4535), an IPN002 antibody heavy chain variable region, an HA tag, and a rabbit globin polyadenylation signal sequence.

TABLE 59
Sequence Regions in ITR to ITR Sequences

| | TAU_ITR212 | | TAU_ITR213 | | TAU_ITR210 | |
|---|---|---|---|---|---|---|
| | (SEQ ID NO: | | (SEQ ID NO: | | (SEQ ID NO: | |
| | 2284) | | 2285) | | 2282) | |
| | Region | | Region | | Region | |
| Sequence | SEQ | Region | SEQ | Region | SEQ | Region |
| Regions | ID NO | length | ID NO | length | ID NO | length |
| 5′ ITR | 2076 | 130 | 2076 | 130 | 2076 | 130 |
| Promoter | 2086 | 557 | 2086 | 557 | 2086 | 557 |
| Intron | 2240 | 566 | 2240 | 566 | 2240 | 566 |
| Signal | 1740 | 57 | 1740 | 57 | 1740 | 57 |
| VH | 1821 | 351 | 1821 | 351 | 1821 | 351 |
| Linker | 2249 | 75 | 2252 | 120 | 2245 | 15 |
| VL | 1939 | 336 | 1939 | 336 | 1939 | 336 |
| Tag | 2118 | 27 | 2118 | 27 | 2118 | 27 |
| PolyA | 2122 | 127 | 2122 | 127 | 2122 | 127 |
| 3′ ITR | 2078 | 130 | 2078 | 130 | 2078 | 130 |

[0660] In some embodiments, the AAV particle genome comprises SEQ ID NO: 2284 (TAU_ITR212) which comprises a 5′ inverted terminal repeat (ITR) sequence region and a 3′ ITR sequence region, a hSYN promoter, a human beta-globin intron region, a heavy chain signal sequence, an IPN002 antibody heavy chain variable region, a (G4S)5 linker (“(G4S)5” disclosed as SEQ ID NO: 4538), an IPN002 antibody light chain variable region, an HA tag, and a rabbit globin polyadenylation signal sequence.

[0661] In some embodiments, the AAV particle genome comprises SEQ ID NO: 2285 (TAU_ITR213) which comprises a 5′ inverted terminal repeat (ITR) sequence region and a 3′ ITR sequence region, a hSYN promoter, a human beta-globin intron region, a heavy chain signal sequence, an IPN002 antibody heavy chain variable region, a (G4S)8 linker (“(G4S)8” disclosed as SEQ ID NO: 4542), an IPN002 antibody light chain variable region, an HA tag, and a rabbit globin polyadenylation signal sequence.

[0662] In some embodiments, the AAV particle genome comprises SEQ ID NO: 2282 (TAU_ITR210) which comprises a 5′ inverted terminal repeat (ITR) sequence region and a 3′ ITR sequence region, a hSYN promoter, a human beta-globin intron region, a heavy chain signal sequence, an IPN002 antibody heavy chain variable region, a G4S linker (G4S″ disclosed as SEQ ID NO: 4535), an IPN002 antibody light chain variable region, an HA tag, and a rabbit globin polyadenylation signal sequence.

TABLE 60
Sequence Regions in ITR to ITR Sequences

| | TAU_ITR131 | | TAU_ITR132 | | TAU_ITR133 | | TAU_ITR134 | | TAU_ITR135 | |
|---|---|---|---|---|---|---|---|---|---|---|
| | (SEQ ID NO: | | (SEQ ID NO: | | (SEQ ID NO: | | (SEQ ID NO: | | (SEQ ID NO: | |
| | 2181) | | 2182) | | 2183) | | 2184) | | 2185) | |
| | Region | | Region | | Region | | Region | | Region | |
| Sequence | SEQ | Region | SEQ | Region | SEQ | Region | SEQ | Region | SEQ | Region |
| Regions | ID NO | length | ID NO | length | ID NO | length | ID NO | length | ID NO | length |
| 5′ ITR | 2076 | 130 | 2076 | 130 | 2076 | 130 | 2076 | 130 | 2076 | 130 |
| Promoter | 2239 | 380 | 2239 | 380 | 2239 | 380 | 2239 | 380 | 2239 | 380 |
| Intron | 2240 | 566 | 2240 | 566 | 2240 | 566 | 2240 | 566 | 2240 | 566 |
| Signal | 1740 | 57 | 1740 | 57 | 1740 | 57 | 1740 | 57 | 1740 | 57 |
| VH | 1821 | 351 | 1821 | 351 | 1821 | 351 | 1821 | 351 | 1821 | 351 |
| Constant | 1864 | 321 | 1864 | 321 | 1864 | 321 | 1864 | 321 | 1864 | 321 |
| Linker | 2245 | 15 | 2246 | 30 | 1730 | 45 | 2254 | 60 | 2249 | 75 |
| VL | 1939 | 336 | 1939 | 336 | 1939 | 336 | 1939 | 336 | 1939 | 336 |
| Tag | 2118 | 27 | 2118 | 27 | 2118 | 27 | 2118 | 27 | 2118 | 27 |
| PolyA | 2122 | 127 | 2122 | 127 | 2122 | 127 | 2122 | 127 | 2122 | 127 |
| 3′ ITR | 2078 | 130 | 2078 | 130 | 2078 | 130 | 2078 | 130 | 2078 | 130 |

[0663] In some embodiments, the AAV particle genome comprises SEQ ID NO: 2181 (TAU_ITR131) which comprises a 5′ inverted terminal repeat (ITR) sequence region and a 3′ ITR sequence region, a CMVie region, a human beta-globin intron region, a heavy chain signal sequence, an IPN002 antibody heavy chain variable region, a light chain constant region, a G4S linker (“G4S” disclosed as SEQ ID NO: 4535), an IPN002 antibody light chain variable region, an HA tag, and a rabbit globin polyadenylation signal sequence.

[0664] In some embodiments, the AAV particle genome comprises SEQ ID NO: 2182 (TAU_ITR132) which comprises a 5′ inverted terminal repeat (ITR) sequence region and a 3′ ITR sequence region, a CMVie region, a human beta-globin intron region, a heavy chain signal sequence, an IPN002 antibody heavy chain variable region, a light chain constant region, a (G4S)2 linker (“(G4S)4” disclosed as SEQ ID NO: 4539), an IPN002 antibody light chain variable region, an HA tag, and a rabbit globin polyadenylation signal sequence.

[0665] In some embodiments, the AAV particle genome comprises SEQ ID NO: 2183 (TAU_ITR133) which comprises a 5′ inverted terminal repeat (ITR) sequence region and a 3′ ITR sequence region, a CMVie region, a human beta-globin intron region, a heavy chain signal sequence, an IPN002 antibody heavy chain variable region, a light chain constant region, a (G4S)3 linker (“(G4S)3” disclosed as SEQ ID NO: 4537), an IPN002 antibody light chain variable region, an HA tag, and a rabbit globin polyadenylation signal sequence.

[0666] In some embodiments, the AAV particle genome comprises SEQ ID NO: 2184 (TAU_ITR134) which comprises a 5′ inverted terminal repeat (ITR) sequence region and a 3′ ITR sequence region, a CMVie region, a human beta-globin intron region, a heavy chain signal sequence, an IPN002 antibody heavy chain variable region, a light chain constant region, a (G4S)4 linker (“(G4S)4” disclosed as SEQ ID NO: 4540), an IPN002 antibody light chain variable region, an HA tag, and a rabbit globin polyadenylation signal sequence.

[0667] In some embodiments, the AAV particle genome comprises SEQ ID NO: 2185 (TAU_ITR135) which comprises a 5′ inverted terminal repeat (ITR) sequence region and a 3′ ITR sequence region, a CMVie region, a human beta-globin intron region, a heavy chain signal sequence, an IPN002 antibody heavy chain variable region, a light chain constant region, a (G4S)5 linker (“(G4S)5” disclosed as SEQ ID NO: 4538), an IPN002 antibody light chain variable region, an HA tag, and a rabbit globin polyadenylation signal sequence.

TABLE 61
Sequence Regions in ITR to ITR Sequences

| | |
|---|---|
| Sequence | TAU_ITR136 (SEQ ID NO: 2186) |

| Regions | Region SEQ ID NO | Region length |
|---|---|---|
| 5′ ITR | 2076 | 130 |
| Promoter | 2239 | 380 |
| Intron | 2240 | 566 |
| Signal | 1740 | 57 |
| VH | 1821 | 351 |
| Constant | 1864 | 321 |
| Linker | 2251 | 90 |
| VL | 1939 | 336 |
| Tag | 2118 | 27 |
| PolyA | 2122 | 127 |
| 3′ ITR | 2078 | 130 |

[0668] In some embodiments, the AAV particle genome comprises SEQ ID NO: 2186 (TAU_ITR136) which comprises a 5′ inverted terminal repeat (ITR) sequence region and a 3′ ITR sequence region, a CMVie region, a human beta-globin intron region, a heavy chain signal sequence, an IPN002 antibody heavy chain variable region, a light chain constant region, a (G4S)6 linker (“(G4S)4” disclosed as SEQ ID NO: 4541), an IPN002 antibody light chain variable region, an HA tag, and a rabbit globin polyadenylation signal sequence.

TABLE 62
Sequence Regions in ITR to ITR Sequences

| | |
|---|---|
| Sequence | TAU_ITR121 (SEQ ID NO: 2171) |

| Regions | Region SEQ ID NO | Region length |
|---|---|---|
| 5′ ITR | 2076 | 130 |
| Promoter | 2239 | 380 |
| Intron | 2240 | 566 |
| Signal | 2241 | 57 |
| VH | 1821 | 351 |
| Constant | 2242 | 309 |
| Linker | 1724 | 12 |
| Linker | 1726 | 54 |
| Constant | 1864 | 321 |
| PolyA | 2122 | 127 |
| 3′ ITR | 2078 | 130 |

[0669] In some embodiments, the AAV particle genome comprises SEQ ID NO: 2171 (TAU_ITR121) which comprises a 5′ inverted terminal repeat (ITR) sequence region and a 3′ ITR sequence region, a CMVie region, a human beta-globin intron region, a heavy chain signal sequence, an IPN002 antibody heavy chain variable region, a heavy chain constant region, a furin cleavage site, a T2A linker, a light chain constant region, and a rabbit globin polyadenylation signal sequence.

TABLE 63
Sequence Regions in ITR to ITR Sequences

| | |
|---|---|
| TAU_ITR123 | TAU_ITR124 |
| (SEQ ID NO: 2173) | (SEQ ID NO: 2174) |

| Sequence | Region SEQ | Region | Region SEQ | Region |
|---|---|---|---|---|
| Regions | ID NO | length | ID NO | length |
| 5′ ITR | 2076 | 130 | 2076 | 130 |
| Promoter | 2239 | 380 | 2239 | 380 |
| Intron | 2240 | 566 | 2240 | 566 |
| Signal | 2241 | 57 | 2241 | 57 |
| VH | 1821 | 351 | 1821 | 351 |
| Constant | 2243 | 291 | 2242 | 309 |
| Linker | 1724 | 12 | 1724 | 12 |
| Linker | 1726 | 54 | 1726 | 54 |
| Signal | 1861 | 57 | 1861 | 57 |
| VL | 1939 | 336 | 1939 | 336 |
| Constant | 1864 | 321 | 1864 | 321 |
| PolyA | 2122 | 127 | 2122 | 127 |
| 3′ ITR | 2078 | 130 | 2078 | 130 |

[0670] In some embodiments, the AAV particle genome comprises SEQ ID NO: 2173 (TAU_ITR123) which comprises a 5′ inverted terminal repeat (ITR) sequence region and a 3′ ITR sequence region, a CMVie region, a human beta-globin intron region, a heavy chain signal sequence, an IPN002 antibody heavy chain variable region, a heavy chain constant region, a furin cleavage site, a T2A linker, a light chain signal sequence, an IPN002 antibody light chain variable region, a light chain constant region, and a rabbit globin polyadenylation signal sequence.

[0671] In some embodiments, the AAV particle genome comprises SEQ ID NO: 2174 (TAU_ITR124) which comprises a 5′ inverted terminal repeat (ITR) sequence region and a 3′ ITR sequence region, a CMVie region, a human beta-globin intron region, a heavy chain signal sequence, an IPN002 antibody heavy chain variable region, a heavy chain constant region, a furin cleavage site, a T2A linker, a light chain signal sequence, an IPN002 antibody light chain variable region, a light chain constant region, and a rabbit globin polyadenylation signal sequence.

TABLE 64
Sequence Regions in ITR to ITR Sequences

| | TAU_ITR145 | | TAU_ITR146 | | TAU_ITR147 | | TAU_ITR148 | | TAU_ITR149 | |
|---|---|---|---|---|---|---|---|---|---|---|
| | (SEQ ID NO: | | (SEQ ID NO: | | (SEQ ID NO: | | (SEQ ID NO: | | (SEQ ID NO: | |
| | 2195) | | 2196) | | 2197) | | 2198) | | 2199) | |
| | Region | | Region | | Region | | Region | | Region | |
| Sequence | SEQ | Region | SEQ | Region | SEQ | Region | SEQ | Region | SEQ | Region |
| Regions | ID NO | length | ID NO | length | ID NO | length | ID NO | length | ID NO | length |
| 5′ ITR | 2076 | 130 | 2076 | 130 | 2076 | 130 | 2076 | 130 | 2076 | 130 |
| Promoter | 2239 | 380 | 2239 | 380 | 2239 | 380 | 2239 | 380 | 2239 | 380 |
| Intron | 2240 | 566 | 2240 | 566 | 2240 | 566 | 2240 | 566 | 2240 | 566 |
| Signal | 1861 | 57 | 1861 | 57 | 1861 | 57 | 1861 | 57 | 1861 | 57 |
| VL | 1939 | 336 | 1939 | 336 | 1939 | 336 | 1939 | 336 | 1939 | 336 |
| Linker | 2246 | 30 | 1730 | 45 | 2254 | 60 | 2249 | 75 | 2251 | 90 |
| VH | 1821 | 351 | 1821 | 351 | 1821 | 351 | 1821 | 351 | 1821 | 351 |
| Tag | 2118 | 27 | 2118 | 27 | 2118 | 27 | 2118 | 27 | 2118 | 27 |
| PolyA | 2122 | 127 | 2122 | 127 | 2122 | 127 | 2122 | 127 | 2122 | 127 |
| 3′ ITR | 2078 | 130 | 2078 | 130 | 2078 | 130 | 2078 | 130 | 2078 | 130 |

[0672] In some embodiments, the AAV particle genome comprises SEQ ID NO: 2195 (TAU_ITR145) which comprises a 5′ inverted terminal repeat (ITR) sequence region and a 3′ ITR sequence region, a CMVie region, a human beta-globin intron region, a light chain signal sequence, an IPN002 antibody light chain variable region, a (G4S)2 linker (“(G4S)4” disclosed as SEQ ID NO: 4539), an IPN002 antibody heavy chain variable region, an HA tag, and a rabbit globin polyadenylation signal sequence.

[0673] In some embodiments, the AAV particle genome comprises SEQ ID NO: 2196 (TAU_ITR146) which comprises a 5′ inverted terminal repeat (ITR) sequence region and a 3′ ITR sequence region, a CMVie region, a human beta-globin intron region, a light chain signal sequence, an IPN002 antibody light chain variable region, a (G4S)3 linker (“(G4S)3” disclosed as SEQ ID NO: 4537), an IPN002 antibody heavy chain variable region, an HA tag, and a rabbit globin polyadenylation signal sequence.

[0674] In some embodiments, the AAV particle genome comprises SEQ ID NO: 2197 (TAU_ITR147) which comprises a 5′ inverted terminal repeat (ITR) sequence region and a 3′ ITR sequence region, a CMVie region, a human beta-globin intron region, a light chain signal sequence, an IPN002 antibody light chain variable region, a (G4S)4 linker (“(G4S)4” disclosed as SEQ ID NO: 4540), an IPN002 antibody heavy chain variable region, an HA tag, and a rabbit globin polyadenylation signal sequence.

[0675] In some embodiments, the AAV particle genome comprises SEQ ID NO: 2198 (TAU_ITR148) which comprises a 5′ inverted terminal repeat (ITR) sequence region and a 3′ ITR sequence region, a CMVie region, a human beta-globin intron region, a light chain signal sequence, an IPN002 antibody light chain variable region, a (G4S)5 linker (“(G4S)5” disclosed as SEQ ID NO: 4538), an IPN002 antibody heavy chain variable region, an HA tag, and a rabbit globin polyadenylation signal sequence.

[0676] In some embodiments, the AAV particle genome comprises SEQ ID NO: 2199 (TAU_ITR149) which comprises a 5′ inverted terminal repeat (ITR) sequence region and a 3′ ITR sequence region, a CMVie region, a human beta-globin intron region, a light chain signal sequence, an IPN002 antibody light chain variable region, a (G4S)6 linker (“(G4S)4” disclosed as SEQ ID NO: 4541), an IPN002 antibody heavy chain variable region, an HA tag, and a rabbit globin polyadenylation signal sequence.

TABLE 65
Sequence Regions in ITR to ITR Sequences

| | |
|---|---|
| Sequence | TAU_ITR244 (SEQ ID NO: 2316) |

| Regions | Region SEQ ID NO | Region length |
|---|---|---|
| 5′ ITR | 2076 | 130 |
| CAG promoter | 2080 | 1715 |
| CMVie | 2081 | 299 |
| CBA min. | 2082 | 283 |
| VH | 1838 | 1377 |
| Linker | 1724 | 12 |
| Linker | 1726 | 54 |
| VL | 1936 | 720 |
| PolyA | 2122 | 127 |
| 3′ ITR | 2078 | 130 |

[0677] In some embodiments, the AAV particle genome comprises SEQ ID NO: 2316 (TAU_ITR244) which comprises a 5′ inverted terminal repeat (ITR) sequence region and a 3′ ITR sequence region, a CAG promoter comprising a CMVie region and a minimal CBA promoter region, a PHF1 antibody heavy chain variable region, a furin cleavage site, a T2A linker, a PHF1 antibody light chain variable region and a rabbit beta globin polyadenylation signal sequence.

TABLE 66
Sequence Regions in ITR to ITR Sequences

| | |
|---|---|
| Sequence | TAU_ITR248 (SEQ ID NO: 2320) |

| Regions | Region SEQ ID NO | Region length |
|---|---|---|
| 5′ ITR | 2077 | 141 |
| CAG promoter | 2080 | 1715 |
| CMVie | 2081 | 299 |
| CBA min. | 2082 | 283 |
| VH | 2169 | 435 |
| Linker | 1730 | 45 |
| VL | 1957 | 339 |
| PolyA | 2123 | 477 |
| Filler | 2126 | 1240 |
| 3′ ITR | 2079 | 141 |

[0678] In some embodiments, the AAV particle genome comprises SEQ ID NO: 2320 (TAU_ITR248) which comprises a 5′ inverted terminal repeat (ITR) sequence region and a 3′ ITR sequence region, a CAG promoter comprising a CMVie region and a minimal CBA promoter region, a PHF1 antibody heavy chain variable region, a furin cleavage site, a PHF1 antibody light chain variable region, a rabbit beta globin polyadenylation signal sequence and a human albumin derived filler sequence.

TABLE 67
Sequence Regions in ITR to ITR Sequences

| | TAU_ITR243 | | TAU_ITR242 | | TAU_ITR241 | |
|---|---|---|---|---|---|---|
| | (SEQ ID NO: | | (SEQ ID NO: | | (SEQ ID NO: | |
| | 2315) | | 2314) | | 2313) | |
| | Region | | Region | | Region | |
| Sequence | SEQ | Region | SEQ | Region | SEQ | Region |
| Regions | ID NO | length | ID NO | length | ID NO | length |
| 5′ ITR | 2076 | 130 | 2076 | 130 | 2076 | 130 |
| Promoter | 2084 | 654 | 2085 | 699 | 5086 | 557 |
| Intron | 2240 | 566 | 2240 | 566 | 2240 | 566 |
| VH | 1838 | 1377 | 1838 | 1377 | 1838 | 1377 |
| Linker | 1724 | 12 | 1724 | 12 | 1724 | 12 |
| Linker | 1726 | 54 | 1726 | 54 | 1726 | 54 |
| VL | 1936 | 720 | 1936 | 720 | 1936 | 720 |
| PolyA | 2122 | 127 | 2122 | 127 | 2122 | 127 |
| 3′ ITR | 2078 | 130 | 2078 | 130 | 2078 | 130 |

[0679] In some embodiments, the AAV particle genome comprises SEQ ID NO: 2315 (TAU_ITR243) which comprises a 5′ inverted terminal repeat (ITR) sequence region and a 3′ ITR sequence region, a CBA promoter, a human beta-globin intron region, a PHF1 antibody heavy chain variable region, a furin cleavage site, a T2A linker, an PHF1 antibody light chain variable region, and a rabbit globin polyadenylation sequence.

[0680] In some embodiments, the AAV particle genome comprises SEQ ID NO: 2314 (TAU_ITR242) which comprises a 5′ inverted terminal repeat (ITR) sequence region and a 3′ ITR sequence region, a GFAP promoter, a human beta-globin intron region, a PHF1 antibody heavy chain variable region, a furin cleavage site, a T2A linker, an PHF1 antibody light chain variable region, and a rabbit globin polyadenylation sequence.

[0681] In some embodiments, the AAV particle genome comprises SEQ ID NO: 2313 (TAU_ITR241) which comprises a 5′ inverted terminal repeat (ITR) sequence region and a 3′ ITR sequence region, a synapsin promoter, a human beta-globin intron region, a PHF1 antibody heavy chain variable region, a furin cleavage site, a T2A linker, an PHF1 antibody light chain variable region, and a rabbit globin polyadenylation sequence.

TABLE 68
Sequence Regions in ITR to ITR Sequences

| | TAU_ITR245 | | TAU_ITR246 | | TAU_ITR247 | |
|---|---|---|---|---|---|---|
| | (SEQ ID NO: | | (SEQ ID NO: | | (SEQ ID NO: | |
| | 2317) | | 2318) | | 2319) | |
| | Region | | Region | | Region | |
| Sequence | SEQ | Region | SEQ | Region | SEQ | Region |
| Regions | ID NO | length | ID NO | length | ID NO | length |
| 5′ ITR | 2077 | 141 | 2077 | 141 | 2077 | 141 |
| CBA | 2084 | 654 | 2084 | 654 | 2084 | 654 |
| Promoter | | | | | | |
| Intron | 2256 | 491 | 2257 | 387 | 2258 | 292 |
| VH | 2170 | 408 | 2170 | 408 | 2170 | 408 |
| Linker | 1730 | 45 | 1730 | 45 | 1730 | 45 |
| VL | 1957 | 339 | 1957 | 339 | 1957 | 339 |
| HA Tag | 2118 | 27 | 2118 | 27 | 2118 | 27 |
| PolyA | 2122 | 127 | 2122 | 127 | 2122 | 127 |
| 3′ ITR | 2079 | 141 | 2079 | 141 | 2079 | 141 |

[0682] In some embodiments, the AAV particle genome comprises SEQ ID NO: 2317 (TAU_ITR245) which comprises a 5′ inverted terminal repeat (ITR) sequence region and a 3′ ITR sequence region, a CBA promoter, a human beta-globin intron region, a PHF1 antibody heavy chain variable region, a furin cleavage site, an PHF1 antibody light chain variable region, a HA tag and a rabbit globin polyadenylation sequence.

[0683] In some embodiments, the AAV particle genome comprises SEQ ID NO: 2318 (TAU_ITR246) which comprises a 5′ inverted terminal repeat (ITR) sequence region and a 3′ ITR sequence region, a CBA promoter, a human beta-globin intron region, a PHF1 antibody heavy chain variable region, a furin cleavage site, an PHF1 antibody light chain variable region, a HA tag and a rabbit globin polyadenylation sequence.

[0684] In some embodiments, the AAV particle genome comprises SEQ ID NO: 2319 (TAU_ITR247) which comprises a 5′ inverted terminal repeat (ITR) sequence region and a 3′ ITR sequence region, a CBA promoter, a human beta-globin intron region, a PHF1 antibody heavy chain variable region, a furin cleavage site, an PHF1 antibody light chain variable region, a HA tag and a rabbit globin polyadenylation sequence.

TABLE 69
Sequence Regions in ITR to ITR Sequences

| | |
|---|---|
| Sequence | TAU_ITR249 (SEQ ID NO: 2321) |

| Regions | Region SEQ ID NO | Region length |
|---|---|---|
| 5′ ITR | 2077 | 141 |
| CBA promoter | 2084 | 654 |
| VH | 2169 | 435 |
| Linker | 1730 | 45 |
| VL | 1957 | 339 |
| PolyA | 2123 | 477 |
| Filler | 2126 | 1240 |
| 3′ ITR | 2079 | 141 |

[0685] In some embodiments, the AAV particle genome comprises SEQ ID NO: 2321 (TAU_ITR249) which comprises a 5′ inverted terminal repeat (ITR) sequence region and a 3′ ITR sequence region, a CBA promoter, a PHF1 antibody heavy chain variable region, a furin cleavage site, a PHF1 antibody light chain variable region, a rabbit beta globin polyadenylation signal sequence and a human albumin derived filler sequence.

TABLE 70
Sequence Regions in ITR to ITR Sequences

| | TAU_ITR158 | | TAU_ITR170 | | TAU_ITR171 | | TAU_ITR172 | |
|---|---|---|---|---|---|---|---|---|
| | (SEQ ID NO: | | (SEQ ID NO: | | (SEQ ID NO: | | (SEQ ID NO: | |
| | 2208) | | 2220) | | 2221) | | 2222) | |
| | Region | | Region | | Region | | Region | |
| Sequence | SEQ | Region | SEQ | Region | SEQ | Region | SEQ | Region |
| Regions | ID NO | length | ID NO | length | ID NO | length | ID NO | length |
| 5′ ITR | 2076 | 130 | 2076 | 130 | 2076 | 130 | 2076 | 130 |
| CAG | 2080 | 1715 | 2080 | 1715 | 2080 | 1715 | 2080 | 1715 |
| promoter | | | | | | | | |
| CMVie | 2081 | 299 | 2081 | 299 | 2081 | 299 | 2081 | 299 |
| CBA min. | 2082 | 283 | 2082 | 283 | 2082 | 283 | 2082 | 283 |
| Signal | 1740 | 57 | 1740 | 57 | 1740 | 57 | 1740 | 57 |
| VH | 1859 | 354 | 2241 | 348 | 2241 | 348 | 1859 | 354 |
| Linker | 2247 | 45 | 2247 | 45 | 2247 | 45 | 2247 | 45 |
| VL | 1980 | 321 | 1980 | 321 | 1980 | 321 | 1980 | 321 |
| HA Tag | 2118 | 27 | 2118 | 27 | 2118 | 27 | 2118 | 27 |
| PolyA | 2122 | 127 | 2122 | 127 | 2122 | 127 | 2122 | 127 |
| 3′ ITR | 2078 | 130 | 2078 | 130 | 2078 | 130 | 2078 | 130 |

[0686] In some embodiments, the AAV particle genome comprises SEQ ID NO: 2208 (TAU_ITR158) which comprises a 5′ inverted terminal repeat (ITR) sequence region and a 3′ ITR sequence region, a CAG promoter comprising a CMVie region and a minimal CBA promoter region, a heavy chain signal, a PT3 antibody heavy chain variable region, a (G4S)3 linker, a light chain signal, a PT3 antibody light chain variable region, a HA tag, and a rabbit beta globin polyadenylation signal sequence.

[0687] In some embodiments, the AAV particle genome comprises SEQ ID NO: 2220 (TAU_ITR170) which comprises a 5′ inverted terminal repeat (ITR) sequence region and a 3′ ITR sequence region, a CAG promoter comprising a CMVie region and a minimal CBA promoter region, a heavy chain signal, a PT3 antibody heavy chain variable region, a (G4S)3 linker, a light chain signal, a PT3 antibody light chain variable region, a HA tag, and a rabbit beta globin polyadenylation signal sequence.

[0688] In some embodiments, the AAV particle genome comprises SEQ ID NO: 2221 (TAU_ITR171) which comprises a 5′ inverted terminal repeat (ITR) sequence region and a 3′ ITR sequence region, a CAG promoter comprising a CMVie region and a minimal CBA promoter region, a heavy chain signal, a PT3 antibody heavy chain variable region, a (G4S)3 linker, a light chain signal, a PT3 antibody light chain variable region, a HA tag, and a rabbit beta globin polyadenylation signal sequence.

[0689] In some embodiments, the AAV particle genome comprises SEQ ID NO: 2222 (TAU_ITR172) which comprises a 5′ inverted terminal repeat (ITR) sequence region and a 3′ ITR sequence region, a CAG promoter comprising a CMVie region and a minimal CBA promoter region, a heavy chain signal, a PT3 antibody heavy chain variable region, a (G4S)3 linker, a light chain signal, a PT3 antibody light chain variable region, a HA tag, and a rabbit beta globin polyadenylation signal sequence

TABLE 71
Sequence Regions in ITR to ITR Sequences

| | TAU_ITR173 | | TAU_ITR174 | | TAU_ITR175 | | TAU_ITR179 | |
|---|---|---|---|---|---|---|---|---|
| | (SEQ ID NO: | | (SEQ ID NO: | | (SEQ ID NO: | | (SEQ ID NO: | |
| | 2223) | | 2224) | | 2225) | | 2229) | |
| | Region | | Region | | Region | | Region | |
| Sequence | SEQ | Region | SEQ | Region | SEQ | Region | SEQ | Region |
| Regions | ID NO | length | ID NO | length | ID NO | length | ID NO | length |
| 5′ ITR | 2076 | 130 | 2076 | 130 | 2076 | 130 | 2076 | 130 |
| CAG | 2080 | 1715 | 2080 | 1715 | 2080 | 1715 | 2080 | 1715 |
| promoter | | | | | | | | |
| CMVie | 2081 | 299 | 2081 | 299 | 2081 | 299 | 2081 | 299 |
| CBA min. | 2082 | 283 | 2082 | 283 | 2082 | 283 | 2082 | 283 |
| Signal | 1740 | 57 | 1740 | 57 | 1740 | 57 | 1740 | 57 |
| VH | 1859 | 354 | 1859 | 354 | 1859 | 354 | 1859 | 354 |
| Linker | 2247 | 45 | 2247 | 45 | 2247 | 45 | 2247 | 45 |
| VL | 1980 | 321 | 1980 | 321 | 1980 | 321 | 1980 | 321 |
| HA Tag | 2118 | 27 | 2118 | 27 | 2118 | 27 | 2118 | 27 |
| PolyA | 2122 | 127 | 2122 | 127 | 2122 | 127 | 2122 | 127 |
| 3′ ITR | 2078 | 130 | 2078 | 130 | 2078 | 130 | 2078 | 130 |

[0690] In some embodiments, the AAV particle genome comprises SEQ ID NO: 2223 (TAU_ITR173) which comprises a 5′ inverted terminal repeat (ITR) sequence region and a 3′ ITR sequence region, a CAG promoter comprising a CMVie region and a minimal CBA promoter region, a heavy chain signal, a PT3 antibody heavy chain variable region, a (G4S)3 linker, a light chain signal, a PT3 antibody light chain variable region, a HA tag, and a rabbit beta globin polyadenylation signal sequence.

[0691] In some embodiments, the AAV particle genome comprises SEQ ID NO: 2224 (TAU_ITR174) which comprises a 5′ inverted terminal repeat (ITR) sequence region and a 3′ ITR sequence region, a CAG promoter comprising a CMVie region and a minimal CBA promoter region, a heavy chain signal, a PT3 antibody heavy chain variable region, a (G4S)3 linker, a light chain signal, a PT3 antibody light chain variable region, a HA tag, and a rabbit beta globin polyadenylation signal sequence.

[0692] In some embodiments, the AAV particle genome comprises SEQ ID NO: 2225 (TAU_ITR175) which comprises a 5′ inverted terminal repeat (ITR) sequence region and a 3′ ITR sequence region, a CAG promoter comprising a CMVie region and a minimal CBA promoter region, a heavy chain signal, a PT3 antibody heavy chain variable region, a (G4S)3 linker, a light chain signal, a PT3 antibody light chain variable region, a HA tag, and a rabbit beta globin polyadenylation signal sequence.

[0693] In some embodiments, the AAV particle genome comprises SEQ ID NO: 2229 (TAU_ITR179) which comprises a 5′ inverted terminal repeat (ITR) sequence region and a 3′ ITR sequence region, a CAG promoter comprising a CMVie region and a minimal CBA promoter region, a heavy chain signal, a PT3 antibody heavy chain variable region, a (G4S)3 linker, a light chain signal, a PT3 antibody light chain variable region, a HA tag, and a rabbit beta globin polyadenylation signal sequence.

TABLE 72
Sequence Regions in ITR to ITR Sequences

| | TAU_ITR157 | | TAU_ITR159 | |
|---|---|---|---|---|
| | (SEQ ID NO: 2207) | | (SEQ ID NO: 2209) | |
| Sequence | Region SEQ | Region | Region SEQ | Region |
| Regions | ID NO | length | ID NO | length |
| 5′ ITR | 2076 | 130 | 2076 | 130 |
| CAG promoter | 2080 | 1715 | 2080 | 1715 |
| CMVie | 2081 | 299 | 2081 | 299 |
| CBA min. | 2082 | 283 | 2082 | 283 |
| Signal | 1740 | 57 | 1740 | 57 |
| VH | 1859 | 354 | 1859 | 354 |
| Linker | 2246 | 30 | 2248 | 60 |
| VL | 1980 | 321 | 1980 | 321 |
| HA Tag | 2118 | 27 | 2118 | 27 |
| PolyA | 2122 | 127 | 2122 | 127 |
| 3′ ITR | 2078 | 130 | 2078 | 130 |

[0694] In some embodiments, the AAV particle genome comprises SEQ ID NO: 2207 (TAU_ITR157) which comprises a 5′ inverted terminal repeat (ITR) sequence region and a 3′ ITR sequence region, a CAG promoter comprising a CMVie region and a minimal CBA promoter region, a heavy chain signal, a PT3 antibody heavy chain variable region, a (G4S)2 linker, a light chain signal, a PT3 antibody light chain variable region, a HA tag, and a rabbit beta globin polyadenylation signal sequence.

[0695] In some embodiments, the AAV particle genome comprises SEQ ID NO: 2209 (TAU_ITR159) which comprises a 5′ inverted terminal repeat (ITR) sequence region and a 3′ ITR sequence region, a CAG promoter comprising a CMVie region and a minimal CBA promoter region, a heavy chain signal, a PT3 antibody heavy chain variable region, a (G4S)4 linker, a light chain signal, a PT3 antibody light chain variable region, a HA tag, and a rabbit beta globin polyadenylation signal sequence.

TABLE 73
Sequence Regions in ITR to ITR Sequences

| | TAU_ITR104 | | TAU_ITR181 | |
|---|---|---|---|---|
| | (SEQ ID NO: 2154) | | (SEQ ID NO: 2231) | |
| Sequence | Region SEQ | Region | Region SEQ | Region |
| Regions | ID NO | length | ID NO | length |
| 5′ ITR | 2076 | 130 | 2076 | 130 |
| CAG promoter | 2080 | 1715 | 2080 | 1715 |
| CMVie | 2081 | 299 | 2081 | 299 |
| CBA min. | 2082 | 283 | 2082 | 283 |
| Signal | 1740 | 57 | 1740 | 57 |
| VH | 1859 | 354 | 1859 | 354 |
| Constant | 1742 | 969 | 2243 | 291 |
| Linker | 1725 | 12 | 1725 | 12 |
| Linker | 1727 | 75 | 1727 | 75 |
| Signal | 1861 | 57 | 1861 | 57 |
| VL | 1980 | 321 | 1980 | 321 |
| Constant | 1864 | 321 | 1864 | 321 |
| PolyA | 2122 | 127 | 2122 | 127 |
| 3′ ITR | 2078 | 130 | 2078 | 130 |

[0696] In some embodiments, the AAV particle genome comprises SEQ ID NO: 2154 (TAU_ITR104) which comprises a 5′ inverted terminal repeat (ITR) sequence region and a 3′ ITR sequence region, a CAG promoter comprising a CMVie region and a minimal CBA promoter region, a heavy chain signal, a PT3 antibody heavy chain variable and constant region, a furin cleavage site, a F2A linker, a light chain signal, a PT3 antibody light chain variable and constant region and a rabbit beta globin polyadenylation signal sequence.

[0697] In some embodiments, the AAV particle genome comprises SEQ ID NO: 2231 (TAU_ITR181) which comprises a 5′ inverted terminal repeat (ITR) sequence region and a 3′ ITR sequence region, a CAG promoter comprising a CMVie region and a minimal CBA promoter region, a heavy chain signal, a PT3 antibody heavy chain variable and constant region, a furin cleavage site, a F2A linker, a light chain signal, a PT3 antibody light chain variable and constant region and a rabbit beta globin polyadenylation signal sequence.

TABLE 74
Sequence Regions in ITR to ITR Sequences

| | TAU_ITR112 | | TAU_ITR120 | | TAU_ITR180 | | TAU_ITR182 | |
|---|---|---|---|---|---|---|---|---|
| | (SEQ ID NO: | | (SEQ ID NO: | | (SEQ ID NO: | | (SEQ ID NO: | |
| | 2162) | | 2162) | | 2230) | | 2232) | |
| | Region | | Region | | Region | | Region | |
| Sequence | SEQ | Region | SEQ | Region | SEQ | Region | SEQ | Region |
| Regions | ID NO | length | ID NO | length | ID NO | length | ID NO | length |
| 5′ ITR | 2076 | 130 | 2076 | 130 | 2076 | 130 | 2076 | 130 |
| CAG | 2080 | 1715 | 2080 | 1715 | 2080 | 1715 | 2080 | 1715 |
| promoter | | | | | | | | |
| CMVie | 2081 | 299 | 2081 | 299 | 2081 | 299 | 2081 | 299 |
| CBA min. | 2082 | 283 | 2082 | 283 | 2082 | 283 | 2082 | 283 |
| Signal | 1740 | 57 | 1740 | 57 | 1740 | 57 | 1740 | 57 |
| VH | 1859 | 354 | 1859 | 354 | 1859 | 354 | 1859 | 354 |
| Constant | 1742 | 969 | 1742 | 969 | 2243 | 291 | 2242 | 309 |
| Linker | 1724 | 12 | 1724 | 12 | 1724 | 12 | 1724 | 12 |
| Linker | 1726 | 54 | 1726 | 54 | 1726 | 54 | 1726 | 54 |
| Signal | 1861 | 57 | 1861 | 57 | 1861 | 57 | 1861 | 57 |
| VL | 1980 | 321 | 1980 | 321 | 1980 | 321 | 1980 | 321 |
| Constant | 1864 | 321 | 1864 | 321 | 1864 | 321 | 1864 | 321 |
| PolyA | 2122 | 127 | 2122 | 127 | 2122 | 127 | 2122 | 127 |
| 3′ ITR | 2078 | 130 | 2078 | 130 | 2078 | 130 | 2078 | 130 |

[0698] In some embodiments, the AAV particle genome comprises SEQ ID NO: 2162 (TAU_ITR112) which comprises a 5′ inverted terminal repeat (ITR) sequence region and a 3′ ITR sequence region, a CAG promoter comprising a CMVie region and a minimal CBA promoter region, a heavy chain signal, a PT3 antibody heavy chain variable and constant region, a furin cleavage site, a T2A linker, a light chain signal, a PT3 antibody light chain variable and constant region and a rabbit beta globin polyadenylation signal sequence.

[0699] In some embodiments, the AAV particle genome comprises SEQ ID NO: 2162 (TAU_ITR120) which comprises a 5′ inverted terminal repeat (ITR) sequence region and a 3′ ITR sequence region, a CAG promoter comprising a CMVie region and a minimal CBA promoter region, a heavy chain signal, a PT3 antibody heavy chain variable and constant region, a furin cleavage site, a T2A linker, a light chain signal, a PT3 antibody light chain variable and constant region and a rabbit beta globin polyadenylation signal sequence.

[0700] In some embodiments, the AAV particle genome comprises SEQ ID NO: 2230 (TAU_ITR180) which comprises a 5′ inverted terminal repeat (ITR) sequence region and a 3′ ITR sequence region, a CAG promoter comprising a CMVie region and a minimal CBA promoter region, a heavy chain signal, a PT3 antibody heavy chain variable and constant region, a furin cleavage site, a T2A linker, a light chain signal, a PT3 antibody light chain variable and constant region and a rabbit beta globin polyadenylation signal sequence.

[0701] In some embodiments, the AAV particle genome comprises SEQ ID NO: 2232 (TAU_ITR182) which comprises a 5′ inverted terminal repeat (ITR) sequence region and a 3′ ITR sequence region, a CAG promoter comprising a CMVie region and a minimal CBA promoter region, a heavy chain signal, a PT3 antibody heavy chain variable and constant region, a furin cleavage site, a T2A linker, a light chain signal, a PT3 antibody light chain variable and constant region and a rabbit beta globin polyadenylation signal sequence.

TABLE 75
Sequence Regions in ITR to ITR Sequences

| | TAU_ITR193 | | TAU_ITR190 | |
|---|---|---|---|---|
| | (SEQ ID NO: 2265) | | (SEQ ID NO: 2262) | |
| Sequence | Region SEQ | Region | Region SEQ | Region |
| Regions | ID NO | length | ID NO | length |
| 5′ ITR | 2076 | 130 | 2076 | 130 |
| CAG promoter | 2080 | 1715 | 2080 | 1715 |
| CMVie | 2081 | 299 | 2081 | 299 |
| CBA min. | 2082 | 283 | 2082 | 283 |
| Signal | 1740 | 57 | 1740 | 57 |
| VH | 1859 | 354 | 1859 | 354 |
| Constant | 2242 | 309 | 2242 | 309 |
| Hinge | 1737 | 198 | 1737 | 198 |
| Linker | 1724 | 12 | 1724 | 12 |
| Linker | 1727 | 75 | 1726 | 54 |
| Signal | 1861 | 57 | 1861 | 57 |
| VL | 1980 | 321 | 1980 | 321 |
| Constant | 1864 | 321 | 1864 | 321 |
| PolyA | 2122 | 127 | 2122 | 127 |
| 3′ ITR | 2078 | 130 | 2078 | 130 |

[0702] In some embodiments, the AAV particle genome comprises SEQ ID NO: 2265 (TAU_ITR193) which comprises a 5′ inverted terminal repeat (ITR) sequence region and a 3′ ITR sequence region, a CAG promoter comprising a CMVie region and a minimal CBA promoter region, a heavy chain signal, a PT3 antibody heavy chain variable and constant region, a hinge region, a furin cleavage site, a F2A linker, a light chain signal, a PT3 antibody light chain variable and constant region and a rabbit beta globin polyadenylation signal sequence.

[0703] In some embodiments, the AAV particle genome comprises SEQ ID NO: 2262 (TAU_ITR190) which comprises a 5′ inverted terminal repeat (ITR) sequence region and a 3′ ITR sequence region, a CAG promoter comprising a CMVie region and a minimal CBA promoter region, a heavy chain signal, a PT3 antibody heavy chain variable and constant region, a hinge region, a furin cleavage site, a T2A linker, a light chain signal, a PT3 antibody light chain variable and constant region and a rabbit beta globin polyadenylation signal sequence.

TABLE 76
Sequence Regions in ITR to ITR Sequences

| | |
|---|---|
| Sequence | TAU_ITR156 (SEQ ID NO: 2206) |

| Regions | Region SEQ ID NO | Region length |
|---|---|---|
| 5′ ITR | 2076 | 130 |
| CAG promoter | 2080 | 1715 |
| CMVie | 2081 | 299 |
| CBA min. | 2082 | 283 |
| Signal | 1861 | 57 |
| VH | 1859 | 354 |
| Linker | 2247 | 45 |
| VL | 1980 | 321 |
| HA Tag | 2118 | 27 |
| PolyA | 2122 | 127 |
| 3′ ITR | 2078 | 130 |

[0704] In some embodiments, the AAV particle genome comprises SEQ ID NO: 2206 (TAU_ITR156) which comprises a 5′ inverted terminal repeat (ITR) sequence region and a 3′ ITR sequence region, a CAG promoter comprising a CMVie region and a minimal CBA promoter region, a light chain signal, a PT3 antibody heavy chain variable region, a (G4S)3 linker, a PT3 antibody light chain variable region, a HA tag and a rabbit beta globin polyadenylation signal sequence.

TABLE 77
Sequence Regions in ITR to ITR Sequences

| | |
|---|---|
| Sequence | TAU_ITR160 (SEQ ID NO: 2210) |

| Regions | Region SEQ ID NO | Region length |
|---|---|---|
| 5′ ITR | 2076 | 130 |
| CAG promoter | 2080 | 1715 |
| CMVie | 2081 | 299 |
| CBA min. | 2082 | 283 |
| Signal | 1740 | 57 |
| VL | 1980 | 321 |
| Linker | 2247 | 45 |
| VH | 1859 | 354 |
| HA Tag | 2118 | 27 |
| PolyA | 2122 | 127 |
| 3′ ITR | 2078 | 130 |

[0705] In some embodiments, the AAV particle genome comprises SEQ ID NO: 2210 (TAU_ITR160) which comprises a 5′ inverted terminal repeat (ITR) sequence region and a 3′ ITR sequence region, a CAG promoter comprising a CMVie region and a minimal CBA promoter region, a heavy chain signal, a PT3 antibody light chain variable region, a (G4S)3 linker, a PT3 antibody heavy chain variable region, a HA tag and a rabbit beta globin polyadenylation signal sequence.

TABLE 78
Sequence Regions in ITR to ITR Sequences

| | TAU_ITR161 | | TAU_ITR162 | | TAU_ITR196 | | TAU_ITR163 | |
|---|---|---|---|---|---|---|---|---|
| | (SEQ ID NO: | | (SEQ ID NO: | | (SEQ ID NO: | | (SEQ ID NO: | |
| | 2211) | | 2212) | | 2268) | | 2213) | |
| | Region | | Region | | Region | | Region | |
| Sequence | SEQ | Region | SEQ | Region | SEQ | Region | SEQ | Region |
| Regions | ID NO | length | ID NO | length | ID NO | length | ID NO | length |
| 5′ ITR | 2076 | 130 | 2076 | 130 | 2076 | 130 | 2076 | 130 |
| CAG | 2080 | 1715 | 2080 | 1715 | 2080 | 1715 | 2080 | 1715 |
| promoter | | | | | | | | |
| CMVie | 2081 | 299 | 2081 | 299 | 2081 | 299 | 2081 | 299 |
| CBA min. | 2082 | 283 | 2082 | 283 | 2082 | 283 | 2082 | 283 |
| Signal | 1861 | 57 | 1861 | 57 | 1861 | 57 | 1861 | 57 |
| VL | 1980 | 321 | 1980 | 321 | 1980 | 321 | 1980 | 321 |
| Linker | 2246 | 30 | 2247 | 45 | 2247 | 45 | 2248 | 60 |
| VH | 1859 | 354 | 1859 | 354 | 1859 | 354 | 1859 | 354 |
| HA Tag | 2118 | 27 | 2118 | 27 | 2255 | 18 | 2118 | 27 |
| PolyA | 2122 | 127 | 2122 | 127 | 2122 | 127 | 2122 | 127 |
| 3′ ITR | 2078 | 130 | 2078 | 130 | 2078 | 130 | 2078 | 130 |

[0706] In some embodiments, the AAV particle genome comprises SEQ ID NO: 2211 (TAU_ITR161) which comprises a 5′ inverted terminal repeat (ITR) sequence region and a 3′ ITR sequence region, a CAG promoter comprising a CMVie region and a minimal CBA promoter region, a light chain signal, a PT3 antibody light chain variable region, a (G4S)2 linker, a PT3 antibody heavy chain variable region, a HA tag and a rabbit beta globin polyadenylation signal sequence.

[0707] In some embodiments, the AAV particle genome comprises SEQ ID NO: 2212 (TAU_ITR162) which comprises a 5′ inverted terminal repeat (ITR) sequence region and a 3′ ITR sequence region, a CAG promoter comprising a CMVie region and a minimal CBA promoter region, a light chain signal, a PT3 antibody light chain variable region, a (G4S)3 linker, a PT3 antibody heavy chain variable region, a HA tag and a rabbit beta globin polyadenylation signal sequence.

[0708] In some embodiments, the AAV particle genome comprises SEQ ID NO: 2268 (TAU_ITR196) which comprises a 5′ inverted terminal repeat (ITR) sequence region and a 3′ ITR sequence region, a CAG promoter comprising a CMVie region and a minimal CBA promoter region, a light chain signal, a PT3 antibody light chain variable region, a (G4S)3 linker, a PT3 antibody heavy chain variable region, a HA tag and a rabbit beta globin polyadenylation signal sequence.

[0709] In some embodiments, the AAV particle genome comprises SEQ ID NO: 2213 (TAU_ITR163) which comprises a 5′ inverted terminal repeat (ITR) sequence region and a 3′ ITR sequence region, a CAG promoter comprising a CMVie region and a minimal CBA promoter region, a light chain signal, a PT3 antibody light chain variable region, a (G4S)4 linker, a PT3 antibody heavy chain variable region, a HA tag and a rabbit beta globin polyadenylation signal sequence.

TABLE 79
Sequence Regions in ITR to ITR Sequences

| | TAU_ITR108 | | TAU_ITR184 | | TAU_ITR116 | | TAU_ITR183 | | TAU_ITR185 | |
|---|---|---|---|---|---|---|---|---|---|---|
| | (SEQ ID NO: | | (SEQ ID NO: | | (SEQ ID NO: | | (SEQ ID NO: | | (SEQ ID NO: | |
| | 2158) | | 2234) | | 2166) | | 2233) | | 2235) | |
| | Region | | Region | | Region | | Region | | Region | |
| Sequence | SEQ | Region | SEQ | Region | SEQ | Region | SEQ | Region | SEQ | Region |
| Regions | ID NO | length | ID NO | length | ID NO | length | ID NO | length | ID NO | length |
| 5′ ITR | 2076 | 130 | 2676 | 130 | 2076 | 130 | 2076 | 130 | 2076 | 130 |
| CAG | 2080 | 1715 | 2080 | 1715 | 2080 | 1715 | 2080 | 1715 | 2080 | 1715 |
| promoter | | | | | | | | | | |
| CMVie | 2081 | 299 | 2081 | 299 | 2081 | 299 | 2081 | 299 | 2081 | 299 |
| CBA min. | 2082 | 283 | 2082 | 283 | 2082 | 283 | 2082 | 283 | 2082 | 283 |
| Signal | 1861 | 57 | 1861 | 57 | 1861 | 57 | 1861 | 57 | 1861 | 57 |
| VL | 1980 | 321 | 1980 | 321 | 1980 | 321 | 1980 | 321 | 1980 | 321 |
| Constant | 1864 | 321 | 1864 | 321 | 1864 | 321 | 1864 | 321 | 1864 | 321 |
| Linker | 1727 | 75 | 1727 | 75 | 1726 | 54 | 1726 | 54 | 1726 | 54 |
| Signal | 1740 | 57 | 1740 | 57 | 2241 | 57 | 1740 | 57 | 1740 | 57 |
| VH | 1859 | 354 | 1859 | 354 | 1859 | 354 | 1859 | 354 | 1859 | 354 |
| Constant | 1742 | 969 | 2243 | 291 | 1742 | 969 | 2243 | 291 | 2242 | 309 |
| Poly A | 2122 | 127 | 2122 | 127 | 2122 | 127 | 2122 | 127 | 2122 | 127 |
| 3′ ITR | 2078 | 130 | 2078 | 130 | 2078 | 130 | 2078 | 130 | 2078 | 130 |

[0710] In some embodiments, the AAV particle genome comprises SEQ ID NO: 2158 (TAU_ITR108) which comprises a 5′ inverted terminal repeat (ITR) sequence region and a 3′ ITR sequence region, a CAG promoter comprising a CMVie region and a minimal CBA promoter region, a light chain signal, a PT3 antibody light chain variable and constant region, a F2A linker, a heavy chain signal, a PT3 antibody heavy chain variable and constant region and a rabbit beta globin polyadenylation signal sequence.

[0711] In some embodiments, the AAV particle genome comprises SEQ ID NO: 2234 (TAU_ITR184) which comprises a 5′ inverted terminal repeat (ITR) sequence region and a 3′ ITR sequence region, a CAG promoter comprising a CMVie region and a minimal CBA promoter region, a light chain signal, a PT3 antibody light chain variable and constant region, a F2A linker, a heavy chain signal, a PT3 antibody heavy chain variable and constant region and a rabbit beta globin polyadenylation signal sequence.

[0712] In some embodiments, the AAV particle genome comprises SEQ ID NO: 2166 (TAU_ITR116) which comprises a 5′ inverted terminal repeat (ITR) sequence region and a 3′ ITR sequence region, a CAG promoter comprising a CMVie region and a minimal CBA promoter region, a light chain signal, a PT3 antibody light chain variable and constant region, a T2A linker, a heavy chain signal, a PT3 antibody heavy chain variable and constant region and a rabbit beta globin polyadenylation signal sequence.

[0713] In some embodiments, the AAV particle genome comprises SEQ ID NO: 2233 (TAU_ITR183) which comprises a 5′ inverted terminal repeat (ITR) sequence region and a 3′ ITR sequence region, a CAG promoter comprising a CMVie region and a minimal CBA promoter region, a light chain signal, a PT3 antibody light chain variable and constant region, a T2A linker, a heavy chain signal, a PT3 antibody heavy chain variable and constant region and a rabbit beta globin polyadenylation signal sequence.

[0714] In some embodiments, the AAV particle genome comprises SEQ ID NO: 2235 (TAU_ITR185) which comprises a 5′ inverted terminal repeat (ITR) sequence region and a 3′ ITR sequence region, a CAG promoter comprising a CMVie region and a minimal CBA promoter region, a light chain signal, a PT3 antibody light chain variable and constant region, a T2A linker, a heavy chain signal, a PT3 antibody heavy chain variable and constant region and a rabbit beta globin polyadenylation signal sequence.

TABLE 80
Sequence Regions in ITR to ITR Sequences

| | TAU_ITR186 | | TAU_ITR187 | |
|---|---|---|---|---|
| | (SEQ ID NO: 2236) | | (SEQ ID NO: 2237) | |
| Sequence | Region SEQ | Region | Region SEQ | Region |
| Regions | ID NO | length | ID NO | length |
| 5′ ITR | 2076 | 130 | 2076 | 130 |
| CAG promoter | 2080 | 1715 | 2080 | 1715 |
| CMVie | 2081 | 299 | 2081 | 299 |
| CBA min. | 2082 | 283 | 2082 | 283 |
| Signal | 1861 | 57 | 1861 | 57 |
| VL | 1980 | 321 | 1980 | 321 |
| Constant | 1864 | 321 | 1864 | 321 |
| Linker | 1724 | 12 | 1724 | 12 |
| Linker | 1726 | 54 | 1726 | 54 |
| Signal | 1740 | 57 | 1740 | 57 |
| VH | 1859 | 354 | 1859 | 354 |
| Constant | 2243 | 291 | 2242 | 309 |
| PolyA | 2122 | 127 | 2122 | 127 |
| 3′ ITR | 2078 | 130 | 2078 | 130 |

[0715] In some embodiments, the AAV particle genome comprises SEQ ID NO: 2236 (TAU_ITR186) which comprises a 5′ inverted terminal repeat (ITR) sequence region and a 3′ ITR sequence region, a CAG promoter comprising a CMVie region and a minimal CBA promoter region, a light chain signal, a PT3 antibody light chain variable and constant region, a furin cleavage site, a T2A linker, a heavy chain signal, a PT3 antibody heavy chain variable and constant region and a rabbit beta globin polyadenylation signal sequence.

[0716] In some embodiments, the AAV particle genome comprises SEQ ID NO: 2237 (TAU_ITR187) which comprises a 5′ inverted terminal repeat (ITR) sequence region and a 3′ ITR sequence region, a CAG promoter comprising a CMVie region and a minimal CBA promoter region, a light chain signal, a PT3 antibody light chain variable and constant region, a furin cleavage site, a T2A linker, a heavy chain signal, a PT3 antibody heavy chain variable and constant region and a rabbit beta globin polyadenylation signal sequence.

TABLE 81
Sequence Regions in ITR to ITR Sequences

| | TAU_ITR176 | | TAU_ITR177 | | TAU_ITR178 | |
|---|---|---|---|---|---|---|
| | (SEQ ID NO: | | (SEQ ID NO: | | (SEQ ID NO: | |
| | 2226) | | 2227) | | 2228) | |
| | Region | | Region | | Region | |
| Sequence | SEQ | Region | SEQ | Region | SEQ | Region |
| Regions | ID NO | length | ID NO | length | ID NO | length |
| 5′ ITR | 2076 | 130 | 2076 | 130 | 2076 | 130 |
| CAG | 2080 | 1715 | 2080 | 1715 | 2080 | 1715 |
| promoter | | | | | | |
| CMVie | 2081 | 299 | 2081 | 299 | 2081 | 299 |
| CBA mm. | 2082 | 283 | 2082 | 283 | 2082 | 283 |
| VH | 1859 | 354 | 1859 | 354 | 1859 | 354 |
| Linker | 2247 | 45 | 2247 | 45 | 2247 | 45 |
| VL | 1980 | 321 | 1980 | 321 | 1980 | 321 |
| HA Tag | 2118 | 37 | 2118 | 27 | 2118 | 27 |
| Poly A | 2122 | 127 | 2122 | 127 | 2122 | 127 |
| 3′ ITR | 2078 | 130 | 2078 | 130 | 2078 | 130 |

[0717] In some embodiments, the AAV particle genome comprises SEQ ID NO: 2226 (TAU_ITR176) which comprises a 5′ inverted terminal repeat (ITR) sequence region and a 3′ ITR sequence region, a CAG promoter comprising a CMVie region and a minimal CBA promoter region, a PT3 antibody heavy chain variable region, a (G4S)3 linker, a PT3 antibody light chain variable region a HA tag and a rabbit beta globin polyadenylation signal sequence.

[0718] In some embodiments, the AAV particle genome comprises SEQ ID NO: 2227 (TAU_ITR177) which comprises a 5 inverted terminal repeat (ITR) sequence region and a 3′ ITR sequence region, a CAG promoter comprising a CMVie region and a minimal CBA promoter region, a PT3 antibody heavy chain variable region, a (G4S)3 linker, a PT3 antibody light chain variable region, a HA tag and a rabbit beta globin polyadenylation signal sequence.

[0719] In some embodiments, the AAV particle genome comprises SEQ ID NO: 2228 (TAU_ITR178) which comprises a 5′ inverted terminal repeat (ITR) sequence region and a 3′ ITR sequence region, a CAG promoter comprising a CMVie region and a minimal CBA promoter region, a PT3 antibody heavy chain variable region, a (G4S)3 linker, a PT3 antibody light chain variable region, a HA tag and a rabbit beta globin polyadenylation signal sequence.

TABLE 82
Sequence Regions in ITR to ITR Sequences

| | TAU_ITR105 | | TAU_ITR113 | | TAU_ITR189 | |
|---|---|---|---|---|---|---|
| | (SEQ ID NO: | | (SEQ ID NO: | | (SEQ ID NO: | |
| | 2155) | | 2163) | | 2261) | |
| | Region | | Region | | Region | |
| Sequence | SEQ | Region | SEQ ID | Region | SEQ ID | Region |
| Regions | ID NO | length | NO | length | NO | length |
| 5′ ITR | 2076 | 130 | 2076 | 130 | 2076 | 130 |
| GFAP | 2085 | 699 | 2085 | 699 | 2085 | 699 |
| Promoter | | | | | | |
| Intron | 2240 | 566 | 2240 | 566 | 2240 | 566 |
| Signal | 1740 | 57 | 1740 | 57 | 1740 | 57 |
| VH | 1859 | 354 | 1859 | 354 | 1859 | 354 |
| Constant | 1742 | 969 | 1742 | 969 | 2243 | 291 |
| Linker | 1725 | 12 | 1724 | 12 | 1724 | 12 |
| Linker | 1727 | 75 | 1726 | 54 | 1726 | 54 |
| Signal | 1980 | 321 | 1980 | 321 | 1980 | 321 |
| VL | 1864 | 321 | 1864 | 321 | 1864 | 321 |
| Poly A | 2122 | 127 | 2122 | 127 | 2122 | 127 |
| 3′ ITR | 2078 | 130 | 2078 | 130 | 2078 | 130 |

[0720] In some embodiments, the AAV particle genome comprises SEQ ID NO: 2155 (TAU_ITR105) which comprises a 5′ inverted terminal repeat (ITR) sequence region and a 3′ ITR sequence region, a GFAP promoter, a human beta-globin intron region, a heavy chain signal, a PT3 antibody heavy chain variable and constant region, a furin cleavage site, a F2A linker, a light chain signal, a PT3 antibody light chain variable and constant region and a rabbit beta globin polyadenylation signal sequence.

[0721] In some embodiments, the AAV particle genome comprises SEQ ID NO: 2163 (TAU_ITR113) which comprises a 5′ inverted terminal repeat (ITR) sequence region and a 3′ ITR sequence region, a GFAP promoter, a human beta-globin intron region, a heavy chain signal, a PT3 antibody heavy chain variable and constant region, a furin cleavage site, a T2A linker, a light chain signal, a PT3 antibody light chain variable and constant region and a rabbit beta globin polyadenylation signal sequence.

[0722] In some embodiments, the AAV particle genome comprises SEQ ID NO: 2261 (TAU_ITR189) which comprises a 5′ inverted terminal repeat (ITR) sequence region and a 3′ ITR sequence region, a GFAP promoter, a human beta-globin intron region, a heavy chain signal, a PT3 antibody heavy chain variable and constant region, a furin cleavage site, a T2A linker, a light chain signal, a PT3 antibody light chain variable and constant region and a rabbit beta globin polyadenylation signal sequence.

TABLE 83
Sequence Regions in ITR to ITR Sequences

| | TAU_ITR195 | | TAU_ITR192 | |
|---|---|---|---|---|
| | (SEQ ID NO: 2267) | | (SEQ ID NO: 2264) | |
| Sequence | Region SEQ | Region | Region SEQ | Region |
| Regions | ID NO | length | ID NO | length |
| 5′ ITR | 2076 | 130 | 2076 | 130 |
| GFAP Promoter | 2085 | 699 | 2085 | 699 |
| Intron | 2240 | 566 | 2240 | 566 |
| Signal | 1740 | 57 | 1740 | 57 |
| VH | 1859 | 354 | 1859 | 354 |
| Constant | 2242 | 309 | 2242 | 309 |
| Hinge | 1737 | 198 | 1737 | 198 |
| Linker | 1725 | 12 | 1724 | 12 |
| Linker | 1727 | 75 | 1726 | 54 |
| Signal | 1861 | 57 | 1861 | 57 |
| VL | 1864 | 321 | 1864 | 321 |
| PolyA | 2122 | 127 | 2122 | 127 |
| 3′ ITR | 2078 | 130 | 2078 | 130 |

[0723] In some embodiments, the AAV particle genome comprises SEQ ID NO: 2267 (TAU_ITR195) which comprises a 5′ inverted terminal repeat (ITR) sequence region and a 3′ ITR sequence region, a GFAP promoter, a human beta-globin intron region, a heavy chain signal, a PT3 antibody heavy chain variable and constant region, a hinge region, a furin cleavage site, a F2A linker, a light chain signal, a PT3 antibody light chain variable and constant region and a rabbit beta globin polyadenylation signal sequence.

[0724] In some embodiments, the AAV particle genome comprises SEQ ID NO: 2264 (TAU_ITR192) which comprises a 5′ inverted terminal repeat (ITR) sequence region and a 3′ ITR sequence region, a GFAP promoter, a human beta-globin intron region, a heavy chain signal, a PT3 antibody heavy chain variable and constant region, a hinge region, a furin cleavage site, a T2A linker, a light chain signal, a PT3 antibody light chain variable and constant region and a rabbit beta globin polyadenylation signal sequence.

TABLE 84
Sequence Regions in ITR to ITR Sequences

| | TAU_ITR164 | | TAU_ITR165 | | TAU_ITR166 | |
|---|---|---|---|---|---|---|
| | (SEQ ID NO: | | (SEQ ID NO: | | (SEQ ID NO: | |
| | 2214) | | 2215) | | 2216) | |
| | Region | | Region | | Region | |
| Sequence | SEQ | Region | SEQ | Region | SEQ | Region |
| Regions | ID NO | length | ID NO | length | ID NO | length |
| 5′ ITR | 2076 | 130 | 2076 | 130 | 2076 | 130 |
| GFAP | 2085 | 699 | 2085 | 699 | 2085 | 699 |
| Promoter | | | | | | |
| Intron | 2240 | 566 | 2240 | 566 | 2240 | 566 |
| Signal | 1861 | 57 | 1861 | 57 | 1861 | 57 |
| VL | 1980 | 321 | 1980 | 321 | 1980 | 321 |
| Linker | 2246 | 30 | 2247 | 45 | 2248 | 60 |
| VH | 1859 | 354 | 1859 | 354 | 1859 | 354 |
| HA Tag | 2118 | 27 | 2118 | 27 | 2118 | 27 |
| Poly A | 2122 | 127 | 2122 | 127 | 2122 | 127 |
| 3′ ITR | 2078 | 130 | 2078 | 130 | 2078 | 130 |

[0725] In some embodiments, the AAV particle genome comprises SEQ ID NO: 2214 (TAU_ITR164) which comprises a 5′ inverted terminal repeat (ITR) sequence region and a 3′ ITR sequence region, a GFAP promoter, a human beta-globin intron region, a light chain signal, a PT3 antibody light chain variable region, a (G4S)2 linker, a PT3 antibody heavy chain variable region, a HA tag and a rabbit beta globin polyadenylation signal sequence.

[0726] In some embodiments, the AAV particle genome comprises SEQ ID NO: 2215 (TAU_ITR165) which comprises a 5′ inverted terminal repeat (ITR) sequence region and a 3′ ITR sequence region, a GFAP promoter, a human beta-globin intron region, a light chain signal, a PT3 antibody light chain variable region, a (G4S)3 linker, a PT3 antibody heavy chain variable region, a HA tag and a rabbit beta globin polyadenylation signal sequence.

[0727] In some embodiments, the AAV particle genome comprises SEQ ID NO: 2216 (TAU_ITR166) which comprises a 5′ inverted terminal repeat (ITR) sequence region and a 3′ ITR sequence region a GFAP promoter, a human beta-globin intron region, a light c a 9 signal, a PT3 antibody light chain variable region, a (G4S)4 linker, a PT3 antibody heavy chain variable region, a HA tag and a rabbit beta globin polyadenylation signal sequence.

TABLE 85
Sequence Regions in ITR to ITR Sequences

| | TAU_ITR109 | | TAU_ITR117 | |
|---|---|---|---|---|
| | (SEQ ID NO: 2159) | | (SEQ ID NO: 2167) | |
| Sequence | Region SEQ | Region | Region SEQ | Region |
| Regions | ID NO | length | ID NO | length |
| 5′ ITR | 2076 | 130 | 2076 | 130 |
| GFAP Promoter | 2085 | 699 | 2085 | 699 |
| Intron | 2240 | 566 | 2240 | 566 |
| Signal | 1861 | 57 | 1861 | 57 |
| VL | 1980 | 321 | 1980 | 321 |
| Constant | 1864 | 321 | 1864 | 321 |
| Linker | 1727 | 75 | 1826 | 54 |
| Signal | 1740 | 57 | 2241 | 57 |
| VH | 1859 | 354 | 1859 | 354 |
| Constant | 1742 | 969 | 1742 | 969 |
| PolyA | 2122 | 127 | 2122 | 127 |
| 3′ ITR | 2078 | 130 | 2078 | 130 |

[0728] In some embodiments, the AAV particle genome comprises SEQ ID NO: 2159 (TAU_ITR9) which comprises a 5′ inverted terminal repeat (ITR) sequence region and a 3′ ITR sequence region, a GFAP promoter, a human beta-globin intron region, a light chain signal, a 3 antibody light chain variable and constant region, a F2A linker, a heavy chain signal, a PT3 antibody heavy chain variable and constant region and a rabbit beta globin polyadenylation signal sequence.

[0729] In some embodiments, the AAV particle genome comprises SEQ ID NO: 2167 (TAU_ITR117) which comprises a 5 inverted terminal repeat (FR) sequence region and a 3′ ITR sequence region, a GFAP promoter, a human beta-globin intron region, a light chain signal, a PT3 antibody light chain variable and constant region, a T2A linker, a heavy chain signal, a PT3 antibody heavy chain variable and constant region and a rabbit beta globin polyadenylation signal sequence.

TABLE 86
Sequence Regions in ITR to ITR Sequences

| | TAU_ITR106 | | TAU_ITR114 | | TAU_ITR188 | |
|---|---|---|---|---|---|---|
| | (SEQ ID NO: | | (SEQ ID NO: | | (SEQ ID NO: | |
| | 2156) | | 2164) | | 2260) | |
| | Region | | Region | | Region | |
| Sequence | SEQ | Region | SEQ | Region | SEQ | Region |
| Regions | ID NO | length | ID NO | length | ID NO | length |
| 5′ ITR | 2076 | 130 | 2076 | 130 | 2076 | 130 |
| SYN | 2086 | 557 | 2086 | 557 | 2086 | 557 |
| Promoter | | | | | | |
| Intron | 2240 | 566 | 2240 | 566 | 2240 | 566 |
| Signal | 1740 | 57 | 1740 | 57 | 1740 | 57 |
| VH | 1859 | 354 | 1859 | 354 | 1859 | 354 |
| Constant | 1742 | 969 | 1742 | 969 | 2243 | 291 |
| Linker | 1725 | 12 | 1724 | 12 | 1724 | 12 |
| Linker | 1727 | 75 | 1726 | 54 | 1726 | 54 |
| Signal | 1861 | 57 | 1861 | 57 | 1861 | 57 |
| VL | 1980 | 321 | 1980 | 231 | 1980 | 231 |
| Constant | 1864 | 321 | 1864 | 321 | 1864 | 321 |
| Poly A | 2122 | 127 | 2122 | 127 | 2122 | 127 |
| 3′ ITR | 2078 | 130 | 2078 | 130 | 2078 | 130 |

[0730] In some embodiments, the AAV particle genome comprises SEQ ID NO: 2156 (TAU_ITR106) which comprises a 5′ inverted terminal repeat (ITR) sequence region and a 3′ ITR sequence region, a synapsin promoter, a human beta-globin intron region, a heavy chain signal, a PT3 antibody heavy chain variable and constant region, a furin cleavage site, a F2A linker, a light chain signal, a PT3 antibody light chain variable and constant region and a rabbit beta globin polyadenylation signal sequence.

[0731] In some embodiments, the AAV particle genome comprises SEQ ID NO: 2164 (TAU_ITR114) which comprises a 5′ inverted terminal repeat (ITR) sequence region and a 3′ ITR sequence region, a synapsin promoter, a human beta-globin intron region, a heavy chain signal, a PT3 antibody heavy chain variable and constant region, a furin cleavage site, a F2A linker, a light chain signal, a PT3 antibody light chain variable and constant region and a rabbit beta globin polyadenylation signal sequence.

[0732] In some embodiments, the AAV particle genome comprises SEQ ID NO: 2260 (TAU_ITR188) which comprises a 5′ inverted terminal repeat (ITR) sequence region and a 3′ ITR sequence region, a synapsin promoter, a human beta-globin intron region, a heavy chain signal, a PT3 antibody heavy chain variable and constant region, a furin cleavage site, a F2A linker, a light chain signal, a PT3 antibody light chain variable and constant region and a rabbit beta globin polyadenylation signal sequence.

TABLE 87
Sequence Regions in ITR to ITR Sequences

| | TAU_ITR194 | | TAU_ITR191 | |
|---|---|---|---|---|
| | (SEQ ID NO: 2266) | | (SEQ ID NO: 2263) | |
| Sequence | Region SEQ | Region | Region SEQ | Region |
| Regions | ID NO | length | ID NO | length |
| 5′ ITR | 2076 | 130 | 2076 | 130 |
| SYN Promoter | 2086 | 557 | 2086 | 557 |
| Intron | 2240 | 566 | 2240 | 566 |
| Signal | 1740 | 57 | 1740 | 57 |
| VH | 1859 | 354 | 1859 | 354 |
| Constant | 2242 | 309 | 2242 | 309 |
| Hinge | 1737 | 198 | 1737 | 198 |
| Linker | 1724 | 12 | 1724 | 12 |
| Linker | 1727 | 75 | 1726 | 54 |
| Signal | 1861 | 54 | 1861 | 57 |
| VL | 1980 | 321 | 1980 | 321 |
| Constant | 1864 | 321 | 1864 | 321 |
| PolyA | 2122 | 127 | 2122 | 127 |
| 3′ ITR | 2078 | 130 | 2078 | 130 |

[0733] In some embodiments, the AAV particle genome comprises SEQ ID NO: 2266 (TAU_ITR194) which comprises a 5′ inverted terminal repeat (ITR) sequence region and a 3′ ITR sequence region, a synapsin promoter, a human beta-globin intron region, a heavy chain signal, a PT3 antibody heavy chain variable and constant region, a hinge region, a furin cleavage site, a F2A linker, a light chain signal, a PT3 antibody light chain variable and constant region and a rabbit beta globin polyadenylation signal sequence.

[0734] In some embodiments, the AAV particle genome comprises SEQ ID NO: 2263 (TAU_ITR191) which comprises a 5′ inverted terminal repeat (ITR) sequence region and a 3′ ITR sequence region, a synapsin promoter, a human beta-globin intron region, a heavy chain signal, a PT3 antibody heavy chain variable and constant region, a hinge region, a furin cleavage site, a T2A linker, a light chain signal, a PT3 antibody light chain variable and constant region and a rabbit beta globin polyadenylation signal sequence.

TABLE 88
Sequence Regions in ITR to ITR Sequences

| | TAU_ITR167 | | TAU_ITR168 | | TAU_ITR169 | |
|---|---|---|---|---|---|---|
| | (SEQ ID NO: | | (SEQ ID NO: | | (SEQ ID NO: | |
| | 2217) | | 2218) | | 2219) | |
| | Region | | Region | | Region | |
| Sequence | SEQ | Region | SEQ | Region | SEQ | Region |
| Regions | ID NO | length | ID NO | length | ID NO | length |
| 5′ ITR | 2076 | 130 | 2076 | 130 | 2076 | 130 |
| SYN | 2086 | 557 | 2086 | 557 | 2086 | 557 |
| Promoter | | | | | | |
| Intron | 2240 | 566 | 2240 | 566 | 2240 | 566 |
| Signal | 1861 | 57 | 1861 | 57 | 1861 | 57 |
| VL | 1980 | 321 | 1980 | 321 | 1980 | 321 |
| Linker | 2246 | 30 | 2247 | 45 | 2248 | 60 |
| VH | 1859 | 354 | 1859 | 354 | 1859 | 354 |
| HA Tag | 2118 | 27 | 2118 | 27 | 2118 | 27 |
| Poly A | 2122 | 127 | 212.2 | 127 | 2122 | 127 |
| 3′ ITR | 2078 | 130 | 2078 | 130 | 2078 | 130 |

[0735] In some embodiments, the AAV particle genome comprises SEQ ID NO: 2217 (TAU_ITR167) which comprises a 5′ inverted terminal repeat (ITR) sequence region and a 3′ ITR sequence region, a synapsin promoter, a human beta-globin intron region, a light chain signal, a PT3 antibody light chain variable region, a (G4S)2 linker, a PT3 antibody heavy chain variable region, a HA tag and a rabbit beta globin polyadenylation signal sequence.

[0736] In some embodiments, the AAV particle genome comprises SEQ ID NO: 2218 (TAU_ITR168) which comprises a 5′ inverted terminal repeat (ITR) sequence region and a 3′ ITR sequence region, a synapsin promoter, a human beta-globin intron region, a light chain signal, a PT3 antibody light chain variable region, a (G4S)3 linker, a PT3 antibody heavy chain variable region, a HA tag and a rabbit beta globin polyadenylation signal sequence.

[0737] In some embodiments, tbc AAV particle genome comprises SEQ ID NO: 2219 (TAU_ITR169) which comprises a 5′ inverted terminal repeat (ITR) sequence region and a 3′ ITR sequence region, a synapsin promoter, a human beta-globin intron region, a light chain signal, a PT3 antibody light chain variable region, a (G4S)4 linker, a PT3 antibody heavy chain variable region, a HA tag and a rabbit beta globin polyadenylation signal sequence.

TABLE 89
Sequence Regions in ITR to ITR Sequences

| | TAU_ITR110 | | TAU_ITR118 | |
|---|---|---|---|---|
| | (SEQ ID NO: 2160) | | (SEQ ID NO: 2168) | |
| Sequence | Region SEQ | Region | Region SEQ | Region |
| Regions | ID NO | length | ID NO | length |
| 5′ ITR | 2076 | 130 | 2076 | 130 |
| SYN Promoter | 2086 | 557 | 2086 | 557 |
| Intron | 2240 | 566 | 2240 | 566 |
| Signal | 1861 | 57 | 1861 | 57 |
| VL | 1980 | 321 | 1980 | 321 |
| Constant | 1864 | 321 | 1864 | 321 |
| Linker | 1727 | 75 | 1726 | 54 |
| Signal | 1740 | 57 | 2241 | 57 |
| VH | 1859 | 354 | 1859 | 354 |
| Constant | 1742 | 969 | 1742 | 969 |
| PolyA | 2122 | 127 | 2122 | 127 |
| 3′ ITR | 2078 | 130 | 2078 | 130 |

[0738] In some embodiments, the AAV particle genome comprises SEQ ID NO: 2160 (TAU_ITR110) which comprises a 5′ inverted terminal repeat (ITR) sequence region and a 3′ ITR sequence region, a synapsin promoter, a human beta-globin intron region, a light chain signal, a PT3 antibody light chain variable region, a F2A linker, a heavy chain signal, a PT3 antibody heavy chain variable and constant region and a rabbit beta globin polyadenylation signal sequence.

[0739] In some embodiments, the AAV particle genome comprises SEQ ID NO: 2168 (TAU_ITR18) which comprises a inverted terminal repeat (ITR) sequence region and a 3′ ITR sequence region, a synapsin promoter, a human beta-globin intron region, a light chain signal, a PT3 antibody light chain variable region, a T2A linker, a heavy chain signal, a PT3 antibody heavy chain variable and constant region and a rabbit beta globin polyadenylation signal sequence.

TABLE 90
Sequence Regions in ITR to ITR Sequences

| | TAU_ITR103 | | TAU_ITR111 | | TAU_ITR119 | |
|---|---|---|---|---|---|---|
| | (SEQ ID NO: | | (SEQ ID NO: | | (SEQ ID NO: | |
| | 2153) | | 2161) | | 2161) | |
| | Region | | Region | | Region | |
| Sequence | SEQ | Region | SEQ | Region | SEQ | Region |
| Regions | ID NO | length | ID NO | length | ID NO | length |
| 5′ ITR | 2076 | 130 | 2076 | 130 | 2076 | 130 |
| CMVie | 2239 | 380 | 2239 | 380 | 2239 | 380 |
| CB | 2083 | 260 | 2083 | 260 | 2083 | 260 |
| Promoter | | | | | | |
| Intron | 2240 | 566 | 2240 | 566 | 2240 | 566 |
| Signal | 1740 | 57 | 1740 | 57 | 1740 | 57 |
| VH | 1859 | 354 | 1859 | 354 | 1859 | 354 |
| Constant | 1742 | 969 | 1742 | 969 | 1742 | 969 |
| Linker | 1725 | 12 | 1724 | 12 | 1724 | 12 |
| Linker | 1727 | 75 | 1726 | 54 | 1726 | 54 |
| Signal | 1861 | 57 | 1861 | 57 | 1861 | 57 |
| VL | 1980 | 321 | 1980 | 321 | 1980 | 321 |
| Constant | 1864 | 321 | 1864 | 321 | 1864 | 321 |
| Poly A | 2122 | 127 | 2122 | 127 | 2122 | 127 |
| 3′ ITR | 2078 | 130 | 2078 | 130 | 2078 | 130 |

[0740] In some embodiments, the AAV particle genome comprises SEQ ID NO: 2153 (TAU_ITR103) which comprises a 5′ inverted terminal repeat (ITR) sequence region and a 3′ ITR sequence region a CMVie region and a CB promoter, a human beta-globin intron region, a heavy chain signal, a PT3 antibody heavy chain variable and constant region, a furin cleavage site, a F2A linker, a light chain signal, a PT3 antibody light chain variable and constant region and a rabbit beta globin polyadenylation signal sequence.

[0741] In some embodiments, the AAV particle genome comprises SEQ ID NO: 2161 (TAU_ITR11) which comprises a 5 inverted terminal repeat (ITR) sequence region and a 3′ ITR sequence region, a CMVie region and a CB promoter, a human beta-globin intron region, a heavy chain signal, a PT3 antibody heavy chain variable and constant region, a furin cleavage site, a T2A linker, a light chain signal, a PT3 antibody light chain variable and constant region and a rabbit beta globin polyadenylation signal sequence.

[0742] In some embodiments, the AAV particle genome comprises SEQ ID NO: 2161 (TAU_ITR119) which comprises a 5′ inverted terminal repeat (ITR) sequence region and a 3′ ITR sequence region, a CMVie region and a CB promoter, a human beta-globin intron region, a heavy chain signal, a PT3 antibody heavy chain variable and constant region, a furin cleavage site, a T2A linker, a light chain signal, a PT3 antibody light chain variable and constant region and a rabbit beta globin polyadenylation signal sequence.

TABLE 91
Sequence Regions in ITR to ITR Sequences

| | TAU_ITR107 | | TAU_ITR115 | |
|---|---|---|---|---|
| | (SEQ ID NO: 2157) | | (SEQ ID NO: 2165) | |
| Sequence | Region SEQ | Region | Region SEQ | Region |
| Regions | ID NO | length | ID NO | length |
| 5′ ITR | 2076 | 130 | 2076 | 130 |
| CMVie | 2239 | 380 | 2239 | 380 |
| CB Promoter | 2083 | 260 | 2083 | 260 |
| Intron | 2240 | 566 | 2240 | 566 |
| Signal | 1861 | 57 | 1861 | 57 |
| VL | 1980 | 321 | 1980 | 321 |
| Constant | 1864 | 321 | 1864 | 321 |
| Linker | 1727 | 75 | 1726 | 54 |
| Signal | 1740 | 57 | 2241 | 57 |
| VH | 1859 | 354 | 1859 | 354 |
| Constant | 1742 | 969 | 1742 | 969 |
| PolyA | 2122 | 127 | 2122 | 127 |
| 3′ ITR | 2078 | 130 | 2078 | 130 |

[0743] In some embodiments, the AAV particle genome comprises SEQ ID NO: 2157 (TAU_ITR107) which comprises a 5′ inverted terminal repeat (ITR) sequence region and a 3′ ITR sequence region, a CMVie region and a CB promoter, a human beta-globin intron region, a light chain signal, a PT3 antibody light chain variable and constant region, a F2A linker, a heavy chain signal, a PT3 antibody heavy chain variable and constant region and a rabbit beta globin polyadenylation signal sequence.

[0744] In some embodiments, the AAV particle genome comprises SEQ ID NO: 2165 (TAU_ITR115) which comprises a 5′ inverted terminal repeat (ITR) sequence region and a 3′ ITR sequence region, a CMVie region and a CB promoter, a human beta-globin intron region, a light chain signal, a PT3 antibody light chain variable and constant region, a F2A linker, a heavy chain signal, a PT3 antibody heavy chain variable and constant region and a rabbit beta globin polyadenylation signal sequence.

[0745] In some embodiments, the viral genome may comprise any combination of the following components, including, but not limited to, a 5′ ITR, a promoter region (may comprise one or more component pieces), an intronic region, a Kozak sequence, one or more signal sequences (antibody signal sequences or signal sequence derived from another protein), one or more furin cleavage sites, one or more linker sequences, one or more antibody light chain variable regions, one or more antibody light chain constant regions, one or more antibody heavy chain variable regions, one or more antibody heavy chain constant regions, a polyadenylation sequence, a stuffer sequence, and/or a filler sequence.

[0746] In some embodiments, the AAV viral genome comprises, when read in the 5′ to 3′ direction, a 5′ ITR, a promoter region, an optional intronic region, a signal sequence, an antibody light chain region, a linker region, a signal sequence, an antibody heavy chain region, a polyadenylation sequence, an optional filler sequence, and a 3′ ITR.

[0747] The viral genome may encode an antibody fragment, such as, but not limited to Fab, F(ab′)2 or scFv fragments. In some embodiments, the viral genome encodes a Fab antibody fragment. In another embodiment, the viral genome encodes an F(ab′)2 antibody fragment. In some embodiments, the viral genome encodes an scFv.

[0748] In some embodiments, the viral genome comprising the ITR to ITR sequence, or a fragment thereof, described in Tables 4-6 and 15-91 is packaged in a capsid having a serotype selected from Table 1 to generate an AAV particle. For example, the capsid serotype is VOY101, VOY201, AAVPHP.B, AAVPHP.N, AAV1, AAV2, AAV2 variant, AAV3, AAV2/3 variant, AAV4, AAV5, AAV6, AAV7, AAV8, AAV9, AAV9.47, AAV9(hu14), AAV9K449R, AAV10, AAV11, AAV12, AAVrh8, AAVrh10, AAVDJ, or AAVDJ8, or any variant thereof. In some embodiments, the capsid serotype is AAVPHP.B, AAV9, AAV6, AAVrh10, and/or AAVDJ.

[0749] In some embodiments, the AAV particle comprises a viral genome comprising SEQ ID NO: 1990 and a VOY101 capsid. In some embodiments, the AAV particle comprises a viral genome comprising SEQ ID NO: 1990 and a VOY201 capsid. In some embodiments, the AAV particle comprises a viral genome comprising SEQ ID NO: 1990 and an AAV9 capsid. In some embodiments, the AAV particle comprises a viral genome comprising SEQ ID NO: 1990 and an AAV9K449R capsid. In some embodiments, the AAV particle comprises a viral genome comprising SEQ ID NO: 1990 and an AAVPHP.B capsid. In some embodiments, the AAV particle comprises a viral genome comprising SEQ ID NO: 1990 and an AAVPHP.N capsid. In some embodiments, the AAV particle comprises a viral genome comprising SEQ ID NO: 1990 and an AAV2 variant capsid. In some embodiments, the AAV particle comprises a viral genome comprising SEQ ID NO: 1990 and an AAV2/3 variant capsid. In some embodiments, the AAV particle comprises a viral genome comprising SEQ ID NO: 1990 and a capsid comprising SEQ ID NO: 1. In some embodiments, the AAV particle comprises a viral genome comprising SEQ ID NO: 1990 and a capsid encoded by a nucleic acid sequence comprising SEQ ID NO: 2. In some embodiments, the AAV particle comprises a viral genome comprising SEQ ID NO: 1990 and a capsid comprising SEQ ID NO: 4534. In some embodiments, the AAV particle comprises a viral genome comprising SEQ ID NO: 1990 and a capsid encoded by a nucleic acid sequence comprising SEQ ID NO: 3. In some embodiments, the AAV particle comprises a viral genome comprising SEQ ID NO: 1990 and a capsid comprising SEQ ID NO: 138. In some embodiments, the AAV particle comprises a viral genome comprising SEQ ID NO: 1990 and a capsid encoded by a nucleic acid sequence comprising SEQ ID NO: 137. In some embodiments, the AAV particle comprises a viral genome comprising SEQ ID NO: 1990 and a capsid comprising SEQ ID NO: 5. In some embodiments, the AAV particle comprises a viral genome comprising SEQ ID NO: 1990 and a capsid encoded by a nucleic acid sequence comprising SEQ ID NO: 6. In some embodiments, the AAV particle comprises a viral genome comprising SEQ ID NO: 1990 and a capsid comprising SEQ ID NO: 4. In some embodiments, the AAV particle comprises a viral genome comprising SEQ ID NO: 1990 and a capsid comprising SEQ ID NO: 11. In some embodiments, the AAV particle comprises a viral genome comprising SEQ ID NO: 1990 and a capsid comprising SEQ ID NO: 2679. In some embodiments, the AAV particle comprises a viral genome comprising SEQ ID NO: 1990 and a capsid comprising SEQ ID NO: 2809. In some embodiments, the AAV particle comprises a viral genome comprising SEQ ID NO: 1990 and a capsid comprising SEQ ID NO: 2871.

[0750] In some embodiments, the AAV particle comprises a viral genome comprising SEQ ID NO: 1991 and a VOY101 capsid. In some embodiments, the AAV particle comprises a viral genome comprising SEQ ID NO: 1991 and a VOY201 capsid. In some embodiments, the AAV particle comprises a viral genome comprising SEQ ID NO: 1991 and an AAV9 capsid. In some embodiments, the AAV particle comprises a viral genome comprising SEQ ID NO: 1991 and an AAV9K449R capsid. In some embodiments, the AAV particle comprises a viral genome comprising SEQ ID NO: 1991 and an AAVPHP.B capsid. In some embodiments, the AAV particle comprises a viral genome comprising SEQ ID NO: 1991 and an AAVPHP.N capsid. In some embodiments, the AAV particle comprises a viral genome comprising SEQ ID NO: 1991 and an AAV2 variant capsid. In some embodiments, the AAV particle comprises a viral genome comprising SEQ ID NO: 1991 and an AAV2/3 variant capsid. In some embodiments, the AAV particle comprises a viral genome comprising SEQ ID NO: 1991 and a capsid comprising SEQ ID NO: 1. In some embodiments, the AAV particle comprises a viral genome comprising SEQ ID NO: 1991 and a capsid encoded by a nucleic acid sequence comprising SEQ ID NO: 2. In some embodiments, the AAV particle comprises a viral genome comprising SEQ ID NO: 1991 and a capsid comprising SEQ ID NO: 4534. In some embodiments, the AAV particle comprises a viral genome comprising SEQ ID NO: 1991 and a capsid encoded by a nucleic acid sequence comprising SEQ ID NO: 3. In some embodiments, the AAV particle comprises a viral genome comprising SEQ ID NO: 1991 and a capsid comprising SEQ ID NO: 138. In some embodiments, the AAV particle comprises a viral genome comprising SEQ ID NO: 1991 and a capsid encoded by a nucleic acid sequence comprising SEQ ID NO: 137. In some embodiments, the AAV particle comprises a viral genome comprising SEQ ID NO: 1991 and a capsid comprising SEQ ID NO: 5. In some embodiments, the AAV particle comprises a viral genome comprising SEQ ID NO: 1991 and a capsid encoded by a nucleic acid sequence comprising SEQ ID NO: 6. In some embodiments, the AAV particle comprises a viral genome comprising SEQ ID NO: 1991 and a capsid comprising SEQ ID NO: 4. In some embodiments, the AAV particle comprises a viral genome comprising SEQ ID NO: 1991 and a capsid comprising SEQ ID NO: 11. In some embodiments, the AAV particle comprises a viral genome comprising SEQ ID NO: 1991 and a capsid comprising SEQ ID NO: 2679. In some embodiments, the AAV particle comprises a viral genome comprising SEQ ID NO: 1991 and a capsid comprising SEQ ID NO: 2809. In some embodiments, the AAV particle comprises a viral genome comprising SEQ ID NO: 1991 and a capsid comprising SEQ ID NO: 2871.

[0751] In some embodiments, the AAV particle comprises a viral genome comprising SEQ ID NO: 1992 and a VOY101 capsid. In some embodiments, the AAV particle comprises a viral genome comprising SEQ ID NO: 1992 and a VOY201 capsid. In some embodiments, the AAV particle comprises a viral genome comprising SEQ ID NO: 1992 and an AAV9 capsid. In some embodiments, the AAV particle comprises a viral genome comprising SEQ ID NO: 1992 and an AAV9K449R capsid. In some embodiments, the AAV particle comprises a viral genome comprising SEQ ID NO: 1992 and an AAVPHP.B capsid. In some embodiments, the AAV particle comprises a viral genome comprising SEQ ID NO: 1992 and an AAVPHP.N capsid. In some embodiments, the AAV particle comprises a viral genome comprising SEQ ID NO: 1992 and an AAV2 variant capsid. In some embodiments, the AAV particle comprises a viral genome comprising SEQ ID NO: 1992 and an AAV2/3 variant capsid. In some embodiments, the AAV particle comprises a viral genome comprising SEQ ID NO: 1992 and a capsid comprising SEQ ID NO: 1. In some embodiments, the AAV particle comprises a viral genome comprising SEQ ID NO: 1992 and a capsid encoded by a nucleic acid sequence comprising SEQ ID NO: 2. In some embodiments, the AAV particle comprises a viral genome comprising SEQ ID NO: 1992 and a capsid comprising SEQ ID NO: 4534. In some embodiments, the AAV particle comprises a viral genome comprising SEQ ID NO: 1992 and a capsid encoded by a nucleic acid sequence comprising SEQ ID NO: 3. In some embodiments, the AAV particle comprises a viral genome comprising SEQ ID NO: 1992 and a capsid comprising SEQ ID NO: 138. In some embodiments, the AAV particle comprises a viral genome comprising SEQ ID NO: 1992 and a capsid encoded by a nucleic acid sequence comprising SEQ ID NO: 137. In some embodiments, the AAV particle comprises a viral genome comprising SEQ ID NO: 1992 and a capsid comprising SEQ ID NO: 5. In some embodiments, the AAV particle comprises a viral genome comprising SEQ ID NO: 1992 and a capsid encoded by a nucleic acid sequence comprising SEQ ID NO: 6. In some embodiments, the AAV particle comprises a viral genome comprising SEQ ID NO: 1992 and a capsid comprising SEQ ID NO: 4. In some embodiments, the AAV particle comprises a viral genome comprising SEQ ID NO: 1992 and a capsid comprising SEQ ID NO: 11. In some embodiments, the AAV particle comprises a viral genome comprising SEQ ID NO: 1992 and a capsid comprising SEQ ID NO: 2679. In some embodiments, the AAV particle comprises a viral genome comprising SEQ ID NO: 1992 and a capsid comprising SEQ ID NO: 2809. In some embodiments, the AAV particle comprises a viral genome comprising SEQ ID NO: 1992 and a capsid comprising SEQ ID NO: 2871.

[0752] In some embodiments, the AAV particle comprises a viral genome comprising SEQ ID NO: 1993 and a VOY101 capsid. In some embodiments, the AAV particle comprises a viral genome comprising SEQ ID NO: 1993 and a VOY201 capsid. In some embodiments, the AAV particle comprises a viral genome comprising SEQ ID NO: 1993 and an AAV9 capsid. In some embodiments, the AAV particle comprises a viral genome comprising SEQ ID NO: 1993 and an AAV9K449R capsid. In some embodiments, the AAV particle comprises a viral genome comprising SEQ ID NO: 1993 and an AAVPHP.B capsid. In some embodiments, the AAV particle comprises a viral genome comprising SEQ ID NO: 1993 and an AAVPHP.N capsid. In some embodiments, the AAV particle comprises a viral genome comprising SEQ ID NO: 1993 and an AAV2 variant capsid. In some embodiments, the AAV particle comprises a viral genome comprising SEQ ID NO: 1993 and an AAV2/3 variant capsid. In some embodiments, the AAV particle comprises a viral genome comprising SEQ ID NO: 1993 and a capsid comprising SEQ ID NO: 1. In some embodiments, the AAV particle comprises a viral genome comprising SEQ ID NO: 1993 and a capsid encoded by a nucleic acid sequence comprising SEQ ID NO: 2. In some embodiments, the AAV particle comprises a viral genome comprising SEQ ID NO: 1993 and a capsid comprising SEQ ID NO: 4534. In some embodiments, the AAV particle comprises a viral genome comprising SEQ ID NO: 1993 and a capsid encoded by a nucleic acid sequence comprising SEQ ID NO: 3. In some embodiments, the AAV particle comprises a viral genome comprising SEQ ID NO: 1993 and a capsid comprising SEQ ID NO: 138. In some embodiments, the AAV particle comprises a viral genome comprising SEQ ID NO: 1993 and a capsid encoded by a nucleic acid sequence comprising SEQ ID NO: 137. In some embodiments, the AAV particle comprises a viral genome comprising SEQ ID NO: 1993 and a capsid comprising SEQ ID NO: 5. In some embodiments, the AAV particle comprises a viral genome comprising SEQ ID NO: 1993 and a capsid encoded by a nucleic acid sequence comprising SEQ ID NO: 6. In some embodiments, the AAV particle comprises a viral genome comprising SEQ ID NO: 1993 and a capsid comprising SEQ ID NO: 4. In some embodiments, the AAV particle comprises a viral genome comprising SEQ ID NO: 1993 and a capsid comprising SEQ ID NO: 11. In some embodiments, the AAV particle comprises a viral genome comprising SEQ ID NO: 1993 and a capsid comprising SEQ ID NO: 2679. In some embodiments, the AAV particle comprises a viral genome comprising SEQ ID NO: 1993 and a capsid comprising SEQ ID NO: 2809. In some embodiments, the AAV particle comprises a viral genome comprising SEQ ID NO: 1993 and a capsid comprising SEQ ID NO: 2871.

[0753] In some embodiments, the AAV particle comprises a viral genome comprising SEQ ID NO: 1994 and a VOY101 capsid. In some embodiments, the AAV particle comprises a viral genome comprising SEQ ID NO: 1994 and a VOY201 capsid. In some embodiments, the AAV particle comprises a viral genome comprising SEQ ID NO: 1994 and an AAV9 capsid. In some embodiments, the AAV particle comprises a viral genome comprising SEQ ID NO: 1994 and an AAV9K449R capsid. In some embodiments, the AAV particle comprises a viral genome comprising SEQ ID NO: 1994 and an AAVPHP.B capsid. In some embodiments, the AAV particle comprises a viral genome comprising SEQ ID NO: 1994 and an AAVPHP.N capsid. In some embodiments, the AAV particle comprises a viral genome comprising SEQ ID NO: 1994 and an AAV2 variant capsid. In some embodiments, the AAV particle comprises a viral genome comprising SEQ ID NO: 1994 and an AAV2/3 variant capsid. In some embodiments, the AAV particle comprises a viral genome comprising SEQ ID NO: 1994 and a capsid comprising SEQ ID NO: 1. In some embodiments, the AAV particle comprises a viral genome comprising SEQ ID NO: 1994 and a capsid encoded by a nucleic acid sequence comprising SEQ ID NO: 2. In some embodiments, the AAV particle comprises a viral genome comprising SEQ ID NO: 1994 and a capsid comprising SEQ ID NO: 4534. In some embodiments, the AAV particle comprises a viral genome comprising SEQ ID NO: 1994 and a capsid encoded by a nucleic acid sequence comprising SEQ ID NO: 3. In some embodiments, the AAV particle comprises a viral genome comprising SEQ ID NO: 1994 and a capsid comprising SEQ ID NO: 138. In some embodiments, the AAV particle comprises a viral genome comprising SEQ ID NO: 1994 and a capsid encoded by a nucleic acid sequence comprising SEQ ID NO: 137. In some embodiments, the AAV particle comprises a viral genome comprising SEQ ID NO: 1994 and a capsid comprising SEQ ID NO: 5. In some embodiments, the AAV particle comprises a viral genome comprising SEQ ID NO: 1994 and a capsid encoded by a nucleic acid sequence comprising SEQ ID NO: 6. In some embodiments, the AAV particle comprises a viral genome comprising SEQ ID NO: 1994 and a capsid comprising SEQ ID NO: 4. In some embodiments, the AAV particle comprises a viral genome comprising SEQ ID NO: 1994 and a capsid comprising SEQ ID NO: 11. In some embodiments, the AAV particle comprises a viral genome comprising SEQ ID NO: 1994 and a capsid comprising SEQ ID NO: 2679. In some embodiments, the AAV particle comprises a viral genome comprising SEQ ID NO: 1994 and a capsid comprising SEQ ID NO: 2809. In some embodiments, the AAV particle comprises a viral genome comprising SEQ ID NO: 1994 and a capsid comprising SEQ ID NO: 2871.

[0754] In some embodiments, the AAV particle comprises a viral genome comprising SEQ ID NO: 1995 and a VOY101 capsid. In some embodiments, the AAV particle comprises a viral genome comprising SEQ ID NO: 1995 and a VOY201 capsid. In some embodiments, the AAV particle comprises a viral genome comprising SEQ ID NO: 1995 and an AAV9 capsid. In some embodiments, the AAV particle comprises a viral genome comprising SEQ ID NO: 1995 and an AAV9K449R capsid. In some embodiments, the AAV particle comprises a viral genome comprising SEQ ID NO: 1995 and an AAVPHP.B capsid. In some embodiments, the AAV particle comprises a viral genome comprising SEQ ID NO: 1995 and an AAVPHP.N capsid. In some embodiments, the AAV particle comprises a viral genome comprising SEQ ID NO: 1995 and an AAV2 variant capsid. In some embodiments, the AAV particle comprises a viral genome comprising SEQ ID NO: 1995 and an AAV2/3 variant capsid. In some embodiments, the AAV particle comprises a viral genome comprising SEQ ID NO: 1995 and a capsid comprising SEQ ID NO: 1. In some embodiments, the AAV particle comprises a viral genome comprising SEQ ID NO: 1995 and a capsid encoded by a nucleic acid sequence comprising SEQ ID NO: 2. In some embodiments, the AAV particle comprises a viral genome comprising SEQ ID NO: 1995 and a capsid comprising SEQ ID NO: 4534. In some embodiments, the AAV particle comprises a viral genome comprising SEQ ID NO: 1995 and a capsid encoded by a nucleic acid sequence comprising SEQ ID NO: 3. In some embodiments, the AAV particle comprises a viral genome comprising SEQ ID NO: 1995 and a capsid comprising SEQ ID NO: 138. In some embodiments, the AAV particle comprises a viral genome comprising SEQ ID NO: 1995 and a capsid encoded by a nucleic acid sequence comprising SEQ ID NO: 137. In some embodiments, the AAV particle comprises a viral genome comprising SEQ ID NO: 1995 and a capsid comprising SEQ ID NO: 5. In some embodiments, the AAV particle comprises a viral genome comprising SEQ ID NO: 1995 and a capsid encoded by a nucleic acid sequence comprising SEQ ID NO: 6. In some embodiments, the AAV particle comprises a viral genome comprising SEQ ID NO: 1995 and a capsid comprising SEQ ID NO: 4. In some embodiments, the AAV particle comprises a viral genome comprising SEQ ID NO: 1995 and a capsid comprising SEQ ID NO: 11. In some embodiments, the AAV particle comprises a viral genome comprising SEQ ID NO: 1995 and a capsid comprising SEQ ID NO: 2679. In some embodiments, the AAV particle comprises a viral genome comprising SEQ ID NO: 1995 and a capsid comprising SEQ ID NO: 2809. In some embodiments, the AAV particle comprises a viral genome comprising SEQ ID NO: 1995 and a capsid comprising SEQ ID NO: 2871.

[0755] In some embodiments, the AAV particle comprises a viral genome comprising SEQ ID NO: 1996 and a VOY101 capsid. In some embodiments, the AAV particle comprises a viral genome comprising SEQ ID NO: 1996 and a VOY201 capsid. In some embodiments, the AAV particle comprises a viral genome comprising SEQ ID NO: 1996 and an AAV9 capsid. In some embodiments, the AAV particle comprises a viral genome comprising SEQ ID NO: 1996 and an AAV9K449R capsid. In some embodiments, the AAV particle comprises a viral genome comprising SEQ ID NO: 1996 and an AAVPHP.B capsid. In some embodiments, the AAV particle comprises a viral genome comprising SEQ ID NO: 1996 and an AAVPHP.N capsid. In some embodiments, the AAV particle comprises a viral genome comprising SEQ ID NO: 1996 and an AAV2 variant capsid. In some embodiments, the AAV particle comprises a viral genome comprising SEQ ID NO: 1996 and an AAV2/3 variant capsid. In some embodiments, the AAV particle comprises a viral genome comprising SEQ ID NO: 1996 and a capsid comprising SEQ ID NO: 1. In some embodiments, the AAV particle comprises a viral genome comprising SEQ ID NO: 1996 and a capsid encoded by a nucleic acid sequence comprising SEQ ID NO: 2. In some embodiments, the AAV particle comprises a viral genome comprising SEQ ID NO: 1996 and a capsid comprising SEQ ID NO: 4534. In some embodiments, the AAV particle comprises a viral genome comprising SEQ ID NO: 1996 and a capsid encoded by a nucleic acid sequence comprising SEQ ID NO: 3. In some embodiments, the AAV particle comprises a viral genome comprising SEQ ID NO: 1996 and a capsid comprising SEQ ID NO: 138. In some embodiments, the AAV particle comprises a viral genome comprising SEQ ID NO: 1996 and a capsid encoded by a nucleic acid sequence comprising SEQ ID NO: 137. In some embodiments, the AAV particle comprises a viral genome comprising SEQ ID NO: 1996 and a capsid comprising SEQ ID NO: 5. In some embodiments, the AAV particle comprises a viral genome comprising SEQ ID NO: 1996 and a capsid encoded by a nucleic acid sequence comprising SEQ ID NO: 6. In some embodiments, the AAV particle comprises a viral genome comprising SEQ ID NO: 1996 and a capsid comprising SEQ ID NO: 4. In some embodiments, the AAV particle comprises a viral genome comprising SEQ ID NO: 1996 and a capsid comprising SEQ ID NO: 11. In some embodiments, the AAV particle comprises a viral genome comprising SEQ ID NO: 1996 and a capsid comprising SEQ ID NO: 2679. In some embodiments, the AAV particle comprises a viral genome comprising SEQ ID NO: 1996 and a capsid comprising SEQ ID NO: 2809. In some embodiments, the AAV particle comprises a viral genome comprising SEQ ID NO: 1996 and a capsid comprising SEQ ID NO: 2871.

[0756] In some embodiments, the AAV particle comprises a viral genome comprising SEQ ID NO: 1997 and a VOY101 capsid. In some embodiments, the AAV particle comprises a viral genome comprising SEQ ID NO: 1997 and a VOY201 capsid. In some embodiments, the AAV particle comprises a viral genome comprising SEQ ID NO: 1997 and an AAV9 capsid. In some embodiments, the AAV particle comprises a viral genome comprising SEQ ID NO: 1997 and an AAV9K449R capsid. In some embodiments, the AAV particle comprises a viral genome comprising SEQ ID NO: 1997 and an AAVPHP.B capsid. In some embodiments, the AAV particle comprises a viral genome comprising SEQ ID NO: 1997 and an AAVPHP.N capsid. In some embodiments, the AAV particle comprises a viral genome comprising SEQ ID NO: 1997 and an AAV2 variant capsid. In some embodiments, the AAV particle comprises a viral genome comprising SEQ ID NO: 1997 and an AAV2/3 variant capsid. In some embodiments, the AAV particle comprises a viral genome comprising SEQ ID NO: 1997 and a capsid comprising SEQ ID NO: 1. In some embodiments, the AAV particle comprises a viral genome comprising SEQ ID NO: 1997 and a capsid encoded by a nucleic acid sequence comprising SEQ ID NO: 2. In some embodiments, the AAV particle comprises a viral genome comprising SEQ ID NO: 1997 and a capsid comprising SEQ ID NO: 4534. In some embodiments, the AAV particle comprises a viral genome comprising SEQ ID NO: 1997 and a capsid encoded by a nucleic acid sequence comprising SEQ ID NO: 3. In some embodiments, the AAV particle comprises a viral genome comprising SEQ ID NO: 1997 and a capsid comprising SEQ ID NO: 138. In some embodiments, the AAV particle comprises a viral genome comprising SEQ ID NO: 1997 and a capsid encoded by a nucleic acid sequence comprising SEQ ID NO: 137. In some embodiments, the AAV particle comprises a viral genome comprising SEQ ID NO: 1997 and a capsid comprising SEQ ID NO: 5. In some embodiments, the AAV particle comprises a viral genome comprising SEQ ID NO: 1997 and a capsid encoded by a nucleic acid sequence comprising SEQ ID NO: 6. In some embodiments, the AAV particle comprises a viral genome comprising SEQ ID NO: 1997 and a capsid comprising SEQ ID NO: 4. In some embodiments, the AAV particle comprises a viral genome comprising SEQ ID NO: 1997 and a capsid comprising SEQ ID NO: 11. In some embodiments, the AAV particle comprises a viral genome comprising SEQ ID NO: 1997 and a capsid comprising SEQ ID NO: 2679. In some embodiments, the AAV particle comprises a viral genome comprising SEQ ID NO: 1997 and a capsid comprising SEQ ID NO: 2809. In some embodiments, the AAV particle comprises a viral genome comprising SEQ ID NO: 1997 and a capsid comprising SEQ ID NO: 2871.

[0757] In some embodiments, the AAV particle comprises a viral genome comprising SEQ ID NO: 1998 and a VOY101 capsid. In some embodiments, the AAV particle comprises a viral genome comprising SEQ ID NO: 1998 and a VOY201 capsid. In some embodiments, the AAV particle comprises a viral genome comprising SEQ ID NO: 1998 and an AAV9 capsid. In some embodiments, the AAV particle comprises a viral genome comprising SEQ ID NO: 1998 and an AAV9K449R capsid. In some embodiments, the AAV particle comprises a viral genome comprising SEQ ID NO: 1998 and an AAVPHP.B capsid. In some embodiments, the AAV particle comprises a viral gnome comprising SEQ ID NO: 1998 and an AAVPHP.N capsid. In some embodiments, the AAV particle comprises a viral gnome comprising SEQ ID NO: 1998 and an AAV2 variant capsid. In some embodiments, the AAV particle comprises a viral genome comprising SEQ ID NO: 1998 and an AAV2/3 variant capsid. In some embodiments, the AAV particle comprises a viral genome comprising SEQ ID NO: 1998 and a capsid comprising SEQ ID NO: 1. In some embodiments, the AAV particle comprises a viral genome comprising SEQ ID NO: 1998 and a capsid encoded by a nucleic acid sequence comprising SEQ ID NO: 2. In some embodiments, the AAV particle comprises a viral genome comprising SEQ ID NO: 1998 and a capsid comprising SEQ ID NO: 4534. In some embodiments, the AAV particle comprises a viral genome comprising SEQ ID NO: 1998 and a capsid encoded by a nucleic acid sequence comprising SEQ ID NO: 3. In some embodiments, the AAV particle comprises a viral gnome comprising SEQ ID NO: 1998 and a capsid comprising SEQ ID NO: 138. In some embodiments, the AAV particle comprises a viral genome comprising SEQ ID NO: 1998 and a capsid encoded by a nucleic acid sequence comprising SEQ ID NO: 137. In some embodiments, the AAV particle comprises a viral genome comprising SEQ ID NO: 1998 and a capsid comprising SEQ ID NO: 5. In some embodiments, the AAV particle comprises a viral genome comprising SEQ ID NO: 1998 and a capsid encoded by a nucleic acid sequence comprising SEQ ID NO: 6. In some embodiments, the AAV particle comprises a viral genome comprising SEQ ID NO: 1998 and a capsid comprising SEQ ID NO: 4. In some embodiments, the AAV particle comprises a viral genome comprising SEQ ID NO: 1998 and a capsid comprising SEQ ID NO: 11. In some embodiments, the AAV particle comprises a viral genome comprising SEQ ID NO: 1998 and a capsid comprising SEQ ID NO: 2679. In some embodiments, the AAV particle comprises a viral genome comprising SEQ ID NO: 1998 and a capsid comprising SEQ ID NO: 2809. In some embodiments, the AAV particle comprises a viral genome comprising SEQ ID NO: 1998 and a capsid comprising SEQ ID NO: 2871.

[0758] In some embodiments, the AAV particle comprises a viral genome comprising SEQ ID NO: 1999 and a VOY101 capsid. In some embodiments, the AAV particle comprises a viral genome comprising SEQ ID NO: 1999 and a VOY201 capsid. In some embodiments, the AAV particle comprises a viral genome comprising SEQ ID NO: 1999 and an AAV9 capsid. In some embodiments, the AAV particle comprises a viral genome comprising SEQ ID NO: 1999 and an AAV9K449R capsid. In some embodiments, the AAV particle comprises a viral genome comprising SEQ ID NO: 1999 and an AAVPHP.B capsid. In some embodiments, the AAV particle comprises a viral genome comprising SEQ ID NO: 1999 and an AAVPHP.N capsid. In some embodiments, the AAV particle comprises a viral genome comprising SEQ ID NO: 1999 and an AAV2 variant capsid. In some embodiments, the AAV particle comprises a viral genome comprising SEQ ID NO: 1999 and an AAV2/3 variant capsid. In some embodiments, the AAV particle comprises a viral genome comprising SEQ ID NO: 1999 and a capsid comprising SEQ ID NO: 1. In some embodiments, the AAV particle comprises a viral genome comprising SEQ ID NO: 1999 and a capsid encoded by a nucleic acid sequence comprising SEQ ID NO: 2. In some embodiments, the AAV particle comprises a viral genome comprising SEQ ID NO: 1999 and a capsid comprising SEQ ID NO: 4534. In some embodiments, the AAV particle comprises a viral genome comprising SEQ ID NO: 1999 and a capsid encoded by a nucleic acid sequence comprising SEQ ID NO: 3. In some embodiments, the AAV particle comprises a viral genome comprising SEQ ID NO: 1999 and a capsid comprising SEQ ID NO: 138. In some embodiments, the AAV particle comprises a viral genome comprising SEQ ID NO: 1999 and a capsid encoded by a nucleic acid sequence comprising SEQ ID NO: 137. In some embodiments, the AAV particle comprises a viral genome comprising SEQ ID NO: 1999 and a capsid comprising SEQ ID NO: 5. In some embodiments, the AAV particle comprises a viral genome comprising SEQ ID NO: 1999 and a capsid encoded by a nucleic acid sequence comprising SEQ ID NO: 6. In some embodiments, the AAV particle comprises a viral genome comprising SEQ ID NO: 1999 and a capsid comprising SEQ ID NO: 4. In some embodiments, the AAV particle comprises a viral genome comprising SEQ ID NO: 1999 and a capsid comprising SEQ ID NO: 11. In some embodiments, the AAV particle comprises a viral genome comprising SEQ ID NO: 1999 and a capsid comprising SEQ ID NO: 2679. In some embodiments, the AAV particle comprises a viral genome comprising SEQ ID NO: 1999 and a capsid comprising SEQ ID NO: 2809. In some embodiments, the AAV particle comprises a viral genome comprising SEQ ID NO: 1999 and a capsid comprising SEQ ID NO: 2871.

[0759] In some embodiments, the AAV particle comprises a viral genome comprising SEQ ID NO: 2000 and a VOY101 capsid. In some embodiments, the AAV particle comprises a viral genome comprising SEQ ID NO: 2000 and a VOY201 capsid. In some embodiments, the AAV particle comprises a viral genome comprising SEQ ID NO: 2000 and an AAV9 capsid. In some embodiments, the AAV particle comprises a viral genome comprising SEQ ID NO: 2000 and an AAV9K449R capsid. In some embodiments, the AAV particle comprises a viral genome comprising SEQ ID NO: 2000 and an AAVPHP.B capsid. In some embodiments, the AAV particle comprises a viral genome comprising SEQ ID NO: 2000 and an AAVPHP.N capsid. In some embodiments, the AAV particle comprises a viral genome comprising SEQ ID NO: 2000 and an AAV2 variant capsid. In some embodiments, the AAV particle comprises a viral genome comprising SEQ ID NO: 2000 and an AAV2/3 variant capsid. In some embodiments, the AAV particle comprises a viral genome comprising SEQ ID NO: 2000 and a capsid comprising SEQ ID NO: 1. In some embodiments, the AAV particle comprises a viral genome comprising SEQ ID NO: 2000 and a capsid encoded by a nucleic acid sequence comprising SEQ ID NO: 2. In some embodiments, the AAV particle comprises a viral genome comprising SEQ ID NO: 2000 and a capsid comprising SEQ ID NO: 4534. In some embodiments, the AAV particle comprises a viral genome comprising SEQ ID NO: 2000 and a capsid encoded by a nucleic acid sequence comprising SEQ ID NO: 3. In some embodiments, the AAV particle comprises a viral genome comprising SEQ ID NO: 2000 and a capsid comprising SEQ ID NO: 138. In some embodiments, the AAV particle comprises a viral genome comprising SEQ ID NO: 2000 and a capsid encoded by a nucleic acid sequence comprising SEQ ID NO: 137. In some embodiments, the AAV particle comprises a viral genome comprising SEQ ID NO: 2000 and a capsid comprising SEQ ID NO: 5. In some embodiments, the AAV particle comprises a viral genome comprising SEQ ID NO: 2000 and a capsid encoded by a nucleic acid sequence comprising SEQ ID NO: 6. In some embodiments, the AAV particle comprises a viral genome comprising SEQ ID NO: 2000 and a capsid comprising SEQ ID NO: 4. In some embodiments, the AAV particle comprises a viral genome comprising SEQ ID NO: 2000 and a capsid comprising SEQ ID NO: 11. In some embodiments, the AAV particle comprises a viral genome comprising SEQ ID NO: 2000 and a capsid comprising SEQ ID NO: 2679. In some embodiments, the AAV particle comprises a viral genome comprising SEQ ID NO: 2000 and a capsid comprising SEQ ID NO: 2809. In some embodiments, the AAV particle comprises a viral genome comprising SEQ ID NO: 2000 and a capsid comprising SEQ ID NO: 2871.

[0760] In some embodiments, the AAV particle comprises a viral genome comprising SEQ ID NO: 2001 and a VOY101 capsid. In some embodiments, the AAV particle comprises a viral genome comprising SEQ ID NO: 2001 and a VOY201 capsid. In some embodiments, the AAV particle comprises a viral genome comprising SEQ ID NO: 2001 and an AAV9 capsid. In some embodiments, the AAV particle comprises a viral genome comprising SEQ ID NO: 2001 and an AAV9K449R capsid. In some embodiments, the AAV particle comprises a viral genome comprising SEQ ID NO: 2001 and an AAVPHP.B capsid. In some embodiments, the AAV particle comprises a viral genome comprising SEQ ID NO: 2001 and an AAVPHP.N capsid. In some embodiments, the AAV particle comprises a viral genome comprising SEQ ID NO: 2001 and an AAV2 variant capsid. In some embodiments, the AAV particle comprises a viral genome comprising SEQ ID NO: 2001 and an AAV2/3 variant capsid. In some embodiments, the AAV particle comprises a viral genome comprising SEQ ID NO: 2001 and a capsid comprising SEQ ID NO: 1. In some embodiments, the AAV particle comprises a viral genome comprising SEQ ID NO: 2001 and a capsid encoded by a nucleic acid sequence comprising SEQ ID NO: 2. In some embodiments, the AAV particle comprises a viral genome comprising SEQ ID NO: 2001 and a capsid comprising SEQ ID NO: 4534. In some embodiments, the AAV particle comprises a viral genome comprising SEQ ID NO: 2001 and a capsid encoded by a nucleic acid sequence comprising SEQ ID NO: 3. In some embodiments, the AAV particle comprises a viral genome comprising SEQ ID NO: 2001 and a capsid comprising SEQ ID NO: 138. In some embodiments, the AAV particle comprises a viral genome comprising SEQ ID NO: 2001 and a capsid encoded by a nucleic acid sequence comprising SEQ ID NO: 137. In some embodiments, the AAV particle comprises a viral genome comprising SEQ ID NO: 2001 and a capsid comprising SEQ ID NO: 5. In some embodiments, the AAV particle comprises a viral genome comprising SEQ ID NO: 2001 and a capsid encoded by a nucleic acid sequence comprising SEQ ID NO: 6. In some embodiments, the AAV particle comprises a viral genome comprising SEQ ID NO: 2001 and a capsid comprising SEQ ID NO: 4. In some embodiments, the AAV particle comprises a viral genome comprising SEQ ID NO: 2001 and a capsid comprising SEQ ID NO: 11. In some embodiments, the AAV particle comprises a viral genome comprising SEQ ID NO: 2001 and a capsid comprising SEQ ID NO: 2679. In some embodiments, the AAV particle comprises a viral genome comprising SEQ ID NO: 2001 and a capsid comprising SEQ ID NO: 2809. In some embodiments, the AAV particle comprises a viral genome comprising SEQ ID NO: 2001 and a capsid comprising SEQ ID NO: 2871.

[0761] In some embodiments, the AAV particle comprises a viral genome comprising SEQ ID NO: 2002 and a VOY101 capsid. In some embodiments, the AAV particle comprises a viral genome comprising SEQ ID NO: 2002 and a VOY201 capsid. In some embodiments, the AAV particle comprises a viral genome comprising SEQ ID NO: 2002 and an AAV9 capsid. In some embodiments, the AAV particle comprises a viral genome comprising SEQ ID NO: 2002 and an AAV9K449R capsid. In some embodiments, the AAV particle comprises a viral genome comprising SEQ ID NO: 2002 and an AAVPHP.B capsid. In some embodiments, the AAV particle comprises a viral genome comprising SEQ ID NO: 2002 and an AAVPHP.N capsid. In some embodiments, the AAV particle comprises a viral genome comprising SEQ ID NO: 2002 and an AAV2 variant capsid. In some embodiments, the AAV particle comprises a viral genome comprising SEQ ID NO: 2002 and an AAV2/3 variant capsid. In some embodiments, the AAV particle comprises a viral genome comprising SEQ ID NO: 2002 and a capsid comprising SEQ ID NO: 1. In some embodiments, the AAV particle comprises a viral genome comprising SEQ ID NO: 2002 and a capsid encoded by a nucleic acid sequence comprising SEQ ID NO: 2. In some embodiments, the AAV particle comprises a viral genome comprising SEQ ID NO: 2002 and a capsid comprising SEQ ID NO: 4534. In some embodiments, the AAV particle comprises a viral genome comprising SEQ ID NO: 2002 and a capsid encoded by a nucleic acid sequence comprising SEQ ID NO: 3. In some embodiments, the AAV particle comprises a viral genome comprising SEQ ID NO: 2002 and a capsid comprising SEQ ID NO: 138. In some embodiments, the AAV particle comprises a viral genome comprising SEQ ID NO: 2002 and a capsid encoded by a nucleic acid sequence comprising SEQ ID NO: 137. In some embodiments, the AAV particle comprises a viral genome comprising SEQ ID NO: 2002 and a capsid comprising SEQ ID NO: 5. In some embodiments, the AAV particle comprises a viral genome comprising SEQ ID NO: 2002 and a capsid encoded by a nucleic acid sequence comprising SEQ ID NO: 6. In some embodiments, the AAV particle comprises a viral genome comprising SEQ ID NO: 2002 and a capsid comprising SEQ ID NO: 4. In some embodiments, the AAV particle comprises a viral genome comprising SEQ ID NO: 2002 and a capsid comprising SEQ ID NO: 11. In some embodiments, the AAV particle comprises a viral genome comprising SEQ ID NO: 2002 and a capsid comprising SEQ ID NO: 2679. In some embodiments, the AAV particle comprises a viral genome comprising SEQ ID NO: 2002 and a capsid comprising SEQ ID NO: 2809. In some embodiments, the AAV particle comprises a viral genome comprising SEQ ID NO: 2002 and a capsid comprising SEQ ID NO: 2871.

[0762] In some embodiments, the AAV particle comprises a viral genome comprising SEQ ID NO: 2003 and a VOY101 capsid. In some embodiments, the AAV particle comprises a viral genome comprising SEQ ID NO: 2003 and a VOY201 capsid. In some embodiments, the AAV particle comprises a viral genome comprising SEQ ID NO: 2003 and an AAV9 capsid. In some embodiments, the AAV particle comprises a viral genome comprising SEQ ID NO: 2003 and an AAV9K449R capsid. In some embodiments, the AAV particle comprises a viral genome comprising SEQ ID NO: 2003 and an AAVPHP.B capsid. In some embodiments, the AAV particle comprises a viral genome comprising SEQ ID NO: 2003 and an AAVPHP.N capsid. In some embodiments, the AAV particle comprises a viral genome comprising SEQ ID NO: 2003 and an AAV2 variant capsid. In some embodiments, the AAV particle comprises a viral genome comprising SEQ ID NO: 2003 and an AAV2/3 variant capsid. In some embodiments, the AAV particle comprises a viral genome comprising SEQ ID NO: 2003 and a capsid comprising SEQ ID NO: 1. In some embodiments, the AAV particle comprises a viral genome comprising SEQ ID NO: 2003 and a capsid encoded by a nucleic acid sequence comprising SEQ ID NO: 2. In some embodiments, the AAV particle comprises a viral genome comprising SEQ ID NO: 2003 and a capsid comprising SEQ ID NO: 4534. In some embodiments, the AAV particle comprises a viral genome comprising SEQ ID NO: 2003 and a capsid encoded by a nucleic acid sequence comprising SEQ ID NO: 3. In some embodiments, the AAV particle comprises a viral genome comprising SEQ ID NO: 2003 and a capsid comprising SEQ ID NO: 138. In some embodiments, the AAV particle comprises a viral genome comprising SEQ ID NO: 2003 and a capsid encoded by a nucleic acid sequence comprising SEQ ID NO: 137. In some embodiments, the AAV particle comprises a viral genome comprising SEQ ID NO: 2003 and a capsid comprising SEQ ID NO: 5. In some embodiments, the AAV particle comprises a viral genome comprising SEQ ID NO: 2003 and a capsid encoded by a nucleic acid sequence comprising SEQ ID NO: 6. In some embodiments, the AAV particle comprises a viral genome comprising SEQ ID NO: 2003 and a capsid comprising SEQ ID NO: 4. In some embodiments, the AAV particle comprises a viral genome comprising SEQ ID NO: 2003 and a capsid comprising SEQ ID NO: 11. In some embodiments, the AAV particle comprises a viral genome comprising SEQ ID NO: 2003 and a capsid comprising SEQ ID NO: 2679. In some embodiments, the AAV particle comprises a viral genome comprising SEQ ID NO: 2003 and a capsid comprising SEQ ID NO: 2809. In some embodiments, the AAV particle comprises a viral genome comprising SEQ ID NO: 2003 and a capsid comprising SEQ ID NO: 2871.

[0763] In some embodiments, the AAV particle comprises a viral genome comprising SEQ ID NO: 2004 and a VOY101 capsid. In some embodiments, the AAV particle comprises a viral genome comprising SEQ ID NO: 2004 and a VOY201 capsid. In some embodiments, the AAV particle comprises a viral genome comprising SEQ ID NO: 2004 and an AAV9 capsid. In some embodiments, the AAV particle comprises a viral genome comprising SEQ ID NO: 2004 and an AAV9K449R capsid. In some embodiments, the AAV particle comprises a viral genome comprising SEQ ID NO: 2004 and an AAVPHP.B capsid. In some embodiments, the AAV particle comprises a viral genome comprising SEQ ID NO: 2004 and an AAVPHP.N capsid. In some embodiments, the AAV particle comprises a viral genome comprising SEQ ID NO: 2004 and an AAV2 variant capsid. In some embodiments, the AAV particle comprises a viral genome comprising SEQ ID NO: 2004 and an AAV2/3 variant capsid. In some embodiments, the AAV particle comprises a viral genome comprising SEQ ID NO: 2004 and a capsid comprising SEQ ID NO: 1. In some embodiments, the AAV particle comprises a viral genome comprising SEQ ID NO: 2004 and a capsid encoded by a nucleic acid sequence comprising SEQ ID NO: 2. In some embodiments, the AAV particle comprises a viral genome comprising SEQ ID NO: 2004 and a capsid comprising SEQ ID NO: 4534. In some embodiments, the AAV particle comprises a viral genome comprising SEQ ID NO: 2004 and a capsid encoded by a nucleic acid sequence comprising SEQ ID NO: 3. In some embodiments, the AAV particle comprises a viral genome comprising SEQ ID NO: 2004 and a capsid comprising SEQ ID NO: 138. In some embodiments, the AAV particle comprises a viral genome comprising SEQ ID NO: 2004 and a capsid encoded by a nucleic acid sequence comprising SEQ ID NO: 137. In some embodiments, the AAV particle comprises a viral genome comprising SEQ ID NO: 2004 and a capsid comprising SEQ ID NO: 5. In some embodiments, the AAV particle comprises a viral genome comprising SEQ ID NO: 2004 and a capsid encoded by a nucleic acid sequence comprising SEQ ID NO: 6. In some embodiments, the AAV particle comprises a viral genome comprising SEQ ID NO: 2004 and a capsid comprising SEQ ID NO: 4. In some embodiments, the AAV particle comprises a viral genome comprising SEQ ID NO: 2004 and a capsid comprising SEQ ID NO: 11. In some embodiments, the AAV particle comprises a viral genome comprising SEQ ID NO: 2004 and a capsid comprising SEQ ID NO: 2679. In some embodiments, the AAV particle comprises a viral genome comprising SEQ ID NO: 2004 and a capsid comprising SEQ ID NO: 2809. In some embodiments, the AAV particle comprises a viral genome comprising SEQ ID NO: 2004 and a capsid comprising SEQ ID NO: 2871.

[0764] In some embodiments, the AAV particle comprises a viral genome comprising SEQ ID NO: 2005 and a VOY101 capsid. In some embodiments, the AAV particle comprises a viral genome comprising SEQ ID NO: 2005 and a VOY201 capsid. In some embodiments, the AAV particle comprises a viral genome comprising SEQ ID NO: 2005 and an AAV9 capsid. In some embodiments, the AAV particle comprises a viral genome comprising SEQ ID NO: 2005 and an AAV9K449R capsid. In some embodiments, the AAV particle comprises a viral genome comprising SEQ ID NO: 2005 and an AAVPHP.B capsid. In some embodiments, the AAV particle comprises a viral genome comprising SEQ ID NO: 2005 and an AAVPHP.N capsid. In some embodiments, the AAV particle comprises a viral genome comprising SEQ ID NO: 2005 and an AAV2 variant capsid. In some embodiments, the AAV particle comprises a viral genome comprising SEQ ID NO: 2005 and an AAV2/3 variant capsid. In some embodiments, the AAV particle comprises a viral genome comprising SEQ ID NO: 2005 and a capsid comprising SEQ ID NO: 1. In some embodiments, the AAV particle comprises a viral genome comprising SEQ ID NO: 2005 and a capsid encoded by a nucleic acid sequence comprising SEQ ID NO: 2. In some embodiments, the AAV particle comprises a viral genome comprising SEQ ID NO: 2005 and a capsid comprising SEQ ID NO: 4534. In some embodiments, the AAV particle comprises a viral genome comprising SEQ ID NO: 2005 and a capsid encoded by a nucleic acid sequence comprising SEQ ID NO: 3. In some embodiments, the AAV particle comprises a viral genome comprising SEQ ID NO: 2005 and a capsid comprising SEQ ID NO: 138. In some embodiments, the AAV particle comprises a viral genome comprising SEQ ID NO: 2005 and a capsid encoded by a nucleic acid sequence comprising SEQ ID NO: 137. In some embodiments, the AAV particle comprises a viral genome comprising SEQ ID NO: 2005 and a capsid comprising SEQ ID NO: 5. In some embodiments, the AAV particle comprises a viral genome comprising SEQ ID NO: 2005 and a capsid encoded by a nucleic acid sequence comprising SEQ ID NO: 6. In some embodiments, the AAV particle comprises a viral genome comprising SEQ ID NO: 2005 and a capsid comprising SEQ ID NO: 4. In some embodiments, the AAV particle comprises a viral genome comprising SEQ ID NO: 2005 and a capsid comprising SEQ ID NO: 11. In some embodiments, the AAV particle comprises a viral genome comprising SEQ ID NO: 2005 and a capsid comprising SEQ ID NO: 2679. In some embodiments, the AAV particle comprises a viral genome comprising SEQ ID NO: 2005 and a capsid comprising SEQ ID NO: 2809. In some embodiments, the AAV particle comprises a viral genome comprising SEQ ID NO: 2005 and a capsid comprising SEQ ID NO: 2871.

[0765] In some embodiments, the AAV particle comprises a viral genome comprising SEQ ID NO: 2006 and a VOY101 capsid. In some embodiments, the AAV particle comprises a viral genome comprising SEQ ID NO: 2006 and a VOY201 capsid. In some embodiments, the AAV particle comprises a viral genome comprising SEQ ID NO: 2006 and an AAV9 capsid. In some embodiments, the AAV particle comprises a viral genome comprising SEQ ID NO: 2006 and an AAV9K449R capsid. In some embodiments, the AAV particle comprises a viral genome comprising SEQ ID NO: 2006 and an AAVPHP.B capsid. In some embodiments, the AAV particle comprises a viral genome comprising SEQ ID NO: 2006 and an AAVPHP.N capsid. In some embodiments, the AAV particle comprises a viral genome comprising SEQ ID NO: 2006 and an AAV2 variant capsid. In some embodiments, the AAV particle comprises a viral genome comprising SEQ ID NO: 2006 and an AAV2/3 variant capsid. In some embodiments, the AAV particle comprises a viral genome comprising SEQ ID NO: 2006 and a capsid comprising SEQ ID NO: 1. In some embodiments, the AAV particle comprises a viral genome comprising SEQ ID NO: 2006 and a capsid encoded by a nucleic acid sequence comprising SEQ ID NO: 2. In some embodiments, the AAV particle comprises a viral genome comprising SEQ ID NO: 2006 and a capsid comprising SEQ ID NO: 4534. In some embodiments, the AAV particle comprises a viral genome comprising SEQ ID NO: 2006 and a capsid encoded by a nucleic acid sequence comprising SEQ ID NO: 3. In some embodiments, the AAV particle comprises a viral genome comprising SEQ ID NO: 2006 and a capsid comprising SEQ ID NO: 138. In some embodiments, the AAV particle comprises a viral genome comprising SEQ ID NO: 2006 and a capsid encoded by a nucleic acid sequence comprising SEQ ID NO: 137. In some embodiments, the AAV particle comprises a viral genome comprising SEQ ID NO: 2006 and a capsid comprising SEQ ID NO: 5. In some embodiments, the AAV particle comprises a viral genome comprising SEQ ID NO: 2006 and a capsid encoded by a nucleic acid sequence comprising SEQ ID NO: 6. In some embodiments, the AAV particle comprises a viral genome comprising SEQ ID NO: 2006 and a capsid comprising SEQ ID NO: 4. In some embodiments, the AAV particle comprises a viral genome comprising SEQ ID NO: 2006 and a capsid comprising SEQ ID NO: 11. In some embodiments, the AAV particle comprises a viral genome comprising SEQ ID NO: 2006 and a capsid comprising SEQ ID NO: 2679. In some embodiments, the AAV particle comprises a viral genome comprising SEQ ID NO: 2006 and a capsid comprising SEQ ID NO: 2809. In some embodiments, the AAV particle comprises a viral genome comprising SEQ ID NO: 2006 and a capsid comprising SEQ ID NO: 2871.

[0766] In some embodiments, the AAV particle comprises a viral genome comprising SEQ ID NO: 2007 and a VOY101 capsid. In some embodiments, the AAV particle comprises a viral genome comprising SEQ ID NO: 2007 and a VOY201 capsid. In some embodiments, the AAV particle comprises a viral genome comprising SEQ ID NO: 2007 and an AAV9 capsid. In some embodiments, the AAV particle comprises a viral genome comprising SEQ ID NO: 2007 and an AAV9K449R capsid. In some embodiments, the AAV particle comprises a viral genome comprising SEQ ID NO: 2007 and an AAVPHP.B capsid. In some embodiments, the AAV particle comprises a viral genome comprising SEQ ID NO: 2007 and an AAVPHP.N capsid. In some embodiments, the AAV particle comprises a viral genome comprising SEQ ID NO: 2007 and an AAV2 variant capsid. In some embodiments, the AAV particle comprises a viral genome comprising SEQ ID NO: 2007 and an AAV2/3 variant capsid. In some embodiments, the AAV particle comprises a viral genome comprising SEQ ID NO: 2007 and a capsid comprising SEQ ID NO: 1. In some embodiments, the AAV particle comprises a viral genome comprising SEQ ID NO: 2007 and a capsid encoded by a nucleic acid sequence comprising SEQ ID NO: 2. In some embodiments, the AAV particle comprises a viral genome comprising SEQ ID NO: 2007 and a capsid comprising SEQ ID NO: 4534. In some embodiments, the AAV particle comprises a viral genome comprising SEQ ID NO: 2007 and a capsid encoded by a nucleic acid sequence comprising SEQ ID NO: 3. In some embodiments, the AAV particle comprises a viral genome comprising SEQ ID NO: 2007 and a capsid comprising SEQ ID NO: 138. In some embodiments, the AAV particle comprises a viral genome comprising SEQ ID NO: 2007 and a capsid encoded by a nucleic acid sequence comprising SEQ ID NO: 137. In some embodiments, the AAV particle comprises a viral genome comprising SEQ ID NO: 2007 and a capsid comprising SEQ ID NO: 5. In some embodiments, the AAV particle comprises a viral genome comprising SEQ ID NO: 2007 and a capsid encoded by a nucleic acid sequence comprising SEQ ID NO: 6. In some embodiments, the AAV particle comprises a viral genome comprising SEQ ID NO: 2007 and a capsid comprising SEQ ID NO: 4. In some embodiments, the AAV particle comprises a viral genome comprising SEQ ID NO: 2007 and a capsid comprising SEQ ID NO: 11. In some embodiments, the AAV particle comprises a viral genome comprising SEQ ID NO: 2007 and a capsid comprising SEQ ID NO: 2679. In some embodiments, the AAV particle comprises a viral genome comprising SEQ ID NO: 2007 and a capsid comprising SEQ ID NO: 2809. In some embodiments, the AAV particle comprises a viral genome comprising SEQ ID NO: 2007 and a capsid comprising SEQ ID NO: 2871.

[0767] In some embodiments, the AAV particle comprises a viral genome comprising SEQ ID NO: 2008 and a VOY101 capsid. In some embodiments, the AAV particle comprises a viral genome comprising SEQ ID NO: 2008 and a VOY201 capsid. In some embodiments, the AAV particle comprises a viral genome comprising SEQ ID NO: 2008 and an AAV9 capsid. In some embodiments, the AAV particle comprises a viral genome comprising SEQ ID NO: 2008 and an AAV9K449R capsid. In some embodiments, the AAV particle comprises a viral genome comprising SEQ ID NO: 2008 and an AAVPHP.B capsid. In some embodiments, the AAV particle comprises a viral genome comprising SEQ ID NO: 2008 and an AAVPHP.N capsid. In some embodiments, the AAV particle comprises a viral genome comprising SEQ ID NO: 2008 and an AAV2 variant capsid. In some embodiments, the AAV particle comprises a viral genome comprising SEQ ID NO: 2008 and an AAV2/3 variant capsid. In some embodiments, the AAV particle comprises a viral genome comprising SEQ ID NO: 2008 and a capsid comprising SEQ ID NO: 1. In some embodiments, the AAV particle comprises a viral genome comprising SEQ ID NO: 2008 and a capsid encoded by a nucleic acid sequence comprising SEQ ID NO: 2. In some embodiments, the AAV particle comprises a viral genome comprising SEQ ID NO: 2008 and a capsid comprising SEQ ID NO: 4534. In some embodiments, the AAV particle comprises a viral genome comprising SEQ ID NO: 2008 and a capsid encoded by a nucleic acid sequence comprising SEQ ID NO: 3. In some embodiments, the AAV particle comprises a viral genome comprising SEQ ID NO: 2008 and a capsid comprising SEQ ID NO: 138. In some embodiments, the AAV particle comprises a viral genome comprising SEQ ID NO: 2008 and a capsid encoded by a nucleic acid sequence comprising SEQ ID NO: 137. In some embodiments, the AAV particle comprises a viral genome comprising SEQ ID NO: 2008 and a capsid comprising SEQ ID NO: 5. In some embodiments, the AAV particle comprises a viral genome comprising SEQ ID NO: 2008 and a capsid encoded by a nucleic acid sequence comprising SEQ ID NO: 6. In some embodiments, the AAV particle comprises a viral genome comprising SEQ ID NO: 2008 and a capsid comprising SEQ ID NO: 4. In some embodiments, the AAV particle comprises a viral genome comprising SEQ ID NO: 2008 and a capsid comprising SEQ ID NO: 11. In some embodiments, the AAV particle comprises a viral genome comprising SEQ ID NO: 2008 and a capsid comprising SEQ ID NO: 2679. In some embodiments, the AAV particle comprises a viral genome comprising SEQ ID NO: 2008 and a capsid comprising SEQ ID NO: 2809. In some embodiments, the AAV particle comprises a viral genome comprising SEQ ID NO: 2008 and a capsid comprising SEQ ID NO: 2871.

[0768] In some embodiments, the AAV particle comprises a viral genome comprising SEQ ID NO: 2009 and a VOY101 capsid. In some embodiments, the AAV particle comprises a viral genome comprising SEQ ID NO: 2009 and a VOY201 capsid. In some embodiments, the AAV particle comprises a viral genome comprising SEQ ID NO: 2009 and an AAV9 capsid. In some embodiments, the AAV particle comprises a viral genome comprising SEQ ID NO: 2009 and an AAV9K449R capsid. In some embodiments, the AAV particle comprises a viral genome comprising SEQ ID NO: 2009 and an AAVPHP.B capsid. In some embodiments, the AAV particle comprises a viral genome comprising SEQ ID NO: 2009 and an AAVPHP.N capsid. In some embodiments, the AAV particle comprises a viral genome comprising SEQ ID NO: 2009 and an AAV2 variant capsid. In some embodiments, the AAV particle comprises a viral genome comprising SEQ ID NO: 2009 and an AAV2/3 variant capsid. In some embodiments, the AAV particle comprises a viral genome comprising SEQ ID NO: 2009 and a capsid comprising SEQ ID NO: 1. In some embodiments, the AAV particle comprises a viral genome comprising SEQ ID NO: 2009 and a capsid encoded by a nucleic acid sequence comprising SEQ ID NO: 2. In some embodiments, the AAV particle comprises a viral genome comprising SEQ ID NO: 2009 and a capsid comprising SEQ ID NO: 4534. In some embodiments, the AAV particle comprises a viral genome comprising SEQ ID NO: 2009 and a capsid encoded by a nucleic acid sequence comprising SEQ ID NO: 3. In some embodiments, the AAV particle comprises a viral genome comprising SEQ ID NO: 2009 and a capsid comprising SEQ ID NO: 138. In some embodiments, the AAV particle comprises a viral genome comprising SEQ ID NO: 2009 and a capsid encoded by a nucleic acid sequence comprising SEQ ID NO: 137. In some embodiments, the AAV particle comprises a viral genome comprising SEQ ID NO: 2009 and a capsid comprising SEQ ID NO: 5. In some embodiments, the AAV particle comprises a viral genome comprising SEQ ID NO: 2009 and a capsid encoded by a nucleic acid sequence comprising SEQ ID NO: 6. In some embodiments, the AAV particle comprises a viral genome comprising SEQ ID NO: 2009 and a capsid comprising SEQ ID NO: 4. In some embodiments, the AAV particle comprises a viral genome comprising SEQ ID NO: 2009 and a capsid comprising SEQ ID NO: 11. In some embodiments, the AAV particle comprises a viral genome comprising SEQ ID NO: 2009 and a capsid comprising SEQ ID NO: 2679. In some embodiments, the AAV particle comprises a viral genome comprising SEQ ID NO: 2009 and a capsid comprising SEQ ID NO: 2809. In some embodiments, the AAV particle comprises a viral genome comprising SEQ ID NO: 2009 and a capsid comprising SEQ ID NO: 2871.

[0769] In some embodiments, the AAV particle comprises a viral genome comprising SEQ ID NO: 2010 and a VOY101 capsid. In some embodiments, the AAV particle comprises a viral genome comprising SEQ ID NO: 2010 and a VOY201 capsid. In some embodiments, the AAV particle comprises a viral genome comprising SEQ ID NO: 2010 and an AAV9 capsid. In some embodiments, the AAV particle comprises a viral genome comprising SEQ ID NO: 2010 and an AAV9K449R capsid. In some embodiments, the AAV particle comprises a viral genome comprising SEQ ID NO: 2010 and an AAVPHP.B capsid. In some embodiments, the AAV particle comprises a viral genome comprising SEQ ID NO: 2010 and an AAVPHP.N capsid. In some embodiments, the AAV particle comprises a viral genome comprising SEQ ID NO: 2010 and an AAV2 variant capsid. In some embodiments, the AAV particle comprises a viral genome comprising SEQ ID NO: 2010 and an AAV2/3 variant capsid. In some embodiments, the AAV particle comprises a viral genome comprising SEQ ID NO: 2010 and a capsid comprising SEQ ID NO: 1. In some embodiments, the AAV particle comprises a viral genome comprising SEQ ID NO: 2010 and a capsid encoded by a nucleic acid sequence comprising SEQ ID NO: 2. In some embodiments, the AAV particle comprises a viral genome comprising SEQ ID NO: 2010 and a capsid comprising SEQ ID NO: 4534. In some embodiments, the AAV particle comprises a viral genome comprising SEQ ID NO: 2010 and a capsid encoded by a nucleic acid sequence comprising SEQ ID NO: 3. In some embodiments, the AAV particle comprises a viral genome comprising SEQ ID NO: 2010 and a capsid comprising SEQ ID NO: 138. In some embodiments, the AAV particle comprises a viral genome comprising SEQ ID NO: 2010 and a capsid encoded by a nucleic acid sequence comprising SEQ ID NO: 137. In some embodiments, the AAV particle comprises a viral genome comprising SEQ ID NO: 2010 and a capsid comprising SEQ ID NO: 5. In some embodiments, the AAV particle comprises a viral genome comprising SEQ ID NO: 2010 and a capsid encoded by a nucleic acid sequence comprising SEQ ID NO: 6. In some embodiments, the AAV particle comprises a viral genome comprising SEQ ID NO: 2010 and a capsid comprising SEQ ID NO: 4. In some embodiments, the AAV particle comprises a viral genome comprising SEQ ID NO: 2010 and a capsid comprising SEQ ID NO: 11. In some embodiments, the AAV particle comprises a viral genome comprising SEQ ID NO: 2010 and a capsid comprising SEQ ID NO: 2679. In some embodiments, the AAV particle comprises a viral genome comprising SEQ ID NO: 2010 and a capsid comprising SEQ ID NO: 2809. In some embodiments, the AAV particle comprises a viral genome comprising SEQ ID NO: 2010 and a capsid comprising SEQ ID NO: 2871.

[0770] In some embodiments, the AAV particle comprises a viral genome comprising SEQ ID NO: 2011 and a VOY101 capsid. In some embodiments, the AAV particle comprises a viral genome comprising SEQ ID NO: 2011 and a VOY201 capsid. In some embodiments, the AAV particle comprises a viral genome comprising SEQ ID NO: 2011 and an AAV9 capsid. In some embodiments, the AAV particle comprises a viral genome comprising SEQ ID NO: 2011 and an AAV9K449R capsid. In some embodiments, the AAV particle comprises a viral genome comprising SEQ ID NO: 2011 and an AAVPHP.B capsid. In some embodiments, the AAV particle comprises a viral genome comprising SEQ ID NO: 2011 and an AAVPHP.N capsid. In some embodiments, the AAV particle comprises a viral genome comprising SEQ ID NO: 2011 and an AAV2 variant capsid. In some embodiments, the AAV particle comprises a viral genome comprising SEQ ID NO: 2011 and an AAV2/3 variant capsid. In some embodiments, the AAV particle comprises a viral genome comprising SEQ ID NO: 2011 and a capsid comprising SEQ ID NO: 1. In some embodiments, the AAV particle comprises a viral genome comprising SEQ ID NO: 2011 and a capsid encoded by a nucleic acid sequence comprising SEQ ID NO: 2. In some embodiments, the AAV particle comprises a viral genome comprising SEQ ID NO: 2011 and a capsid comprising SEQ ID NO: 4534. In some embodiments, the AAV particle comprises a viral genome comprising SEQ ID NO: 2011 and a capsid encoded by a nucleic acid sequence comprising SEQ ID NO: 3. In some embodiments, the AAV particle comprises a viral genome comprising SEQ ID NO: 2011 and a capsid comprising SEQ ID NO: 138. In some embodiments, the AAV particle comprises a viral genome comprising SEQ ID NO: 2011 and a capsid encoded by a nucleic acid sequence comprising SEQ ID NO: 137. In some embodiments, the AAV particle comprises a viral genome comprising SEQ ID NO: 2011 and a capsid comprising SEQ ID NO: 5. In some embodiments, the AAV particle comprises a viral genome comprising SEQ ID NO: 2011 and a capsid encoded by a nucleic acid sequence comprising SEQ ID NO: 6. In some embodiments, the AAV particle comprises a viral genome comprising SEQ ID NO: 2011 and a capsid comprising SEQ ID NO: 4. In some embodiments, the AAV particle comprises a viral genome comprising SEQ ID NO: 2011 and a capsid comprising SEQ ID NO: 11. In some embodiments, the AAV particle comprises a viral genome comprising SEQ ID NO: 2011 and a capsid comprising SEQ ID NO: 2679. In some embodiments, the AAV particle comprises a viral genome comprising SEQ ID NO: 2011 and a capsid comprising SEQ ID NO: 2809. In some embodiments, the AAV particle comprises a viral genome comprising SEQ ID NO: 2011 and a capsid comprising SEQ ID NO: 2871.

[0771] In some embodiments, the AAV particle comprises a viral genome comprising SEQ ID NO: 2012 and a VOY101 capsid. In some embodiments, the AAV particle comprises a viral genome comprising SEQ ID NO: 2012 and a VOY201 capsid. In some embodiments, the AAV particle comprises a viral genome comprising SEQ ID NO: 2012 and an AAV9 capsid. In some embodiments, the AAV particle comprises a viral genome comprising SEQ ID NO: 2012 and an AAV9K449R capsid. In some embodiments, the AAV particle comprises a viral genome comprising SEQ ID NO: 2012 and an AAVPHP.B capsid. In some embodiments, the AAV particle comprises a viral genome comprising SEQ ID NO: 2012 and an AAVPHP.N capsid. In some embodiments, the AAV particle comprises a viral genome comprising SEQ ID NO: 2012 and an AAV2 variant capsid. In some embodiments, the AAV particle comprises a viral genome comprising SEQ ID NO: 2012 and an AAV2/3 variant capsid. In some embodiments, the AAV particle comprises a viral genome comprising SEQ ID NO: 2012 and a capsid comprising SEQ ID NO: 1. In some embodiments, the AAV particle comprises a viral genome comprising SEQ ID NO: 2012 and a capsid encoded by a nucleic acid sequence comprising SEQ ID NO: 2. In some embodiments, the AAV particle comprises a viral genome comprising SEQ ID NO: 2012 and a capsid comprising SEQ ID NO: 4534. In some embodiments, the AAV particle comprises a viral genome comprising SEQ ID NO: 2012 and a capsid encoded by a nucleic acid sequence comprising SEQ ID NO: 3. In some embodiments, the AAV particle comprises a viral genome comprising SEQ ID NO: 2012 and a capsid comprising SEQ ID NO: 138. In some embodiments, the AAV particle comprises a viral genome comprising SEQ ID NO: 2012 and a capsid encoded by a nucleic acid sequence comprising SEQ ID NO: 137. In some embodiments, the AAV particle comprises a viral genome comprising SEQ ID NO: 2012 and a capsid comprising SEQ ID NO: 5. In some embodiments, the AAV particle comprises a viral genome comprising SEQ ID NO: 2012 and a capsid encoded by a nucleic acid sequence comprising SEQ ID NO: 6. In some embodiments, the AAV particle comprises a viral genome comprising SEQ ID NO: 2012 and a capsid comprising SEQ ID NO: 4. In some embodiments, the AAV particle comprises a viral genome comprising SEQ ID NO: 2012 and a capsid comprising SEQ ID NO: 11. In some embodiments, the AAV particle comprises a viral genome comprising SEQ ID NO: 2012 and a capsid comprising SEQ ID NO: 2679. In some embodiments, the AAV particle comprises a viral genome comprising SEQ ID NO: 2012 and a capsid comprising SEQ ID NO: 2809. In some embodiments, the AAV particle comprises a viral genome comprising SEQ ID NO: 2012 and a capsid comprising SEQ ID NO: 2871.

[0772] In some embodiments, the AAV particle comprises a viral genome comprising SEQ ID NO: 2013 and a VOY101 capsid. In some embodiments, the AAV particle comprises a viral genome comprising SEQ ID NO: 2013 and a VOY201 capsid. In some embodiments, the AAV particle comprises a viral genome comprising SEQ ID NO: 2013 and an AAV9 capsid. In some embodiments, the AAV particle comprises a viral genome comprising SEQ ID NO: 2013 and an AAV9K449R capsid. In some embodiments, the AAV particle comprises a viral genome comprising SEQ ID NO: 2013 and an AAVPHP.B capsid. In some embodiments, the AAV particle comprises a viral genome comprising SEQ ID NO: 2013 and an AAVPHP.N capsid. In some embodiments, the AAV particle comprises a viral genome comprising SEQ ID NO: 2013 and an AAV2 variant capsid. In some embodiments, the AAV particle comprises a viral genome comprising SEQ ID NO: 2013 and an AAV2/3 variant capsid. In some embodiments, the AAV particle comprises a viral genome comprising SEQ ID NO: 2013 and a capsid comprising SEQ ID NO: 1. In some embodiments, the AAV particle comprises a viral genome comprising SEQ ID NO: 2013 and a capsid encoded by a nucleic acid sequence comprising SEQ ID NO: 2. In some embodiments, the AAV particle comprises a viral genome comprising SEQ ID NO: 2013 and a capsid comprising SEQ ID NO: 4534. In some embodiments, the AAV particle comprises a viral genome comprising SEQ ID NO: 2013 and a capsid encoded by a nucleic acid sequence comprising SEQ ID NO: 3. In some embodiments, the AAV particle comprises a viral genome comprising SEQ ID NO: 2013 and a capsid comprising SEQ ID NO: 138. In some embodiments, the AAV particle comprises a viral genome comprising SEQ ID NO: 2013 and a capsid encoded by a nucleic acid sequence comprising SEQ ID NO: 137. In some embodiments, the AAV particle comprises a viral genome comprising SEQ ID NO: 2013 and a capsid comprising SEQ ID NO: 5. In some embodiments, the AAV particle comprises a viral genome comprising SEQ ID NO: 2013 and a capsid encoded by a nucleic acid sequence comprising SEQ ID NO: 6. In some embodiments, the AAV particle comprises a viral genome comprising SEQ ID NO: 2013 and a capsid comprising SEQ ID NO: 4. In some embodiments, the AAV particle comprises a viral genome comprising SEQ ID NO: 2013 and a capsid comprising SEQ ID NO: 11. In some embodiments, the AAV particle comprises a viral genome comprising SEQ ID NO: 2013 and a capsid comprising SEQ ID NO: 2679. In some embodiments, the AAV particle comprises a viral genome comprising SEQ ID NO: 2013 and a capsid comprising SEQ ID NO: 2809. In some embodiments, the AAV particle comprises a viral genome comprising SEQ ID NO: 2013 and a capsid comprising SEQ ID NO: 2871.

[0773] In some embodiments, the AAV particle comprises a viral genome comprising SEQ ID NO: 2014 and a VOY101 capsid. In some embodiments, the AAV particle comprises a viral genome comprising SEQ ID NO: 2014 and a VOY201 capsid. In some embodiments, the AAV particle comprises a viral genome comprising SEQ ID NO: 2014 and an AAV9 capsid. In some embodiments, the AAV particle comprises a viral genome comprising SEQ ID NO: 2014 and an AAV9K449R capsid. In some embodiments, the AAV particle comprises a viral genome comprising SEQ ID NO: 2014 and an AAVPHP.B capsid. In some embodiments, the AAV particle comprises a viral genome comprising SEQ ID NO: 2014 and an AAVPHP.N capsid. In some embodiments, the AAV particle comprises a viral genome comprising SEQ ID NO: 2014 and an AAV2 variant capsid. In some embodiments, the AAV particle comprises a viral genome comprising SEQ ID NO: 2014 and an AAV2/3 variant capsid. In some embodiments, the AAV particle comprises a viral genome comprising SEQ ID NO: 2014 and a capsid comprising SEQ ID NO: 1. In some embodiments, the AAV particle comprises a viral genome comprising SEQ ID NO: 2014 and a capsid encoded by a nucleic acid sequence comprising SEQ ID NO: 2. In some embodiments, the AAV particle comprises a viral genome comprising SEQ ID NO: 2014 and a capsid comprising SEQ ID NO: 4534. In some embodiments, the AAV particle comprises a viral genome comprising SEQ ID NO: 2014 and a capsid encoded by a nucleic acid sequence comprising SEQ ID NO: 3. In some embodiments, the AAV particle comprises a viral genome comprising SEQ ID NO: 2014 and a capsid comprising SEQ ID NO: 138. In some embodiments, the AAV particle comprises a viral genome comprising SEQ ID NO: 2014 and a capsid encoded by a nucleic acid sequence comprising SEQ ID NO: 137. In some embodiments, the AAV particle comprises a viral genome comprising SEQ ID NO: 2014 and a capsid comprising SEQ ID NO: 5. In some embodiments, the AAV particle comprises a viral genome comprising SEQ ID NO: 2014 and a capsid encoded by a nucleic acid sequence comprising SEQ ID NO: 6. In some embodiments, the AAV particle comprises a viral genome comprising SEQ ID NO: 2014 and a capsid comprising SEQ ID NO: 4. In some embodiments, the AAV particle comprises a viral genome comprising SEQ ID NO: 2014 and a capsid comprising SEQ ID NO: 11. In some embodiments, the AAV particle comprises a viral genome comprising SEQ ID NO: 2014 and a capsid comprising SEQ ID NO: 2679. In some embodiments, the AAV particle comprises a viral genome comprising SEQ ID NO: 2014 and a capsid comprising SEQ ID NO: 2809. In some embodiments, the AAV particle comprises a viral genome comprising SEQ ID NO: 2014 and a capsid comprising SEQ ID NO: 2871.

[0774] In some embodiments, the AAV particle comprises a viral genome comprising SEQ ID NO: 2015 and a VOY101 capsid. In some embodiments, the AAV particle comprises a viral genome comprising SEQ ID NO: 2015 and a VOY201 capsid. In some embodiments, the AAV particle comprises a viral genome comprising SEQ ID NO: 2015 and an AAV9 capsid. In some embodiments, the AAV particle comprises a viral genome comprising SEQ ID NO: 2015 and an AAV9K449R capsid. In some embodiments, the AAV particle comprises a viral genome comprising SEQ ID NO: 2015 and an AAVPHP.B capsid. In some embodiments, the AAV particle comprises a viral genome comprising SEQ ID NO: 2015 and an AAVPHP.N capsid. In some embodiments, the AAV particle comprises a viral genome comprising SEQ ID NO: 2015 and an AAV2 variant capsid. In some embodiments, the AAV particle comprises a viral genome comprising SEQ ID NO: 2015 and an AAV2/3 variant capsid. In some embodiments, the AAV particle comprises a viral genome comprising SEQ ID NO: 2015 and a capsid comprising SEQ ID NO: 1. In some embodiments, the AAV particle comprises a viral genome comprising SEQ ID NO: 2015 and a capsid encoded by a nucleic acid sequence comprising SEQ ID NO: 2. In some embodiments, the AAV particle comprises a viral genome comprising SEQ ID NO: 2015 and a capsid comprising SEQ ID NO: 4534. In some embodiments, the AAV particle comprises a viral genome comprising SEQ ID NO: 2015 and a capsid encoded by a nucleic acid sequence comprising SEQ ID NO: 3. In some embodiments, the AAV particle comprises a viral genome comprising SEQ ID NO: 2015 and a capsid comprising SEQ ID NO: 138. In some embodiments, the AAV particle comprises a viral genome comprising SEQ ID NO: 2015 and a capsid encoded by a nucleic acid sequence comprising SEQ ID NO: 137. In some embodiments, the AAV particle comprises a viral genome comprising SEQ ID NO: 2015 and a capsid comprising SEQ ID NO: 5. In some embodiments, the AAV particle comprises a viral genome comprising SEQ ID NO: 2015 and a capsid encoded by a nucleic acid sequence comprising SEQ ID NO: 6. In some embodiments, the AAV particle comprises a viral genome comprising SEQ ID NO: 2015 and a capsid comprising SEQ ID NO: 4. In some embodiments, the AAV particle comprises a viral genome comprising SEQ ID NO: 2015 and a capsid comprising SEQ ID NO: 11. In some embodiments, the AAV particle comprises a viral genome comprising SEQ ID NO: 2015 and a capsid comprising SEQ ID NO: 2679. In some embodiments, the AAV particle comprises a viral genome comprising SEQ ID NO: 2015 and a capsid comprising SEQ ID NO: 2809. In some embodiments, the AAV particle comprises a viral genome comprising SEQ ID NO: 2015 and a capsid comprising SEQ ID NO: 2871.

[0775] In some embodiments, the AAV particle comprises a viral genome comprising SEQ ID NO: 2016 and a VOY101 capsid. In some embodiments, the AAV particle comprises a viral genome comprising SEQ ID NO: 2016 and a VOY201 capsid. In some embodiments, the AAV particle comprises a viral genome comprising SEQ ID NO: 2016 and an AAV9 capsid. In some embodiments, the AAV particle comprises a viral genome comprising SEQ ID NO: 2016 and an AAV9K449R capsid. In some embodiments, the AAV particle comprises a viral genome comprising SEQ ID NO: 2016 and an AAVPHP.B capsid. In some embodiments, the AAV particle comprises a viral genome comprising SEQ ID NO: 2016 and an AAVPHP.N capsid. In some embodiments, the AAV particle comprises a viral genome comprising SEQ ID NO: 2016 and an AAV2 variant capsid. In some embodiments, the AAV particle comprises a viral genome comprising SEQ ID NO: 2016 and an AAV2/3 variant capsid. In some embodiments, the AAV particle comprises a viral genome comprising SEQ ID NO: 2016 and a capsid comprising SEQ ID NO: 1. In some embodiments, the AAV particle comprises a viral genome comprising SEQ ID NO: 2016 and a capsid encoded by a nucleic acid sequence comprising SEQ ID NO: 2. In some embodiments, the AAV particle comprises a viral genome comprising SEQ ID NO: 2016 and a capsid comprising SEQ ID NO: 4534. In some embodiments, the AAV particle comprises a viral genome comprising SEQ ID NO: 2016 and a capsid encoded by a nucleic acid sequence comprising SEQ ID NO: 3. In some embodiments, the AAV particle comprises a viral genome comprising SEQ ID NO: 2016 and a capsid comprising SEQ ID NO: 138. In some embodiments, the AAV particle comprises a viral genome comprising SEQ ID NO: 2016 and a capsid encoded by a nucleic acid sequence comprising SEQ ID NO: 137. In some embodiments, the AAV particle comprises a viral genome comprising SEQ ID NO: 2016 and a capsid comprising SEQ ID NO: 5. In some embodiments, the AAV particle comprises a viral genome comprising SEQ ID NO: 2016 and a capsid encoded by a nucleic acid sequence comprising SEQ ID NO: 6. In some embodiments, the AAV particle comprises a viral genome comprising SEQ ID NO: 2016 and a capsid comprising SEQ ID NO: 4. In some embodiments, the AAV particle comprises a viral genome comprising SEQ ID NO: 2016 and a capsid comprising SEQ ID NO: 11. In some embodiments, the AAV particle comprises a viral genome comprising SEQ ID NO: 2016 and a capsid comprising SEQ ID NO: 2679. In some embodiments, the AAV particle comprises a viral genome comprising SEQ ID NO: 2016 and a capsid comprising SEQ ID NO: 2809. In some embodiments, the AAV particle comprises a viral genome comprising SEQ ID NO: 2016 and a capsid comprising SEQ ID NO: 2871.

[0776] In some embodiments, the AAV particle comprises a viral genome comprising SEQ ID NO: 2017 and a VOY101 capsid. In some embodiments, the AAV particle comprises a viral genome comprising SEQ ID NO: 2017 and a VOY201 capsid. In some embodiments, the AAV particle comprises a viral genome comprising SEQ ID NO: 2017 and an AAV9 capsid. In some embodiments, the AAV particle comprises a viral genome comprising SEQ ID NO: 2017 and an AAV9K449R capsid. In some embodiments, the AAV particle comprises a viral genome comprising SEQ ID NO: 2017 and an AAVPHP.B capsid. In some embodiments, the AAV particle comprises a viral genome comprising SEQ ID NO: 2017 and an AAVPHP.N capsid. In some embodiments, the AAV particle comprises a viral genome comprising SEQ ID NO: 2017 and an AAV2 variant capsid. In some embodiments, the AAV particle comprises a viral genome comprising SEQ ID NO: 2017 and an AAV2/3 variant capsid. In some embodiments, the AAV particle comprises a viral genome comprising SEQ ID NO: 2017 and a capsid comprising SEQ ID NO: 1. In some embodiments, the AAV particle comprises a viral genome comprising SEQ ID NO: 2017 and a capsid encoded by a nucleic acid sequence comprising SEQ ID NO: 2. In some embodiments, the AAV particle comprises a viral genome comprising SEQ ID NO: 2017 and a capsid comprising SEQ ID NO: 4534. In some embodiments, the AAV particle comprises a viral genome comprising SEQ ID NO: 2017 and a capsid encoded by a nucleic acid sequence comprising SEQ ID NO: 3. In some embodiments, the AAV particle comprises a viral genome comprising SEQ ID NO: 2017 and a capsid comprising SEQ ID NO: 138. In some embodiments, the AAV particle comprises a viral genome comprising SEQ ID NO: 2017 and a capsid encoded by a nucleic acid sequence comprising SEQ ID NO: 137. In some embodiments, the AAV particle comprises a viral genome comprising SEQ ID NO: 2017 and a capsid comprising SEQ ID NO: 5. In some embodiments, the AAV particle comprises a viral genome comprising SEQ ID NO: 2017 and a capsid encoded by a nucleic acid sequence comprising SEQ ID NO: 6. In some embodiments, the AAV particle comprises a viral genome comprising SEQ ID NO: 2017 and a capsid comprising SEQ ID NO: 4. In some embodiments, the AAV particle comprises a viral genome comprising SEQ ID NO: 2017 and a capsid comprising SEQ ID NO: 11. In some embodiments, the AAV particle comprises a viral genome comprising SEQ ID NO: 2017 and a capsid comprising SEQ ID NO: 2679. In some embodiments, the AAV particle comprises a viral genome comprising SEQ ID NO: 2017 and a capsid comprising SEQ ID NO: 2809. In some embodiments, the AAV particle comprises a viral genome comprising SEQ ID NO: 2017 and a capsid comprising SEQ ID NO: 2871.

[0777] In some embodiments, the AAV particle comprises a viral genome comprising SEQ ID NO: 2018 and a VOY101 capsid. In some embodiments, the AAV particle comprises a viral genome comprising SEQ ID NO: 2018 and a VOY201 capsid. In some embodiments, the AAV particle comprises a viral genome comprising SEQ ID NO: 2018 and an AAV9 capsid. In some embodiments, the AAV particle comprises a viral genome comprising SEQ ID NO: 2018 and an AAV9K449R capsid. In some embodiments, the AAV particle comprises a viral genome comprising SEQ ID NO: 2018 and an AAVPHP.B capsid. In some embodiments, the AAV particle comprises a viral genome comprising SEQ ID NO: 2018 and an AAVPHP.N capsid. In some embodiments, the AAV particle comprises a viral genome comprising SEQ ID NO: 2018 and an AAV2 variant capsid. In some embodiments, the AAV particle comprises a viral genome comprising SEQ ID NO: 2018 and an AAV2/3 variant capsid. In some embodiments, the AAV particle comprises a viral genome comprising SEQ ID NO: 2018 and a capsid comprising SEQ ID NO: 1. In some embodiments, the AAV particle comprises a viral genome comprising SEQ ID NO: 2018 and a capsid encoded by a nucleic acid sequence comprising SEQ ID NO: 2. In some embodiments, the AAV particle comprises a viral genome comprising SEQ ID NO: 2018 and a capsid comprising SEQ ID NO: 4534. In some embodiments, the AAV particle comprises a viral genome comprising SEQ ID NO: 2018 and a capsid encoded by a nucleic acid sequence comprising SEQ ID NO: 3. In some embodiments, the AAV particle comprises a viral genome comprising SEQ ID NO: 2018 and a capsid comprising SEQ ID NO: 138. In some embodiments, the AAV particle comprises a viral genome comprising SEQ ID NO: 2018 and a capsid encoded by a nucleic acid sequence comprising SEQ ID NO: 137. In some embodiments, the AAV particle comprises a viral genome comprising SEQ ID NO: 2018 and a capsid comprising SEQ ID NO: 5. In some embodiments, the AAV particle comprises a viral genome comprising SEQ ID NO: 2018 and a capsid encoded by a nucleic acid sequence comprising SEQ ID NO: 6. In some embodiments, the AAV particle comprises a viral genome comprising SEQ ID NO: 2018 and a capsid comprising SEQ ID NO: 4. In some embodiments, the AAV particle comprises a viral genome comprising SEQ ID NO: 2018 and a capsid comprising SEQ ID NO: 11. In some embodiments, the AAV particle comprises a viral genome comprising SEQ ID NO: 2018 and a capsid comprising SEQ ID NO: 2679. In some embodiments, the AAV particle comprises a viral genome comprising SEQ ID NO: 2018 and a capsid comprising SEQ ID NO: 2809. In some embodiments, the AAV particle comprises a viral genome comprising SEQ ID NO: 2018 and a capsid comprising SEQ ID NO: 2871.

[0778] In some embodiments, the AAV particle comprises a viral genome comprising SEQ ID NO: 2019 and a VOY101 capsid. In some embodiments, the AAV particle comprises a viral genome comprising SEQ ID NO: 2019 and a VOY201 capsid. In some embodiments, the AAV particle comprises a viral genome comprising SEQ ID NO: 2019 and an AAV9 capsid. In some embodiments, the AAV particle comprises a viral genome comprising SEQ ID NO: 2019 and an AAV9K449R capsid. In some embodiments, the AAV particle comprises a viral genome comprising SEQ ID NO: 2019 and an AAVPHP.B capsid. In some embodiments, the AAV particle comprises a viral genome comprising SEQ ID NO: 2019 and an AAVPHP.N capsid. In some embodiments, the AAV particle comprises a viral genome comprising SEQ ID NO: 2019 and an AAV2 variant capsid. In some embodiments, the AAV particle comprises a viral genome comprising SEQ ID NO: 2019 and an AAV2/3 variant capsid. In some embodiments, the AAV particle comprises a viral genome comprising SEQ ID NO: 2019 and a capsid comprising SEQ ID NO: 1. In some embodiments, the AAV particle comprises a viral genome comprising SEQ ID NO: 2019 and a capsid encoded by a nucleic acid sequence comprising SEQ ID NO: 2. In some embodiments, the AAV particle comprises a viral genome comprising SEQ ID NO: 2019 and a capsid comprising SEQ ID NO: 4534. In some embodiments, the AAV particle comprises a viral genome comprising SEQ ID NO: 2019 and a capsid encoded by a nucleic acid sequence comprising SEQ ID NO: 3. In some embodiments, the AAV particle comprises a viral genome comprising SEQ ID NO: 2019 and a capsid comprising SEQ ID NO: 138. In some embodiments, the AAV particle comprises a viral genome comprising SEQ ID NO: 2019 and a capsid encoded by a nucleic acid sequence comprising SEQ ID NO: 137. In some embodiments, the AAV particle comprises a viral genome comprising SEQ ID NO: 2019 and a capsid comprising SEQ ID NO: 5. In some embodiments, the AAV particle comprises a viral genome comprising SEQ ID NO: 2019 and a capsid encoded by a nucleic acid sequence comprising SEQ ID NO: 6. In some embodiments, the AAV particle comprises a viral genome comprising SEQ ID NO: 2019 and a capsid comprising SEQ ID NO: 4. In some embodiments, the AAV particle comprises a viral genome comprising SEQ ID NO: 2019 and a capsid comprising SEQ ID NO: 11. In some embodiments, the AAV particle comprises a viral genome comprising SEQ ID NO: 2019 and a capsid comprising SEQ ID NO: 2679. In some embodiments, the AAV particle comprises a viral genome comprising SEQ ID NO: 2019 and a capsid comprising SEQ ID NO: 2809. In some embodiments, the AAV particle comprises a viral genome comprising SEQ ID NO: 2019 and a capsid comprising SEQ ID NO: 2871.

[0779] In some embodiments, the AAV particle comprises a viral genome comprising SEQ ID NO: 2020 and a VOY101 capsid. In some embodiments, the AAV particle comprises a viral genome comprising SEQ ID NO: 2020 and a VOY201 capsid. In some embodiments, the AAV particle comprises a viral genome comprising SEQ ID NO: 2020 and an AAV9 capsid. In some embodiments, the AAV particle comprises a viral genome comprising SEQ ID NO: 2020 and an AAV9K449R capsid. In some embodiments, the AAV particle comprises a viral genome comprising SEQ ID NO: 2020 and an AAVPHP.B capsid. In some embodiments, the AAV particle comprises a viral genome comprising SEQ ID NO: 2020 and an AAVPHP.N capsid. In some embodiments, the AAV particle comprises a viral genome comprising SEQ ID NO: 2020 and an AAV2 variant capsid. In some embodiments, the AAV particle comprises a viral genome comprising SEQ ID NO: 2020 and an AAV2/3 variant capsid. In some embodiments, the AAV particle comprises a viral genome comprising SEQ ID NO: 2020 and a capsid comprising SEQ ID NO: 1. In some embodiments, the AAV particle comprises a viral genome comprising SEQ ID NO: 2020 and a capsid encoded by a nucleic acid sequence comprising SEQ ID NO: 2. In some embodiments, the AAV particle comprises a viral genome comprising SEQ ID NO: 2020 and a capsid comprising SEQ ID NO: 4534. In some embodiments, the AAV particle comprises a viral genome comprising SEQ ID NO: 2020 and a capsid encoded by a nucleic acid sequence comprising SEQ ID NO: 3. In some embodiments, the AAV particle comprises a viral genome comprising SEQ ID NO: 2020 and a capsid comprising SEQ ID NO: 138. In some embodiments, the AAV particle comprises a viral genome comprising SEQ ID NO: 2020 and a capsid encoded by a nucleic acid sequence comprising SEQ ID NO: 137. In some embodiments, the AAV particle comprises a viral genome comprising SEQ ID NO: 2020 and a capsid comprising SEQ ID NO: 5. In some embodiments, the AAV particle comprises a viral genome comprising SEQ ID NO: 2020 and a capsid encoded by a nucleic acid sequence comprising SEQ ID NO: 6. In some embodiments, the AAV particle comprises a viral genome comprising SEQ ID NO: 2020 and a capsid comprising SEQ ID NO: 4. In some embodiments, the AAV particle comprises a viral genome comprising SEQ ID NO: 2020 and a capsid comprising SEQ ID NO: 11. In some embodiments, the AAV particle comprises a viral genome comprising SEQ ID NO: 2020 and a capsid comprising SEQ ID NO: 2679. In some embodiments, the AAV particle comprises a viral genome comprising SEQ ID NO: 2020 and a capsid comprising SEQ ID NO: 2809. In some embodiments, the AAV particle comprises a viral genome comprising SEQ ID NO: 2020 and a capsid comprising SEQ ID NO: 2871.

[0780] In some embodiments, the AAV particle comprises a viral genome comprising SEQ ID NO: 2021 and a VOY101 capsid. In some embodiments, the AAV particle comprises a viral genome comprising SEQ ID NO: 2021 and a VOY201 capsid. In some embodiments, the AAV particle comprises a viral genome comprising SEQ ID NO: 2021 and an AAV9 capsid. In some embodiments, the AAV particle comprises a viral genome comprising SEQ ID NO: 2021 and an AAV9K449R capsid. In some embodiments, the AAV particle comprises a viral genome comprising SEQ ID NO: 2021 and an AAVPHP.B capsid. In some embodiments, the AAV particle comprises a viral genome comprising SEQ ID NO: 2021 and an AAVPHP.N capsid. In some embodiments, the AAV particle comprises a viral genome comprising SEQ ID NO: 2021 and an AAV2 variant capsid. In some embodiments, the AAV particle comprises a viral genome comprising SEQ ID NO: 2021 and an AAV2/3 variant capsid. In some embodiments, the AAV particle comprises a viral genome comprising SEQ ID NO: 2021 and a capsid comprising SEQ ID NO: 1. In some embodiments, the AAV particle comprises a viral genome comprising SEQ ID NO: 2021 and a capsid encoded by a nucleic acid sequence comprising SEQ ID NO: 2. In some embodiments, the AAV particle comprises a viral genome comprising SEQ ID NO: 2021 and a capsid comprising SEQ ID NO: 4534. In some embodiments, the AAV particle comprises a viral genome comprising SEQ ID NO: 2021 and a capsid encoded by a nucleic acid sequence comprising SEQ ID NO: 3. In some embodiments, the AAV particle comprises a viral genome comprising SEQ ID NO: 2021 and a capsid comprising SEQ ID NO: 138. In some embodiments, the AAV particle comprises a viral genome comprising SEQ ID NO: 2021 and a capsid encoded by a nucleic acid sequence comprising SEQ ID NO: 137. In some embodiments, the AAV particle comprises a viral genome comprising SEQ ID NO: 2021 and a capsid comprising SEQ ID NO: 5. In some embodiments, the AAV particle comprises a viral genome comprising SEQ ID NO: 2021 and a capsid encoded by a nucleic acid sequence comprising SEQ ID NO: 6. In some embodiments, the AAV particle comprises a viral genome comprising SEQ ID NO: 2021 and a capsid comprising SEQ ID NO: 4. In some embodiments, the AAV particle comprises a viral genome comprising SEQ ID NO: 2021 and a capsid comprising SEQ ID NO: 11. In some embodiments, the AAV particle comprises a viral genome comprising SEQ ID NO: 2021 and a capsid comprising SEQ ID NO: 2679. In some embodiments, the AAV particle comprises a viral genome comprising SEQ ID NO: 2021 and a capsid comprising SEQ ID NO: 2809. In some embodiments, the AAV particle comprises a viral genome comprising SEQ ID NO: 2021 and a capsid comprising SEQ ID NO: 2871.

[0781] In some embodiments, the AAV particle comprises a viral genome comprising SEQ ID NO: 2022 and a VOY101 capsid. In some embodiments, the AAV particle comprises a viral genome comprising SEQ ID NO: 2022 and a VOY201 capsid. In some embodiments, the AAV particle comprises a viral genome comprising SEQ ID NO: 2022 and an AAV9 capsid. In some embodiments, the AAV particle comprises a viral genome comprising SEQ ID NO: 2022 and an AAV9K449R capsid. In some embodiments, the AAV particle comprises a viral genome comprising SEQ ID NO: 2022 and an AAVPHP.B capsid. In some embodiments, the AAV particle comprises a viral genome comprising SEQ ID NO: 2022 and an AAVPHP.N capsid. In some embodiments, the AAV particle comprises a viral genome comprising SEQ ID NO: 2022 and an AAV2 variant capsid. In some embodiments, the AAV particle comprises a viral genome comprising SEQ ID NO: 2022 and an AAV2/3 variant capsid. In some embodiments, the AAV particle comprises a viral genome comprising SEQ ID NO: 2022 and a capsid comprising SEQ ID NO: 1. In some embodiments, the AAV particle comprises a viral genome comprising SEQ ID NO: 2022 and a capsid encoded by a nucleic acid sequence comprising SEQ ID NO: 2. In some embodiments, the AAV particle comprises a viral genome comprising SEQ ID NO: 2022 and a capsid comprising SEQ ID NO: 4534. In some embodiments, the AAV particle comprises a viral genome comprising SEQ ID NO: 2022 and a capsid encoded by a nucleic acid sequence comprising SEQ ID NO: 3. In some embodiments, the AAV particle comprises a viral genome comprising SEQ ID NO: 2022 and a capsid comprising SEQ ID NO: 138. In some embodiments, the AAV particle comprises a viral genome comprising SEQ ID NO: 2022 and a capsid encoded by a nucleic acid sequence comprising SEQ ID NO: 137. In some embodiments, the AAV particle comprises a viral genome comprising SEQ ID NO: 2022 and a capsid comprising SEQ ID NO: 5. In some embodiments, the AAV particle comprises a viral genome comprising SEQ ID NO: 2022 and a capsid encoded by a nucleic acid sequence comprising SEQ ID NO: 6. In some embodiments, the AAV particle comprises a viral genome comprising SEQ ID NO: 2022 and a capsid comprising SEQ ID NO: 4. In some embodiments, the AAV particle comprises a viral genome comprising SEQ ID NO: 2022 and a capsid comprising SEQ ID NO: 11. In some embodiments, the AAV particle comprises a viral genome comprising SEQ ID NO: 2022 and a capsid comprising SEQ ID NO: 2679. In some embodiments, the AAV particle comprises a viral genome comprising SEQ ID NO: 2022 and a capsid comprising SEQ ID NO: 2809. In some embodiments, the AAV particle comprises a viral genome comprising SEQ ID NO: 2022 and a capsid comprising SEQ ID NO: 2871.

[0782] In some embodiments, the AAV particle comprises a viral genome comprising SEQ ID NO: 2023 and a VOY101 capsid. In some embodiments, the AAV particle comprises a viral genome comprising SEQ ID NO: 2023 and a VOY201 capsid. In some embodiments, the AAV particle comprises a viral genome comprising SEQ ID NO: 2023 and an AAV9 capsid. In some embodiments, the AAV particle comprises a viral genome comprising SEQ ID NO: 2023 and an AAV9K449R capsid. In some embodiments, the AAV particle comprises a viral genome comprising SEQ ID NO: 2023 and an AAVPHP.B capsid. In some embodiments, the AAV particle comprises a viral genome comprising SEQ ID NO: 2023 and an AAVPHP.N capsid. In some embodiments, the AAV particle comprises a viral genome comprising SEQ ID NO: 2023 and an AAV2 variant capsid. In some embodiments, the AAV particle comprises a viral genome comprising SEQ ID NO: 2023 and an AAV2/3 variant capsid. In some embodiments, the AAV particle comprises a viral genome comprising SEQ ID NO: 2023 and a capsid comprising SEQ ID NO: 1. In some embodiments, the AAV particle comprises a viral genome comprising SEQ ID NO: 2023 and a capsid encoded by a nucleic acid sequence comprising SEQ ID NO: 2. In some embodiments, the AAV particle comprises a viral genome comprising SEQ ID NO: 2023 and a capsid comprising SEQ ID NO: 4534. In some embodiments, the AAV particle comprises a viral genome comprising SEQ ID NO: 2023 and a capsid encoded by a nucleic acid sequence comprising SEQ ID NO: 3. In some embodiments, the AAV particle comprises a viral genome comprising SEQ ID NO: 2023 and a capsid comprising SEQ ID NO: 138. In some embodiments, the AAV particle comprises a viral genome comprising SEQ ID NO: 2023 and a capsid encoded by a nucleic acid sequence comprising SEQ ID NO: 137. In some embodiments, the AAV particle comprises a viral genome comprising SEQ ID NO: 2023 and a capsid comprising SEQ ID NO: 5. In some embodiments, the AAV particle comprises a viral genome comprising SEQ ID NO: 2023 and a capsid encoded by a nucleic acid sequence comprising SEQ ID NO: 6. In some embodiments, the AAV particle comprises a viral genome comprising SEQ ID NO: 2023 and a capsid comprising SEQ ID NO: 4. In some embodiments, the AAV particle comprises a viral genome comprising SEQ ID NO: 2023 and a capsid comprising SEQ ID NO: 11. In some embodiments, the AAV particle comprises a viral genome comprising SEQ ID NO: 2023 and a capsid comprising SEQ ID NO: 2679. In some embodiments, the AAV particle comprises a viral genome comprising SEQ ID NO: 2023 and a capsid comprising SEQ ID NO: 2809. In some embodiments, the AAV particle comprises a viral genome comprising SEQ ID NO: 2023 and a capsid comprising SEQ ID NO: 2871.

[0783] In some embodiments, the AAV particle comprises a viral genome comprising SEQ ID NO: 2024 and a VOY101 capsid. In some embodiments, the AAV particle comprises a viral genome comprising SEQ ID NO: 2024 and a VOY201 capsid. In some embodiments, the AAV particle comprises a viral genome comprising SEQ ID NO: 2024 and an AAV9 capsid. In some embodiments, the AAV particle comprises a viral genome comprising SEQ ID NO: 2024 and an AAV9K449R capsid. In some embodiments, the AAV particle comprises a viral genome comprising SEQ ID NO: 2024 and an AAVPHP.B capsid. In some embodiments, the AAV particle comprises a viral genome comprising SEQ ID NO: 2024 and an AAVPHP.N capsid. In some embodiments, the AAV particle comprises a viral genome comprising SEQ ID NO: 2024 and an AAV2 variant capsid. In some embodiments, the AAV particle comprises a viral genome comprising SEQ ID NO: 2024 and an AAV2/3 variant capsid. In some embodiments, the AAV particle comprises a viral genome comprising SEQ ID NO: 2024 and a capsid comprising SEQ ID NO: 1. In some embodiments, the AAV particle comprises a viral genome comprising SEQ ID NO: 2024 and a capsid encoded by a nucleic acid sequence comprising SEQ ID NO: 2. In some embodiments, the AAV particle comprises a viral genome comprising SEQ ID NO: 2024 and a capsid comprising SEQ ID NO: 4534. In some embodiments, the AAV particle comprises a viral genome comprising SEQ ID NO: 2024 and a capsid encoded by a nucleic acid sequence comprising SEQ ID NO: 3. In some embodiments, the AAV particle comprises a viral genome comprising SEQ ID NO: 2024 and a capsid comprising SEQ ID NO: 138. In some embodiments, the AAV particle comprises a viral genome comprising SEQ ID NO: 2024 and a capsid encoded by a nucleic acid sequence comprising SEQ ID NO: 137. In some embodiments, the AAV particle comprises a viral genome comprising SEQ ID NO: 2024 and a capsid comprising SEQ ID NO: 5. In some embodiments, the AAV particle comprises a viral genome comprising SEQ ID NO: 2024 and a capsid encoded by a nucleic acid sequence comprising SEQ ID NO: 6. In some embodiments, the AAV particle comprises a viral genome comprising SEQ ID NO: 2024 and a capsid comprising SEQ ID NO: 4. In some embodiments, the AAV particle comprises a viral genome comprising SEQ ID NO: 2024 and a capsid comprising SEQ ID NO: 11. In some embodiments, the AAV particle comprises a viral genome comprising SEQ ID NO: 2024 and a capsid comprising SEQ ID NO: 2679. In some embodiments, the AAV particle comprises a viral genome comprising SEQ ID NO: 2024 and a capsid comprising SEQ ID NO: 2809. In some embodiments, the AAV particle comprises a viral genome comprising SEQ ID NO: 2024 and a capsid comprising SEQ ID NO: 2871.

[0784] In some embodiments, the AAV particle comprises a viral genome comprising SEQ ID NO: 2025 and a VOY101 capsid. In some embodiments, the AAV particle comprises a viral genome comprising SEQ ID NO: 2025 and a VOY201 capsid. In some embodiments, the AAV particle comprises a viral genome comprising SEQ ID NO: 2025 and an AAV9 capsid. In some embodiments, the AAV particle comprises a viral genome comprising SEQ ID NO: 2025 and an AAV9K449R capsid. In some embodiments, the AAV particle comprises a viral genome comprising SEQ ID NO: 2025 and an AAVPHP.B capsid. In some embodiments, the AAV particle comprises a viral genome comprising SEQ ID NO: 2025 and an AAVPHP.N capsid. In some embodiments, the AAV particle comprises a viral genome comprising SEQ ID NO: 2025 and an AAV2 variant capsid. In some embodiments, the AAV particle comprises a viral genome comprising SEQ ID NO: 2025 and an AAV2/3 variant capsid. In some embodiments, the AAV particle comprises a viral genome comprising SEQ ID NO: 2025 and a capsid comprising SEQ ID NO: 1. In some embodiments, the AAV particle comprises a viral genome comprising SEQ ID NO: 2025 and a capsid encoded by a nucleic acid sequence comprising SEQ ID NO: 2. In some embodiments, the AAV particle comprises a viral genome comprising SEQ ID NO: 2025 and a capsid comprising SEQ ID NO: 4534. In some embodiments, the AAV particle comprises a viral genome comprising SEQ ID NO: 2025 and a capsid encoded by a nucleic acid sequence comprising SEQ ID NO: 3. In some embodiments, the AAV particle comprises a viral genome comprising SEQ ID NO: 2025 and a capsid comprising SEQ ID NO: 138. In some embodiments, the AAV particle comprises a viral genome comprising SEQ ID NO: 2025 and a capsid encoded by a nucleic acid sequence comprising SEQ ID NO: 137. In some embodiments, the AAV particle comprises a viral genome comprising SEQ ID NO: 2025 and a capsid comprising SEQ ID NO: 5. In some embodiments, the AAV particle comprises a viral genome comprising SEQ ID NO: 2025 and a capsid encoded by a nucleic acid sequence comprising SEQ ID NO: 6. In some embodiments, the AAV particle comprises a viral genome comprising SEQ ID NO: 2025 and a capsid comprising SEQ ID NO: 4. In some embodiments, the AAV particle comprises a viral genome comprising SEQ ID NO: 2025 and a capsid comprising SEQ ID NO: 11. In some embodiments, the AAV particle comprises a viral genome comprising SEQ ID NO: 2025 and a capsid comprising SEQ ID NO: 2679. In some embodiments, the AAV particle comprises a viral genome comprising SEQ ID NO: 2025 and a capsid comprising SEQ ID NO: 2809. In some embodiments, the AAV particle comprises a viral genome comprising SEQ ID NO: 2025 and a capsid comprising SEQ ID NO: 2871.

[0785] In some embodiments, the AAV particle comprises a viral genome comprising SEQ ID NO: 2026 and a VOY101 capsid. In some embodiments, the AAV particle comprises a viral genome comprising SEQ ID NO: 2026 and a VOY201 capsid. In some embodiments, the AAV particle comprises a viral genome comprising SEQ ID NO: 2026 and an AAV9 capsid. In some embodiments, the AAV particle comprises a viral genome comprising SEQ ID NO: 2026 and an AAV9K449R capsid. In some embodiments, the AAV particle comprises a viral genome comprising SEQ ID NO: 2026 and an AAVPHP.B capsid. In some embodiments, the AAV particle comprises a viral genome comprising SEQ ID NO: 2026 and an AAVPHP.N capsid. In some embodiments, the AAV particle comprises a viral genome comprising SEQ ID NO: 2026 and an AAV2 variant capsid. In some embodiments, the AAV particle comprises a viral genome comprising SEQ ID NO: 2026 and an AAV2/3 variant capsid. In some embodiments, the AAV particle comprises a viral genome comprising SEQ ID NO: 2026 and a capsid comprising SEQ ID NO: 1. In some embodiments, the AAV particle comprises a viral genome comprising SEQ ID NO: 2026 and a capsid encoded by a nucleic acid sequence comprising SEQ ID NO: 2. In some embodiments, the AAV particle comprises a viral genome comprising SEQ ID NO: 2026 and a capsid comprising SEQ ID NO: 4534. In some embodiments, the AAV particle comprises a viral genome comprising SEQ ID NO: 2026 and a capsid encoded by a nucleic acid sequence comprising SEQ ID NO: 3. In some embodiments, the AAV particle comprises a viral genome comprising SEQ ID NO: 2026 and a capsid comprising SEQ ID NO: 138. In some embodiments, the AAV particle comprises a viral genome comprising SEQ ID NO: 2026 and a capsid encoded by a nucleic acid sequence comprising SEQ ID NO: 137. In some embodiments, the AAV particle comprises a viral genome comprising SEQ ID NO: 2026 and a capsid comprising SEQ ID NO: 5. In some embodiments, the AAV particle comprises a viral genome comprising SEQ ID NO: 2026 and a capsid encoded by a nucleic acid sequence comprising SEQ ID NO: 6. In some embodiments, the AAV particle comprises a viral genome comprising SEQ ID NO: 2026 and a capsid comprising SEQ ID NO: 4. In some embodiments, the AAV particle comprises a viral genome comprising SEQ ID NO: 2026 and a capsid comprising SEQ ID NO: 11. In some embodiments, the AAV particle comprises a viral genome comprising SEQ ID NO: 2026 and a capsid comprising SEQ ID NO: 2679. In some embodiments, the AAV particle comprises a viral genome comprising SEQ ID NO: 2026 and a capsid comprising SEQ ID NO: 2809. In some embodiments, the AAV particle comprises a viral genome comprising SEQ ID NO: 2026 and a capsid comprising SEQ ID NO: 2871.

[0786] In some embodiments, the AAV particle comprises a viral genome comprising SEQ ID NO: 2027 and a VOY101 capsid. In some embodiments, the AAV particle comprises a viral genome comprising SEQ ID NO: 2027 and a VOY201 capsid. In some embodiments, the AAV particle comprises a viral genome comprising SEQ ID NO: 2027 and an AAV9 capsid. In some embodiments, the AAV particle comprises a viral genome comprising SEQ ID NO: 2027 and an AAV9K449R capsid. In some embodiments, the AAV particle comprises a viral genome comprising SEQ ID NO: 2027 and an AAVPHP.B capsid. In some embodiments, the AAV particle comprises a viral genome comprising SEQ ID NO: 2027 and an AAVPHP.N capsid. In some embodiments, the AAV particle comprises a viral genome comprising SEQ ID NO: 2027 and an AAV2 variant capsid. In some embodiments, the AAV particle comprises a viral genome comprising SEQ ID NO: 2027 and an AAV2/3 variant capsid. In some embodiments, the AAV particle comprises a viral genome comprising SEQ ID NO: 2027 and a capsid comprising SEQ ID NO: 1. In some embodiments, the AAV particle comprises a viral genome comprising SEQ ID NO: 2027 and a capsid encoded by a nucleic acid sequence comprising SEQ ID NO: 2. In some embodiments, the AAV particle comprises a viral genome comprising SEQ ID NO: 2027 and a capsid comprising SEQ ID NO: 4534. In some embodiments, the AAV particle comprises a viral genome comprising SEQ ID NO: 2027 and a capsid encoded by a nucleic acid sequence comprising SEQ ID NO: 3. In some embodiments, the AAV particle comprises a viral genome comprising SEQ ID NO: 2027 and a capsid comprising SEQ ID NO: 138. In some embodiments, the AAV particle comprises a viral genome comprising SEQ ID NO: 2027 and a capsid encoded by a nucleic acid sequence comprising SEQ ID NO: 137. In some embodiments, the AAV particle comprises a viral genome comprising SEQ ID NO: 2027 and a capsid comprising SEQ ID NO: 5. In some embodiments, the AAV particle comprises a viral genome comprising SEQ ID NO: 2027 and a capsid encoded by a nucleic acid sequence comprising SEQ ID NO: 6. In some embodiments, the AAV particle comprises a viral genome comprising SEQ ID NO: 2027 and a capsid comprising SEQ ID NO: 4. In some embodiments, the AAV particle comprises a viral genome comprising SEQ ID NO: 2027 and a capsid comprising SEQ ID NO: 11. In some embodiments, the AAV particle comprises a viral genome comprising SEQ ID NO: 2027 and a capsid comprising SEQ ID NO: 2679. In some embodiments, the AAV particle comprises a viral genome comprising SEQ ID NO: 2027 and a capsid comprising SEQ ID NO: 2809. In some embodiments, the AAV particle comprises a viral genome comprising SEQ ID NO: 2027 and a capsid comprising SEQ ID NO: 2871.

[0787] In some embodiments, the AAV particle comprises a viral genome comprising SEQ ID NO: 2028 and a VOY101 capsid. In some embodiments, the AAV particle comprises a viral genome comprising SEQ ID NO: 2028 and a VOY201 capsid. In some embodiments, the AAV particle comprises a viral genome comprising SEQ ID NO: 2028 and an AAV9 capsid. In some embodiments, the AAV particle comprises a viral genome comprising SEQ ID NO: 2028 and an AAV9K449R capsid. In some embodiments, the AAV particle comprises a viral genome comprising SEQ ID NO: 2028 and an AAVPHP.B capsid. In some embodiments, the AAV particle comprises a viral genome comprising SEQ ID NO: 2028 and an AAVPHP.N capsid. In some embodiments, the AAV particle comprises a viral genome comprising SEQ ID NO: 2028 and an AAV2 variant capsid. In some embodiments, the AAV particle comprises a viral genome comprising SEQ ID NO: 2028 and an AAV2/3 variant capsid. In some embodiments, the AAV particle comprises a viral genome comprising SEQ ID NO: 2028 and a capsid comprising SEQ ID NO: 1. In some embodiments, the AAV particle comprises a viral genome comprising SEQ ID NO: 2028 and a capsid encoded by a nucleic acid sequence comprising SEQ ID NO: 2. In some embodiments, the AAV particle comprises a viral genome comprising SEQ ID NO: 2028 and a capsid comprising SEQ ID NO: 4534. In some embodiments, the AAV particle comprises a viral genome comprising SEQ ID NO: 2028 and a capsid encoded by a nucleic acid sequence comprising SEQ ID NO: 3. In some embodiments, the AAV particle comprises a viral genome comprising SEQ ID NO: 2028 and a capsid comprising SEQ ID NO: 138. In some embodiments, the AAV particle comprises a viral genome comprising SEQ ID NO: 2028 and a capsid encoded by a nucleic acid sequence comprising SEQ ID NO: 137. In some embodiments, the AAV particle comprises a viral genome comprising SEQ ID NO: 2028 and a capsid comprising SEQ ID NO: 5. In some embodiments, the AAV particle comprises a viral genome comprising SEQ ID NO: 2028 and a capsid encoded by a nucleic acid sequence comprising SEQ ID NO: 6. In some embodiments, the AAV particle comprises a viral genome comprising SEQ ID NO: 2028 and a capsid comprising SEQ ID NO: 4. In some embodiments, the AAV particle comprises a viral genome comprising SEQ ID NO: 2028 and a capsid comprising SEQ ID NO: 11. In some embodiments, the AAV particle comprises a viral genome comprising SEQ ID NO: 2028 and a capsid comprising SEQ ID NO: 2679. In some embodiments, the AAV particle comprises a viral genome comprising SEQ ID NO: 2028 and a capsid comprising SEQ ID NO: 2809. In some embodiments, the AAV particle comprises a viral genome comprising SEQ ID NO: 2028 and a capsid comprising SEQ ID NO: 2871.

[0788] In some embodiments, the AAV particle comprises a viral genome comprising SEQ ID NO: 2029 and a VOY101 capsid. In some embodiments, the AAV particle comprises a viral genome comprising SEQ ID NO: 2029 and a VOY201 capsid. In some embodiments, the AAV particle comprises a viral genome comprising SEQ ID NO: 2029 and an AAV9 capsid. In some embodiments, the AAV particle comprises a viral genome comprising SEQ ID NO: 2029 and an AAV9K449R capsid. In some embodiments, the AAV particle comprises a viral genome comprising SEQ ID NO: 2029 and an AAVPHP.B capsid. In some embodiments, the AAV particle comprises a viral genome comprising SEQ ID NO: 2029 and an AAVPHP.N capsid. In some embodiments, the AAV particle comprises a viral genome comprising SEQ ID NO: 2029 and an AAV2 variant capsid. In some embodiments, the AAV particle comprises a viral genome comprising SEQ ID NO: 2029 and an AAV2/3 variant capsid. In some embodiments, the AAV particle comprises a viral genome comprising SEQ ID NO: 2029 and a capsid comprising SEQ ID NO: 1. In some embodiments, the AAV particle comprises a viral genome comprising SEQ ID NO: 2029 and a capsid encoded by a nucleic acid sequence comprising SEQ ID NO: 2. In some embodiments, the AAV particle comprises a viral genome comprising SEQ ID NO: 2029 and a capsid comprising SEQ ID NO: 4534. In some embodiments, the AAV particle comprises a viral genome comprising SEQ ID NO: 2029 and a capsid encoded by a nucleic acid sequence comprising SEQ ID NO: 3. In some embodiments, the AAV particle comprises a viral genome comprising SEQ ID NO: 2029 and a capsid comprising SEQ ID NO: 138. In some embodiments, the AAV particle comprises a viral genome comprising SEQ ID NO: 2029 and a capsid encoded by a nucleic acid sequence comprising SEQ ID NO: 137. In some embodiments, the AAV particle comprises a viral genome comprising SEQ ID NO: 2029 and a capsid comprising SEQ ID NO: 5. In some embodiments, the AAV particle comprises a viral genome comprising SEQ ID NO: 2029 and a capsid encoded by a nucleic acid sequence comprising SEQ ID NO: 6. In some embodiments, the AAV particle comprises a viral genome comprising SEQ ID NO: 2029 and a capsid comprising SEQ ID NO: 4. In some embodiments, the AAV particle comprises a viral genome comprising SEQ ID NO: 2029 and a capsid comprising SEQ ID NO: 11. In some embodiments, the AAV particle comprises a viral genome comprising SEQ ID NO: 2029 and a capsid comprising SEQ ID NO: 2679. In some embodiments, the AAV particle comprises a viral genome comprising SEQ ID NO: 2029 and a capsid comprising SEQ ID NO: 2809. In some embodiments, the AAV particle comprises a viral genome comprising SEQ ID NO: 2029 and a capsid comprising SEQ ID NO: 2871.

[0789] In some embodiments, the AAV particle comprises a viral genome comprising SEQ ID NO: 2030 and a VOY101 capsid. In some embodiments, the AAV particle comprises a viral genome comprising SEQ ID NO: 2030 and a VOY201 capsid. In some embodiments, the AAV particle comprises a viral genome comprising SEQ ID NO: 2030 and an AAV9 capsid. In some embodiments, the AAV particle comprises a viral genome comprising SEQ ID NO: 2030 and an AAV9K449R capsid. In some embodiments, the AAV particle comprises a viral genome comprising SEQ ID NO: 2030 and an AAVPHP.B capsid. In some embodiments, the AAV particle comprises a viral genome comprising SEQ ID NO: 2030 and an AAVPHP.N capsid. In some embodiments, the AAV particle comprises a viral genome comprising SEQ ID NO: 2030 and an AAV2 variant capsid. In some embodiments, the AAV particle comprises a viral genome comprising SEQ ID NO: 2030 and an AAV2/3 variant capsid. In some embodiments, the AAV particle comprises a viral genome comprising SEQ ID NO: 2030 and a capsid comprising SEQ ID NO: 1. In some embodiments, the AAV particle comprises a viral genome comprising SEQ ID NO: 2030 and a capsid encoded by a nucleic acid sequence comprising SEQ ID NO: 2. In some embodiments, the AAV particle comprises a viral genome comprising SEQ ID NO: 2030 and a capsid comprising SEQ ID NO: 4534. In some embodiments, the AAV particle comprises a viral genome comprising SEQ ID NO: 2030 and a capsid encoded by a nucleic acid sequence comprising SEQ ID NO: 3. In some embodiments, the AAV particle comprises a viral genome comprising SEQ ID NO: 2030 and a capsid comprising SEQ ID NO: 138. In some embodiments, the AAV particle comprises a viral genome comprising SEQ ID NO: 2030 and a capsid encoded by a nucleic acid sequence comprising SEQ ID NO: 137. In some embodiments, the AAV particle comprises a viral genome comprising SEQ ID NO: 2030 and a capsid comprising SEQ ID NO: 5. In some embodiments, the AAV particle comprises a viral genome comprising SEQ ID NO: 2030 and a capsid encoded by a nucleic acid sequence comprising SEQ ID NO: 6. In some embodiments, the AAV particle comprises a viral genome comprising SEQ ID NO: 2030 and a capsid comprising SEQ ID NO: 4. In some embodiments, the AAV particle comprises a viral genome comprising SEQ ID NO: 2030 and a capsid comprising SEQ ID NO: 11. In some embodiments, the AAV particle comprises a viral genome comprising SEQ ID NO: 2030 and a capsid comprising SEQ ID NO: 2679. In some embodiments, the AAV particle comprises a viral genome comprising SEQ ID NO: 2030 and a capsid comprising SEQ ID NO: 2809. In some embodiments, the AAV particle comprises a viral genome comprising SEQ ID NO: 2030 and a capsid comprising SEQ ID NO: 2871.

[0790] In some embodiments, the AAV particle comprises a viral genome comprising SEQ ID NO: 2031 and a VOY101 capsid. In some embodiments, the AAV particle comprises a viral genome comprising SEQ ID NO: 2031 and a VOY201 capsid. In some embodiments, the AAV particle comprises a viral genome comprising SEQ ID NO: 2031 and an AAV9 capsid. In some embodiments, the AAV particle comprises a viral genome comprising SEQ ID NO: 2031 and an AAV9K449R capsid. In some embodiments, the AAV particle comprises a viral genome comprising SEQ ID NO: 2031 and an AAVPHP.B capsid. In some embodiments, the AAV particle comprises a viral genome comprising SEQ ID NO: 2031 and an AAVPHP.N capsid. In some embodiments, the AAV particle comprises a viral genome comprising SEQ ID NO: 2031 and an AAV2 variant capsid. In some embodiments, the AAV particle comprises a viral genome comprising SEQ ID NO: 2031 and an AAV2/3 variant capsid. In some embodiments, the AAV particle comprises a viral genome comprising SEQ ID NO: 2031 and a capsid comprising SEQ ID NO: 1. In some embodiments, the AAV particle comprises a viral genome comprising SEQ ID NO: 2031 and a capsid encoded by a nucleic acid sequence comprising SEQ ID NO: 2. In some embodiments, the AAV particle comprises a viral genome comprising SEQ ID NO: 2031 and a capsid comprising SEQ ID NO: 4534. In some embodiments, the AAV particle comprises a viral genome comprising SEQ ID NO: 2031 and a capsid encoded by a nucleic acid sequence comprising SEQ ID NO: 3. In some embodiments, the AAV particle comprises a viral genome comprising SEQ ID NO: 2031 and a capsid comprising SEQ ID NO: 138. In some embodiments, the AAV particle comprises a viral genome comprising SEQ ID NO: 2031 and a capsid encoded by a nucleic acid sequence comprising SEQ ID NO: 137. In some embodiments, the AAV particle comprises a viral genome comprising SEQ ID NO: 2031 and a capsid comprising SEQ ID NO: 5. In some embodiments, the AAV particle comprises a viral genome comprising SEQ ID NO: 2031 and a capsid encoded by a nucleic acid sequence comprising SEQ ID NO: 6. In some embodiments, the AAV particle comprises a viral genome comprising SEQ ID NO: 2031 and a capsid comprising SEQ ID NO: 4. In some embodiments, the AAV particle comprises a viral genome comprising SEQ ID NO: 2031 and a capsid comprising SEQ ID NO: 11. In some embodiments, the AAV particle comprises a viral genome comprising SEQ ID NO: 2031 and a capsid comprising SEQ ID NO: 2679. In some embodiments, the AAV particle comprises a viral genome comprising SEQ ID NO: 2031 and a capsid comprising SEQ ID NO: 2809. In some embodiments, the AAV particle comprises a viral genome comprising SEQ ID NO: 2031 and a capsid comprising SEQ ID NO: 2871.

[0791] In some embodiments, the AAV particle comprises a viral genome comprising SEQ ID NO: 2032 and a VOY101 capsid. In some embodiments, the AAV particle comprises a viral genome comprising SEQ ID NO: 2032 and a VOY201 capsid. In some embodiments, the AAV particle comprises a viral genome comprising SEQ ID NO: 2032 and an AAV9 capsid. In some embodiments, the AAV particle comprises a viral genome comprising SEQ ID NO: 2032 and an AAV9K449R capsid. In some embodiments, the AAV particle comprises a viral genome comprising SEQ ID NO: 2032 and an AAVPHP.B capsid. In some embodiments, the AAV particle comprises a viral genome comprising SEQ ID NO: 2032 and an AAVPHP.N capsid. In some embodiments, the AAV particle comprises a viral genome comprising SEQ ID NO: 2032 and an AAV2 variant capsid. In some embodiments, the AAV particle comprises a viral genome comprising SEQ ID NO: 2032 and an AAV2/3 variant capsid. In some embodiments, the AAV particle comprises a viral genome comprising SEQ ID NO: 2032 and a capsid comprising SEQ ID NO: 1. In some embodiments, the AAV particle comprises a viral genome comprising SEQ ID NO: 2032 and a capsid encoded by a nucleic acid sequence comprising SEQ ID NO: 2. In some embodiments, the AAV particle comprises a viral genome comprising SEQ ID NO: 2032 and a capsid comprising SEQ ID NO: 4534. In some embodiments, the AAV particle comprises a viral genome comprising SEQ ID NO: 2032 and a capsid encoded by a nucleic acid sequence comprising SEQ ID NO: 3. In some embodiments, the AAV particle comprises a viral genome comprising SEQ ID NO: 2032 and a capsid comprising SEQ ID NO: 138. In some embodiments, the AAV particle comprises a viral genome comprising SEQ ID NO: 2032 and a capsid encoded by a nucleic acid sequence comprising SEQ ID NO: 137. In some embodiments, the AAV particle comprises a viral genome comprising SEQ ID NO: 2032 and a capsid comprising SEQ ID NO: 5. In some embodiments, the AAV particle comprises a viral genome comprising SEQ ID NO: 2032 and a capsid encoded by a nucleic acid sequence comprising SEQ ID NO: 6. In some embodiments, the AAV particle comprises a viral genome comprising SEQ ID NO: 2032 and a capsid comprising SEQ ID NO: 4. In some embodiments, the AAV particle comprises a viral genome comprising SEQ ID NO: 2032 and a capsid comprising SEQ ID NO: 11. In some embodiments, the AAV particle comprises a viral genome comprising SEQ ID NO: 2032 and a capsid comprising SEQ ID NO: 2679. In some embodiments, the AAV particle comprises a viral genome comprising SEQ ID NO: 2032 and a capsid comprising SEQ ID NO: 2809. In some embodiments, the AAV particle comprises a viral genome comprising SEQ ID NO: 2032 and a capsid comprising SEQ ID NO: 2871.

[0792] In some embodiments, the AAV particle comprises a viral genome comprising SEQ ID NO: 2033 and a VOY101 capsid. In some embodiments, the AAV particle comprises a viral genome comprising SEQ ID NO: 2033 and a VOY201 capsid. In some embodiments, the AAV particle comprises a viral genome comprising SEQ ID NO: 2033 and an AAV9 capsid. In some embodiments, the AAV particle comprises a viral genome comprising SEQ ID NO: 2033 and an AAV9K449R capsid. In some embodiments, the AAV particle comprises a viral genome comprising SEQ ID NO: 2033 and an AAVPHP.B capsid. In some embodiments, the AAV particle comprises a viral genome comprising SEQ ID NO: 2033 and an AAVPHP.N capsid. In some embodiments, the AAV particle comprises a viral genome comprising SEQ ID NO: 2033 and an AAV2 variant capsid. In some embodiments, the AAV particle comprises a viral genome comprising SEQ ID NO: 2033 and an AAV2/3 variant capsid. In some embodiments, the AAV particle comprises a viral genome comprising SEQ ID NO: 2033 and a capsid comprising SEQ ID NO: 1. In some embodiments, the AAV particle comprises a viral genome comprising SEQ ID NO: 2033 and a capsid encoded by a nucleic acid sequence comprising SEQ ID NO: 2. In some embodiments, the AAV particle comprises a viral genome comprising SEQ ID NO: 2033 and a capsid comprising SEQ ID NO: 4534. In some embodiments, the AAV particle comprises a viral genome comprising SEQ ID NO: 2033 and a capsid encoded by a nucleic acid sequence comprising SEQ ID NO: 3. In some embodiments, the AAV particle comprises a viral genome comprising SEQ ID NO: 2033 and a capsid comprising SEQ ID NO: 138. In some embodiments, the AAV particle comprises a viral genome comprising SEQ ID NO: 2033 and a capsid encoded by a nucleic acid sequence comprising SEQ ID NO: 137. In some embodiments, the AAV particle comprises a viral genome comprising SEQ ID NO: 2033 and a capsid comprising SEQ ID NO: 5. In some embodiments, the AAV particle comprises a viral genome comprising SEQ ID NO: 2033 and a capsid encoded by a nucleic acid sequence comprising SEQ ID NO: 6. In some embodiments, the AAV particle comprises a viral genome comprising SEQ ID NO: 2033 and a capsid comprising SEQ ID NO: 4. In some embodiments, the AAV particle comprises a viral genome comprising SEQ ID NO: 2033 and a capsid comprising SEQ ID NO: 11. In some embodiments, the AAV particle comprises a viral genome comprising SEQ ID NO: 2033 and a capsid comprising SEQ ID NO: 2679. In some embodiments, the AAV particle comprises a viral genome comprising SEQ ID NO: 2033 and a capsid comprising SEQ ID NO: 2809. In some embodiments, the AAV particle comprises a viral genome comprising SEQ ID NO: 2033 and a capsid comprising SEQ ID NO: 2871.

[0793] In some embodiments, the AAV particle comprises a viral genome comprising SEQ ID NO: 2034 and a VOY101 capsid. In some embodiments, the AAV particle comprises a viral genome comprising SEQ ID NO: 2034 and a VOY201 capsid. In some embodiments, the AAV particle comprises a viral genome comprising SEQ ID NO: 2034 and an AAV9 capsid. In some embodiments, the AAV particle comprises a viral genome comprising SEQ ID NO: 2034 and an AAV9K449R capsid. In some embodiments, the AAV particle comprises a viral genome comprising SEQ ID NO: 2034 and an AAVPHP.B capsid. In some embodiments, the AAV particle comprises a viral genome comprising SEQ ID NO: 2034 and an AAVPHP.N capsid. In some embodiments, the AAV particle comprises a viral genome comprising SEQ ID NO: 2034 and an AAV2 variant capsid. In some embodiments, the AAV particle comprises a viral genome comprising SEQ ID NO: 2034 and an AAV2/3 variant capsid. In some embodiments, the AAV particle comprises a viral genome comprising SEQ ID NO: 2034 and a capsid comprising SEQ ID NO: 1. In some embodiments, the AAV particle comprises a viral genome comprising SEQ ID NO: 2034 and a capsid encoded by a nucleic acid sequence comprising SEQ ID NO: 2. In some embodiments, the AAV particle comprises a viral genome comprising SEQ ID NO: 2034 and a capsid comprising SEQ ID NO: 4534. In some embodiments, the AAV particle comprises a viral genome comprising SEQ ID NO: 2034 and a capsid encoded by a nucleic acid sequence comprising SEQ ID NO: 3. In some embodiments, the AAV particle comprises a viral genome comprising SEQ ID NO: 2034 and a capsid comprising SEQ ID NO: 138. In some embodiments, the AAV particle comprises a viral genome comprising SEQ ID NO: 2034 and a capsid encoded by a nucleic acid sequence comprising SEQ ID NO: 137. In some embodiments, the AAV particle comprises a viral genome comprising SEQ ID NO: 2034 and a capsid comprising SEQ ID NO: 5. In some embodiments, the AAV particle comprises a viral genome comprising SEQ ID NO: 2034 and a capsid encoded by a nucleic acid sequence comprising SEQ ID NO: 6. In some embodiments, the AAV particle comprises a viral genome comprising SEQ ID NO: 2034 and a capsid comprising SEQ ID NO: 4. In some embodiments, the AAV particle comprises a viral genome comprising SEQ ID NO: 2034 and a capsid comprising SEQ ID NO: 11. In some embodiments, the AAV particle comprises a viral genome comprising SEQ ID NO: 2034 and a capsid comprising SEQ ID NO: 2679. In some embodiments, the AAV particle comprises a viral genome comprising SEQ ID NO: 2034 and a capsid comprising SEQ ID NO: 2809. In some embodiments, the AAV particle comprises a viral genome comprising SEQ ID NO: 2034 and a capsid comprising SEQ ID NO: 2871.

[0794] In some embodiments, the AAV particle comprises a viral genome comprising SEQ ID NO: 2035 and a VOY101 capsid. In some embodiments, the AAV particle comprises a viral genome comprising SEQ ID NO: 2035 and a VOY201 capsid. In some embodiments, the AAV particle comprises a viral genome comprising SEQ ID NO: 2035 and an AAV9 capsid. In some embodiments, the AAV particle comprises a viral genome comprising SEQ ID NO: 2035 and an AAV9K449R capsid. In some embodiments, the AAV particle comprises a viral genome comprising SEQ ID NO: 2035 and an AAVPHP.B capsid. In some embodiments, the AAV particle comprises a viral genome comprising SEQ ID NO: 2035 and an AAVPHP.N capsid. In some embodiments, the AAV particle comprises a viral genome comprising SEQ ID NO: 2035 and an AAV2 variant capsid. In some embodiments, the AAV particle comprises a viral genome comprising SEQ ID NO: 2035 and an AAV2/3 variant capsid. In some embodiments, the AAV particle comprises a viral genome comprising SEQ ID NO: 2035 and a capsid comprising SEQ ID NO: 1. In some embodiments, the AAV particle comprises a viral genome comprising SEQ ID NO: 2035 and a capsid encoded by a nucleic acid sequence comprising SEQ ID NO: 2. In some embodiments, the AAV particle comprises a viral genome comprising SEQ ID NO: 2035 and a capsid comprising SEQ ID NO: 4534. In some embodiments, the AAV particle comprises a viral genome comprising SEQ ID NO: 2035 and a capsid encoded by a nucleic acid sequence comprising SEQ ID NO: 3. In some embodiments, the AAV particle comprises a viral genome comprising SEQ ID NO: 2035 and a capsid comprising SEQ ID NO: 138. In some embodiments, the AAV particle comprises a viral genome comprising SEQ ID NO: 2035 and a capsid encoded by a nucleic acid sequence comprising SEQ ID NO: 137. In some embodiments, the AAV particle comprises a viral genome comprising SEQ ID NO: 2035 and a capsid comprising SEQ ID NO: 5. In some embodiments, the AAV particle comprises a viral genome comprising SEQ ID NO: 2035 and a capsid encoded by a nucleic acid sequence comprising SEQ ID NO: 6. In some embodiments, the AAV particle comprises a viral genome comprising SEQ ID NO: 2035 and a capsid comprising SEQ ID NO: 4. In some embodiments, the AAV particle comprises a viral genome comprising SEQ ID NO: 2035 and a capsid comprising SEQ ID NO: 11. In some embodiments, the AAV particle comprises a viral genome comprising SEQ ID NO: 2035 and a capsid comprising SEQ ID NO: 2679. In some embodiments, the AAV particle comprises a viral genome comprising SEQ ID NO: 2035 and a capsid comprising SEQ ID NO: 2809. In some embodiments, the AAV particle comprises a viral genome comprising SEQ ID NO: 2035 and a capsid comprising SEQ ID NO: 2871.

[0795] In some embodiments, the AAV particle comprises a viral genome comprising SEQ ID NO: 2036 and a VOY101 capsid. In some embodiments, the AAV particle comprises a viral genome comprising SEQ ID NO: 2036 and a VOY201 capsid. In some embodiments, the AAV particle comprises a viral genome comprising SEQ ID NO: 2036 and an AAV9 capsid. In some embodiments, the AAV particle comprises a viral genome comprising SEQ ID NO: 2036 and an AAV9K449R capsid. In some embodiments, the AAV particle comprises a viral genome comprising SEQ ID NO: 2036 and an AAVPHP.B capsid. In some embodiments, the AAV particle comprises a viral genome comprising SEQ ID NO: 2036 and an AAVPHP.N capsid. In some embodiments, the AAV particle comprises a viral genome comprising SEQ ID NO: 2036 and an AAV2 variant capsid. In some embodiments, the AAV particle comprises a viral genome comprising SEQ ID NO: 2036 and an AAV2/3 variant capsid. In some embodiments, the AAV particle comprises a viral genome comprising SEQ ID NO: 2036 and a capsid comprising SEQ ID NO: 1. In some embodiments, the AAV particle comprises a viral genome comprising SEQ ID NO: 2036 and a capsid encoded by a nucleic acid sequence comprising SEQ ID NO: 2. In some embodiments, the AAV particle comprises a viral genome comprising SEQ ID NO: 2036 and a capsid comprising SEQ ID NO: 4534. In some embodiments, the AAV particle comprises a viral genome comprising SEQ ID NO: 2036 and a capsid encoded by a nucleic acid sequence comprising SEQ ID NO: 3. In some embodiments, the AAV particle comprises a viral genome comprising SEQ ID NO: 2036 and a capsid comprising SEQ ID NO: 138. In some embodiments, the AAV particle comprises a viral genome comprising SEQ ID NO: 2036 and a capsid encoded by a nucleic acid sequence comprising SEQ ID NO: 137. In some embodiments, the AAV particle comprises a viral genome comprising SEQ ID NO: 2036 and a capsid comprising SEQ ID NO: 5. In some embodiments, the AAV particle comprises a viral genome comprising SEQ ID NO: 2036 and a capsid encoded by a nucleic acid sequence comprising SEQ ID NO: 6. In some embodiments, the AAV particle comprises a viral genome comprising SEQ ID NO: 2036 and a capsid comprising SEQ ID NO: 4. In some embodiments, the AAV particle comprises a viral genome comprising SEQ ID NO: 2036 and a capsid comprising SEQ ID NO: 11. In some embodiments, the AAV particle comprises a viral genome comprising SEQ ID NO: 2036 and a capsid comprising SEQ ID NO: 2679. In some embodiments, the AAV particle comprises a viral genome comprising SEQ ID NO: 2036 and a capsid comprising SEQ ID NO: 2809. In some embodiments, the AAV particle comprises a viral genome comprising SEQ ID NO: 2036 and a capsid comprising SEQ ID NO: 2871.

[0796] In some embodiments, the AAV particle comprises a viral genome comprising SEQ ID NO: 2037 and a VOY101 capsid. In some embodiments, the AAV particle comprises a viral genome comprising SEQ ID NO: 2037 and a VOY201 capsid. In some embodiments, the AAV particle comprises a viral genome comprising SEQ ID NO: 2037 and an AAV9 capsid. In some embodiments, the AAV particle comprises a viral genome comprising SEQ ID NO: 2037 and an AAV9K449R capsid. In some embodiments, the AAV particle comprises a viral genome comprising SEQ ID NO: 2037 and an AAVPHP.B capsid. In some embodiments, the AAV particle comprises a viral genome comprising SEQ ID NO: 2037 and an AAVPHP.N capsid. In some embodiments, the AAV particle comprises a viral genome comprising SEQ ID NO: 2037 and an AAV2 variant capsid. In some embodiments, the AAV particle comprises a viral genome comprising SEQ ID NO: 2037 and an AAV2/3 variant capsid. In some embodiments, the AAV particle comprises a viral genome comprising SEQ ID NO: 2037 and a capsid comprising SEQ ID NO: 1. In some embodiments, the AAV particle comprises a viral genome comprising SEQ ID NO: 2037 and a capsid encoded by a nucleic acid sequence comprising SEQ ID NO: 2. In some embodiments, the AAV particle comprises a viral genome comprising SEQ ID NO: 2037 and a capsid comprising SEQ ID NO: 4534. In some embodiments, the AAV particle comprises a viral genome comprising SEQ ID NO: 2037 and a capsid encoded by a nucleic acid sequence comprising SEQ ID NO: 3. In some embodiments, the AAV particle comprises a viral genome comprising SEQ ID NO: 2037 and a capsid comprising SEQ ID NO: 138. In some embodiments, the AAV particle comprises a viral genome comprising SEQ ID NO: 2037 and a capsid encoded by a nucleic acid sequence comprising SEQ ID NO: 137. In some embodiments, the AAV particle comprises a viral genome comprising SEQ ID NO: 2037 and a capsid comprising SEQ ID NO: 5. In some embodiments, the AAV particle comprises a viral genome comprising SEQ ID NO: 2037 and a capsid encoded by a nucleic acid sequence comprising SEQ ID NO: 6. In some embodiments, the AAV particle comprises a viral genome comprising SEQ ID NO: 2037 and a capsid comprising SEQ ID NO: 4. In some embodiments, the AAV particle comprises a viral genome comprising SEQ ID NO: 2037 and a capsid comprising SEQ ID NO: 11. In some embodiments, the AAV particle comprises a viral genome comprising SEQ ID NO: 2037 and a capsid comprising SEQ ID NO: 2679. In some embodiments, the AAV particle comprises a viral genome comprising SEQ ID NO: 2037 and a capsid comprising SEQ ID NO: 2809. In some embodiments, the AAV particle comprises a viral genome comprising SEQ ID NO: 2037 and a capsid comprising SEQ ID NO: 2871.

[0797] In some embodiments, the AAV particle comprises a viral genome comprising SEQ ID NO: 2038 and a VOY101 capsid. In some embodiments, the AAV particle comprises a viral genome comprising SEQ ID NO: 2038 and a VOY201 capsid. In some embodiments, the AAV particle comprises a viral genome comprising SEQ ID NO: 2038 and an AAV9 capsid. In some embodiments, the AAV particle comprises a viral genome comprising SEQ ID NO: 2038 and an AAV9K449R capsid. In some embodiments, the AAV particle comprises a viral genome comprising SEQ ID NO: 2038 and an AAVPHP.B capsid. In some embodiments, the AAV particle comprises a viral genome comprising SEQ ID NO: 2038 and an AAVPHP.N capsid. In some embodiments, the AAV particle comprises a viral genome comprising SEQ ID NO: 2038 and an AAV2 variant capsid. In some embodiments, the AAV particle comprises a viral genome comprising SEQ ID NO: 2038 and an AAV2/3 variant capsid. In some embodiments, the AAV particle comprises a viral genome comprising SEQ ID NO: 2038 and a capsid comprising SEQ ID NO: 1. In some embodiments, the AAV particle comprises a viral genome comprising SEQ ID NO: 2038 and a capsid encoded by a nucleic acid sequence comprising SEQ ID NO: 2. In some embodiments, the AAV particle comprises a viral genome comprising SEQ ID NO: 2038 and a capsid comprising SEQ ID NO: 4534. In some embodiments, the AAV particle comprises a viral genome comprising SEQ ID NO: 2038 and a capsid encoded by a nucleic acid sequence comprising SEQ ID NO: 3. In some embodiments, the AAV particle comprises a viral genome comprising SEQ ID NO: 2038 and a capsid comprising SEQ ID NO: 138. In some embodiments, the AAV particle comprises a viral genome comprising SEQ ID NO: 2038 and a capsid encoded by a nucleic acid sequence comprising SEQ ID NO: 137. In some embodiments, the AAV particle comprises a viral genome comprising SEQ ID NO: 2038 and a capsid comprising SEQ ID NO: 5. In some embodiments, the AAV particle comprises a viral genome comprising SEQ ID NO: 2038 and a capsid encoded by a nucleic acid sequence comprising SEQ ID NO: 6. In some embodiments, the AAV particle comprises a viral genome comprising SEQ ID NO: 2038 and a capsid comprising SEQ ID NO: 4. In some embodiments, the AAV particle comprises a viral genome comprising SEQ ID NO: 2038 and a capsid comprising SEQ ID NO: 11. In some embodiments, the AAV particle comprises a viral genome comprising SEQ ID NO: 2038 and a capsid comprising SEQ ID NO: 2679. In some embodiments, the AAV particle comprises a viral genome comprising SEQ ID NO: 2038 and a capsid comprising SEQ ID NO: 2809. In some embodiments, the AAV particle comprises a viral genome comprising SEQ ID NO: 2038 and a capsid comprising SEQ ID NO: 2871.

[0798] In some embodiments, the AAV particle comprises a viral genome comprising SEQ ID NO: 2039 and a VOY101 capsid. In some embodiments, the AAV particle comprises a viral genome comprising SEQ ID NO: 2039 and a VOY201 capsid. In some embodiments, the AAV particle comprises a viral genome comprising SEQ ID NO: 2039 and an AAV9 capsid. In some embodiments, the AAV particle comprises a viral genome comprising SEQ ID NO: 2039 and an AAV9K449R capsid. In some embodiments, the AAV particle comprises a viral genome comprising SEQ ID NO: 2039 and an AAVPHP.B capsid. In some embodiments, the AAV particle comprises a viral genome comprising SEQ ID NO: 2039 and an AAVPHP.N capsid. In some embodiments, the AAV particle comprises a viral genome comprising SEQ ID NO: 2039 and an AAV2 variant capsid. In some embodiments, the AAV particle comprises a viral genome comprising SEQ ID NO: 2039 and an AAV2/3 variant capsid. In some embodiments, the AAV particle comprises a viral genome comprising SEQ ID NO: 2039 and a capsid comprising SEQ ID NO: 1. In some embodiments, the AAV particle comprises a viral genome comprising SEQ ID NO: 2039 and a capsid encoded by a nucleic acid sequence comprising SEQ ID NO: 2. In some embodiments, the AAV particle comprises a viral genome comprising SEQ ID NO: 2039 and a capsid comprising SEQ ID NO: 4534. In some embodiments, the AAV particle comprises a viral genome comprising SEQ ID NO: 2039 and a capsid encoded by a nucleic acid sequence comprising SEQ ID NO: 3. In some embodiments, the AAV particle comprises a viral genome comprising SEQ ID NO: 2039 and a capsid comprising SEQ ID NO: 138. In some embodiments, the AAV particle comprises a viral genome comprising SEQ ID NO: 2039 and a capsid encoded by a nucleic acid sequence comprising SEQ ID NO: 137. In some embodiments, the AAV particle comprises a viral genome comprising SEQ ID NO: 2039 and a capsid comprising SEQ ID NO: 5. In some embodiments, the AAV particle comprises a viral genome comprising SEQ ID NO: 2039 and a capsid encoded by a nucleic acid sequence comprising SEQ ID NO: 6. In some embodiments, the AAV particle comprises a viral genome comprising SEQ ID NO: 2039 and a capsid comprising SEQ ID NO: 4. In some embodiments, the AAV particle comprises a viral genome comprising SEQ ID NO: 2039 and a capsid comprising SEQ ID NO: 11. In some embodiments, the AAV particle comprises a viral genome comprising SEQ ID NO: 2039 and a capsid comprising SEQ ID NO: 2679. In some embodiments, the AAV particle comprises a viral genome comprising SEQ ID NO: 2039 and a capsid comprising SEQ ID NO: 2809. In some embodiments, the AAV particle comprises a viral genome comprising SEQ ID NO: 2039 and a capsid comprising SEQ ID NO: 2871.

[0799] In some embodiments, the AAV particle comprises a viral genome comprising SEQ ID NO: 2040 and a VOY101 capsid. In some embodiments, the AAV particle comprises a viral genome comprising SEQ ID NO: 2040 and a VOY201 capsid. In some embodiments, the AAV particle comprises a viral genome comprising SEQ ID NO: 2040 and an AAV9 capsid. In some embodiments, the AAV particle comprises a viral genome comprising SEQ ID NO: 2040 and an AAV9K449R capsid. In some embodiments, the AAV particle comprises a viral genome comprising SEQ ID NO: 2040 and an AAVPHP.B capsid. In some embodiments, the AAV particle comprises a viral genome comprising SEQ ID NO: 2040 and an AAVPHP.N capsid. In some embodiments, the AAV particle comprises a viral genome comprising SEQ ID NO: 2040 and an AAV2 variant capsid. In some embodiments, the AAV particle comprises a viral genome comprising SEQ ID NO: 2040 and an AAV2/3 variant capsid. In some embodiments, the AAV particle comprises a viral genome comprising SEQ ID NO: 2040 and a capsid comprising SEQ ID NO: 1. In some embodiments, the AAV particle comprises a viral genome comprising SEQ ID NO: 2040 and a capsid encoded by a nucleic acid sequence comprising SEQ ID NO: 2. In some embodiments, the AAV particle comprises a viral genome comprising SEQ ID NO: 2040 and a capsid comprising SEQ ID NO: 4534. In some embodiments, the AAV particle comprises a viral genome comprising SEQ ID NO: 2040 and a capsid encoded by a nucleic acid sequence comprising SEQ ID NO: 3. In some embodiments, the AAV particle comprises a viral genome comprising SEQ ID NO: 2040 and a capsid comprising SEQ ID NO: 138. In some embodiments, the AAV particle comprises a viral genome comprising SEQ ID NO: 2040 and a capsid encoded by a nucleic acid sequence comprising SEQ ID NO: 137. In some embodiments, the AAV particle comprises a viral genome comprising SEQ ID NO: 2040 and a capsid comprising SEQ ID NO: 5. In some embodiments, the AAV particle comprises a viral genome comprising SEQ ID NO: 2040 and a capsid encoded by a nucleic acid sequence comprising SEQ ID NO: 6. In some embodiments, the AAV particle comprises a viral genome comprising SEQ ID NO: 2040 and a capsid comprising SEQ ID NO: 4. In some embodiments, the AAV particle comprises a viral genome comprising SEQ ID NO: 2040 and a capsid comprising SEQ ID NO: 11. In some embodiments, the AAV particle comprises a viral genome comprising SEQ ID NO: 2040 and a capsid comprising SEQ ID NO: 2679. In some embodiments, the AAV particle comprises a viral genome comprising SEQ ID NO: 2040 and a capsid comprising SEQ ID NO: 2809. In some embodiments, the AAV particle comprises a viral genome comprising SEQ ID NO: 2040 and a capsid comprising SEQ ID NO: 2871.

[0800] In some embodiments, the AAV particle comprises a viral genome comprising SEQ ID NO: 2041 and a VOY101 capsid. In some embodiments, the AAV particle comprises a viral genome comprising SEQ ID NO: 2041 and a VOY201 capsid. In some embodiments, the AAV particle comprises a viral genome comprising SEQ ID NO: 2041 and an AAV9 capsid. In some embodiments, the AAV particle comprises a viral genome comprising SEQ ID NO: 2041 and an AAV9K449R capsid. In some embodiments, the AAV particle comprises a viral genome comprising SEQ ID NO: 2041 and an AAVPHP.B capsid. In some embodiments, the AAV particle comprises a viral genome comprising SEQ ID NO: 2041 and an AAVPHP.N capsid. In some embodiments, the AAV particle comprises a viral genome comprising SEQ ID NO: 2041 and an AAV2 variant capsid. In some embodiments, the AAV particle comprises a viral genome comprising SEQ ID NO: 2041 and an AAV2/3 variant capsid. In some embodiments, the AAV particle comprises a viral genome comprising SEQ ID NO: 2041 and a capsid comprising SEQ ID NO: 1. In some embodiments, the AAV particle comprises a viral genome comprising SEQ ID NO: 2041 and a capsid encoded by a nucleic acid sequence comprising SEQ ID NO: 2. In some embodiments, the AAV particle comprises a viral genome comprising SEQ ID NO: 2041 and a capsid comprising SEQ ID NO: 4534. In some embodiments, the AAV particle comprises a viral genome comprising SEQ ID NO: 2041 and a capsid encoded by a nucleic acid sequence comprising SEQ ID NO: 3. In some embodiments, the AAV particle comprises a viral genome comprising SEQ ID NO: 2041 and a capsid comprising SEQ ID NO: 138. In some embodiments, the AAV particle comprises a viral genome comprising SEQ ID NO: 2041 and a capsid encoded by a nucleic acid sequence comprising SEQ ID NO: 137. In some embodiments, the AAV particle comprises a viral genome comprising SEQ ID NO: 2041 and a capsid comprising SEQ ID NO: 5. In some embodiments, the AAV particle comprises a viral genome comprising SEQ ID NO: 2041 and a capsid encoded by a nucleic acid sequence comprising SEQ ID NO: 6. In some embodiments, the AAV particle comprises a viral genome comprising SEQ ID NO: 2041 and a capsid comprising SEQ ID NO: 4. In some embodiments, the AAV particle comprises a viral genome comprising SEQ ID NO: 2041 and a capsid comprising SEQ ID NO: 11. In some embodiments, the AAV particle comprises a viral genome comprising SEQ ID NO: 2041 and a capsid comprising SEQ ID NO: 2679. In some embodiments, the AAV particle comprises a viral genome comprising SEQ ID NO: 2041 and a capsid comprising SEQ ID NO: 2809. In some embodiments, the AAV particle comprises a viral genome comprising SEQ ID NO: 2041 and a capsid comprising SEQ ID NO: 2871.

[0801] In some embodiments, the AAV particle comprises a viral genome comprising SEQ ID NO: 2042 and a VOY101 capsid. In some embodiments, the AAV particle comprises a viral genome comprising SEQ ID NO: 2042 and a VOY201 capsid. In some embodiments, the AAV particle comprises a viral genome comprising SEQ ID NO: 2042 and an AAV9 capsid. In some embodiments, the AAV particle comprises a viral genome comprising SEQ ID NO: 2042 and an AAV9K449R capsid. In some embodiments, the AAV particle comprises a viral genome comprising SEQ ID NO: 2042 and an AAVPHP.B capsid. In some embodiments, the AAV particle comprises a viral genome comprising SEQ ID NO: 2042 and an AAVPHP.N capsid. In some embodiments, the AAV particle comprises a viral genome comprising SEQ ID NO: 2042 and an AAV2 variant capsid. In some embodiments, the AAV particle comprises a viral genome comprising SEQ ID NO: 2042 and an AAV2/3 variant capsid. In some embodiments, the AAV particle comprises a viral genome comprising SEQ ID NO: 2042 and a capsid comprising SEQ ID NO: 1. In some embodiments, the AAV particle comprises a viral genome comprising SEQ ID NO: 2042 and a capsid encoded by a nucleic acid sequence comprising SEQ ID NO: 2. In some embodiments, the AAV particle comprises a viral genome comprising SEQ ID NO: 2042 and a capsid comprising SEQ ID NO: 4534. In some embodiments, the AAV particle comprises a viral genome comprising SEQ ID NO: 2042 and a capsid encoded by a nucleic acid sequence comprising SEQ ID NO: 3. In some embodiments, the AAV particle comprises a viral genome comprising SEQ ID NO: 2042 and a capsid comprising SEQ ID NO: 138. In some embodiments, the AAV particle comprises a viral genome comprising SEQ ID NO: 2042 and a capsid encoded by a nucleic acid sequence comprising SEQ ID NO: 137. In some embodiments, the AAV particle comprises a viral genome comprising SEQ ID NO: 2042 and a capsid comprising SEQ ID NO: 5. In some embodiments, the AAV particle comprises a viral genome comprising SEQ ID NO: 2042 and a capsid encoded by a nucleic acid sequence comprising SEQ ID NO: 6. In some embodiments, the AAV particle comprises a viral genome comprising SEQ ID NO: 2042 and a capsid comprising SEQ ID NO: 4. In some embodiments, the AAV particle comprises a viral genome comprising SEQ ID NO: 2042 and a capsid comprising SEQ ID NO: 11. In some embodiments, the AAV particle comprises a viral genome comprising SEQ ID NO: 2042 and a capsid comprising SEQ ID NO: 2679. In some embodiments, the AAV particle comprises a viral genome comprising SEQ ID NO: 2042 and a capsid comprising SEQ ID NO: 2809. In some embodiments, the AAV particle comprises a viral genome comprising SEQ ID NO: 2042 and a capsid comprising SEQ ID NO: 2871.

[0802] In some embodiments, the AAV particle comprises a viral genome comprising SEQ ID NO: 2043 and a VOY101 capsid. In some embodiments, the AAV particle comprises a viral genome comprising SEQ ID NO: 2043 and a VOY201 capsid. In some embodiments, the AAV particle comprises a viral genome comprising SEQ ID NO: 2043 and an AAV9 capsid. In some embodiments, the AAV particle comprises a viral genome comprising SEQ ID NO: 2043 and an AAV9K449R capsid. In some embodiments, the AAV particle comprises a viral genome comprising SEQ ID NO: 2043 and an AAVPHP.B capsid. In some embodiments, the AAV particle comprises a viral genome comprising SEQ ID NO: 2043 and an AAVPHP.N capsid. In some embodiments, the AAV particle comprises a viral genome comprising SEQ ID NO: 2043 and an AAV2 variant capsid. In some embodiments, the AAV particle comprises a viral genome comprising SEQ ID NO: 2043 and an AAV2/3 variant capsid. In some embodiments, the AAV particle comprises a viral genome comprising SEQ ID NO: 2043 and a capsid comprising SEQ ID NO: 1. In some embodiments, the AAV particle comprises a viral genome comprising SEQ ID NO: 2043 and a capsid encoded by a nucleic acid sequence comprising SEQ ID NO: 2. In some embodiments, the AAV particle comprises a viral genome comprising SEQ ID NO: 2043 and a capsid comprising SEQ ID NO: 4534. In some embodiments, the AAV particle comprises a viral genome comprising SEQ ID NO: 2043 and a capsid encoded by a nucleic acid sequence comprising SEQ ID NO: 3. In some embodiments, the AAV particle comprises a viral genome comprising SEQ ID NO: 2043 and a capsid comprising SEQ ID NO: 138. In some embodiments, the AAV particle comprises a viral genome comprising SEQ ID NO: 2043 and a capsid encoded by a nucleic acid sequence comprising SEQ ID NO: 137. In some embodiments, the AAV particle comprises a viral genome comprising SEQ ID NO: 2043 and a capsid comprising SEQ ID NO: 5. In some embodiments, the AAV particle comprises a viral genome comprising SEQ ID NO: 2043 and a capsid encoded by a nucleic acid sequence comprising SEQ ID NO: 6. In some embodiments, the AAV particle comprises a viral genome comprising SEQ ID NO: 2043 and a capsid comprising SEQ ID NO: 4. In some embodiments, the AAV particle comprises a viral genome comprising SEQ ID NO: 2043 and a capsid comprising SEQ ID NO: 11. In some embodiments, the AAV particle comprises a viral genome comprising SEQ ID NO: 2043 and a capsid comprising SEQ ID NO: 2679. In some embodiments, the AAV particle comprises a viral genome comprising SEQ ID NO: 2043 and a capsid comprising SEQ ID NO: 2809. In some embodiments, the AAV particle comprises a viral genome comprising SEQ ID NO: 2043 and a capsid comprising SEQ ID NO: 2871.

[0803] In some embodiments, the AAV particle comprises a viral genome comprising SEQ ID NO: 2044 and a VOY101 capsid. In some embodiments, the AAV particle comprises a viral genome comprising SEQ ID NO: 2044 and a VOY201 capsid. In some embodiments, the AAV particle comprises a viral genome comprising SEQ ID NO: 2044 and an AAV9 capsid. In some embodiments, the AAV particle comprises a viral genome comprising SEQ ID NO: 2044 and an AAV9K449R capsid. In some embodiments, the AAV particle comprises a viral genome comprising SEQ ID NO: 2044 and an AAVPHP.B capsid. In some embodiments, the AAV particle comprises a viral genome comprising SEQ ID NO: 2044 and an AAVPHP.N capsid. In some embodiments, the AAV particle comprises a viral genome comprising SEQ ID NO: 2044 and an AAV2 variant capsid. In some embodiments, the AAV particle comprises a viral genome comprising SEQ ID NO: 2044 and an AAV2/3 variant capsid. In some embodiments, the AAV particle comprises a viral genome comprising SEQ ID NO: 2044 and a capsid comprising SEQ ID NO: 1. In some embodiments, the AAV particle comprises a viral genome comprising SEQ ID NO: 2044 and a capsid encoded by a nucleic acid sequence comprising SEQ ID NO: 2. In some embodiments, the AAV particle comprises a viral genome comprising SEQ ID NO: 2044 and a capsid comprising SEQ ID NO: 4534. In some embodiments, the AAV particle comprises a viral genome comprising SEQ ID NO: 2044 and a capsid encoded by a nucleic acid sequence comprising SEQ ID NO: 3. In some embodiments, the AAV particle comprises a viral genome comprising SEQ ID NO: 2044 and a capsid comprising SEQ ID NO: 138. In some embodiments, the AAV particle comprises a viral genome comprising SEQ ID NO: 2044 and a capsid encoded by a nucleic acid sequence comprising SEQ ID NO: 137. In some embodiments, the AAV particle comprises a viral genome comprising SEQ ID NO: 2044 and a capsid comprising SEQ ID NO: 5. In some embodiments, the AAV particle comprises a viral genome comprising SEQ ID NO: 2044 and a capsid encoded by a nucleic acid sequence comprising SEQ ID NO: 6. In some embodiments, the AAV particle comprises a viral genome comprising SEQ ID NO: 2044 and a capsid comprising SEQ ID NO: 4. In some embodiments, the AAV particle comprises a viral genome comprising SEQ ID NO: 2044 and a capsid comprising SEQ ID NO: 11. In some embodiments, the AAV particle comprises a viral genome comprising SEQ ID NO: 2044 and a capsid comprising SEQ ID NO: 2679. In some embodiments, the AAV particle comprises a viral genome comprising SEQ ID NO: 2044 and a capsid comprising SEQ ID NO: 2809. In some embodiments, the AAV particle comprises a viral genome comprising SEQ ID NO: 2044 and a capsid comprising SEQ ID NO: 2871.

[0804] In some embodiments, the AAV particle comprises a viral genome comprising SEQ ID NO: 2045 and a VOY101 capsid. In some embodiments, the AAV particle comprises a viral genome comprising SEQ ID NO: 2045 and a VOY201 capsid. In some embodiments, the AAV particle comprises a viral genome comprising SEQ ID NO: 2045 and an AAV9 capsid. In some embodiments, the AAV particle comprises a viral genome comprising SEQ ID NO: 2045 and an AAV9K449R capsid. In some embodiments, the AAV particle comprises a viral genome comprising SEQ ID NO: 2045 and an AAVPHP.B capsid. In some embodiments, the AAV particle comprises a viral genome comprising SEQ ID NO: 2045 and an AAVPHP.N capsid. In some embodiments, the AAV particle comprises a viral genome comprising SEQ ID NO: 2045 and an AAV2 variant capsid. In some embodiments, the AAV particle comprises a viral genome comprising SEQ ID NO: 2045 and an AAV2/3 variant capsid. In some embodiments, the AAV particle comprises a viral genome comprising SEQ ID NO: 2045 and a capsid comprising SEQ ID NO: 1. In some embodiments, the AAV particle comprises a viral genome comprising SEQ ID NO: 2045 and a capsid encoded by a nucleic acid sequence comprising SEQ ID NO: 2. In some embodiments, the AAV particle comprises a viral genome comprising SEQ ID NO: 2045 and a capsid comprising SEQ ID NO: 4534. In some embodiments, the AAV particle comprises a viral genome comprising SEQ ID NO: 2045 and a capsid encoded by a nucleic acid sequence comprising SEQ ID NO: 3. In some embodiments, the AAV particle comprises a viral genome comprising SEQ ID NO: 2045 and a capsid comprising SEQ ID NO: 138. In some embodiments, the AAV particle comprises a viral genome comprising SEQ ID NO: 2045 and a capsid encoded by a nucleic acid sequence comprising SEQ ID NO: 137. In some embodiments, the AAV particle comprises a viral genome comprising SEQ ID NO: 2045 and a capsid comprising SEQ ID NO: 5. In some embodiments, the AAV particle comprises a viral genome comprising SEQ ID NO: 2045 and a capsid encoded by a nucleic acid sequence comprising SEQ ID NO: 6. In some embodiments, the AAV particle comprises a viral genome comprising SEQ ID NO: 2045 and a capsid comprising SEQ ID NO: 4. In some embodiments, the AAV particle comprises a viral genome comprising SEQ ID NO: 2045 and a capsid comprising SEQ ID NO: 11. In some embodiments, the AAV particle comprises a viral genome comprising SEQ ID NO: 2045 and a capsid comprising SEQ ID NO: 2679. In some embodiments, the AAV particle comprises a viral genome comprising SEQ ID NO: 2045 and a capsid comprising SEQ ID NO: 2809. In some embodiments, the AAV particle comprises a viral genome comprising SEQ ID NO: 2045 and a capsid comprising SEQ ID NO: 2871.

[0805] In some embodiments, the AAV particle comprises a viral genome comprising SEQ ID NO: 2046 and a VOY101 capsid. In some embodiments, the AAV particle comprises a viral genome comprising SEQ ID NO: 2046 and a VOY201 capsid. In some embodiments, the AAV particle comprises a viral genome comprising SEQ ID NO: 2046 and an AAV9 capsid. In some embodiments, the AAV particle comprises a viral genome comprising SEQ ID NO: 2046 and an AAV9K449R capsid. In some embodiments, the AAV particle comprises a viral genome comprising SEQ ID NO: 2046 and an AAVPHP.B capsid. In some embodiments, the AAV particle comprises a viral genome comprising SEQ ID NO: 2046 and an AAVPHP.N capsid. In some embodiments, the AAV particle comprises a viral genome comprising SEQ ID NO: 2046 and an AAV2 variant capsid. In some embodiments, the AAV particle comprises a viral genome comprising SEQ ID NO: 2046 and an AAV2/3 variant capsid. In some embodiments, the AAV particle comprises a viral genome comprising SEQ ID NO: 2046 and a capsid comprising SEQ ID NO: 1. In some embodiments, the AAV particle comprises a viral genome comprising SEQ ID NO: 2046 and a capsid encoded by a nucleic acid sequence comprising SEQ ID NO: 2. In some embodiments, the AAV particle comprises a viral genome comprising SEQ ID NO: 2046 and a capsid comprising SEQ ID NO: 4534. In some embodiments, the AAV particle comprises a viral genome comprising SEQ ID NO: 2046 and a capsid encoded by a nucleic acid sequence comprising SEQ ID NO: 3. In some embodiments, the AAV particle comprises a viral genome comprising SEQ ID NO: 2046 and a capsid comprising SEQ ID NO: 138. In some embodiments, the AAV particle comprises a viral genome comprising SEQ ID NO: 2046 and a capsid encoded by a nucleic acid sequence comprising SEQ ID NO: 137. In some embodiments, the AAV particle comprises a viral genome comprising SEQ ID NO: 2046 and a capsid comprising SEQ ID NO: 5. In some embodiments, the AAV particle comprises a viral genome comprising SEQ ID NO: 2046 and a capsid encoded by a nucleic acid sequence comprising SEQ ID NO: 6. In some embodiments, the AAV particle comprises a viral genome comprising SEQ ID NO: 2046 and a capsid comprising SEQ ID NO: 4. In some embodiments, the AAV particle comprises a viral genome comprising SEQ ID NO: 2046 and a capsid comprising SEQ ID NO: 11. In some embodiments, the AAV particle comprises a viral genome comprising SEQ ID NO: 2046 and a capsid comprising SEQ ID NO: 2679. In some embodiments, the AAV particle comprises a viral genome comprising SEQ ID NO: 2046 and a capsid comprising SEQ ID NO: 2809. In some embodiments, the AAV particle comprises a viral genome comprising SEQ ID NO: 2046 and a capsid comprising SEQ ID NO: 2871.

[0806] In some embodiments, the AAV particle comprises a viral genome comprising SEQ ID NO: 2047 and a VOY101 capsid. In some embodiments, the AAV particle comprises a viral genome comprising SEQ ID NO: 2047 and a VOY201 capsid. In some embodiments, the AAV particle comprises a viral genome comprising SEQ ID NO: 2047 and an AAV9 capsid. In some embodiments, the AAV particle comprises a viral genome comprising SEQ ID NO: 2047 and an AAV9K449R capsid. In some embodiments, the AAV particle comprises a viral genome comprising SEQ ID NO: 2047 and an AAVPHP.B capsid. In some embodiments, the AAV particle comprises a viral genome comprising SEQ ID NO: 2047 and an AAVPHP.N capsid. In some embodiments, the AAV particle comprises a viral genome comprising SEQ ID NO: 2047 and an AAV2 variant capsid. In some embodiments, the AAV particle comprises a viral genome comprising SEQ ID NO: 2047 and an AAV2/3 variant capsid. In some embodiments, the AAV particle comprises a viral genome comprising SEQ ID NO: 2047 and a capsid comprising SEQ ID NO: 1. In some embodiments, the AAV particle comprises a viral genome comprising SEQ ID NO: 2047 and a capsid encoded by a nucleic acid sequence comprising SEQ ID NO: 2. In some embodiments, the AAV particle comprises a viral genome comprising SEQ ID NO: 2047 and a capsid comprising SEQ ID NO: 4534. In some embodiments, the AAV particle comprises a viral genome comprising SEQ ID NO: 2047 and a capsid encoded by a nucleic acid sequence comprising SEQ ID NO: 3. In some embodiments, the AAV particle comprises a viral genome comprising SEQ ID NO: 2047 and a capsid comprising SEQ ID NO: 138. In some embodiments, the AAV particle comprises a viral genome comprising SEQ ID NO: 2047 and a capsid encoded by a nucleic acid sequence comprising SEQ ID NO: 137. In some embodiments, the AAV particle comprises a viral genome comprising SEQ ID NO: 2047 and a capsid comprising SEQ ID NO: 5. In some embodiments, the AAV particle comprises a viral genome comprising SEQ ID NO: 2047 and a capsid encoded by a nucleic acid sequence comprising SEQ ID NO: 6. In some embodiments, the AAV particle comprises a viral genome comprising SEQ ID NO: 2047 and a capsid comprising SEQ ID NO: 4. In some embodiments, the AAV particle comprises a viral genome comprising SEQ ID NO: 2047 and a capsid comprising SEQ ID NO: 11. In some embodiments, the AAV particle comprises a viral genome comprising SEQ ID NO: 2047 and a capsid comprising SEQ ID NO: 2679. In some embodiments, the AAV particle comprises a viral genome comprising SEQ ID NO: 2047 and a capsid comprising SEQ ID NO: 2809. In some embodiments, the AAV particle comprises a viral genome comprising SEQ ID NO: 2047 and a capsid comprising SEQ ID NO: 2871.

[0807] In some embodiments, the AAV particle comprises a viral genome comprising SEQ ID NO: 2048 and a VOY101 capsid. In some embodiments, the AAV particle comprises a viral genome comprising SEQ ID NO: 2048 and a VOY201 capsid. In some embodiments, the AAV particle comprises a viral genome comprising SEQ ID NO: 2048 and an AAV9 capsid. In some embodiments, the AAV particle comprises a viral genome comprising SEQ ID NO: 2048 and an AAV9K449R capsid. In some embodiments, the AAV particle comprises a viral genome comprising SEQ ID NO: 2048 and an AAVPHP.B capsid. In some embodiments, the AAV particle comprises a viral genome comprising SEQ ID NO: 2048 and an AAVPHP.N capsid. In some embodiments, the AAV particle comprises a viral genome comprising SEQ ID NO: 2048 and an AAV2 variant capsid. In some embodiments, the AAV particle comprises a viral genome comprising SEQ ID NO: 2048 and an AAV2/3 variant capsid. In some embodiments, the AAV particle comprises a viral genome comprising SEQ ID NO: 2048 and a capsid comprising SEQ ID NO: 1. In some embodiments, the AAV particle comprises a viral genome comprising SEQ ID NO: 2048 and a capsid encoded by a nucleic acid sequence comprising SEQ ID NO: 2. In some embodiments, the AAV particle comprises a viral genome comprising SEQ ID NO: 2048 and a capsid comprising SEQ ID NO: 4534. In some embodiments, the AAV particle comprises a viral genome comprising SEQ ID NO: 2048 and a capsid encoded by a nucleic acid sequence comprising SEQ ID NO: 3. In some embodiments, the AAV particle comprises a viral genome comprising SEQ ID NO: 2048 and a capsid comprising SEQ ID NO: 138. In some embodiments, the AAV particle comprises a viral genome comprising SEQ ID NO: 2048 and a capsid encoded by a nucleic acid sequence comprising SEQ ID NO: 137. In some embodiments, the AAV particle comprises a viral genome comprising SEQ ID NO: 2048 and a capsid comprising SEQ ID NO: 5. In some embodiments, the AAV particle comprises a viral genome comprising SEQ ID NO: 2048 and a capsid encoded by a nucleic acid sequence comprising SEQ ID NO: 6. In some embodiments, the AAV particle comprises a viral genome comprising SEQ ID NO: 2048 and a capsid comprising SEQ ID NO: 4. In some embodiments, the AAV particle comprises a viral genome comprising SEQ ID NO: 2048 and a capsid comprising SEQ ID NO: 11. In some embodiments, the AAV particle comprises a viral genome comprising SEQ ID NO: 2048 and a capsid comprising SEQ ID NO: 2679. In some embodiments, the AAV particle comprises a viral genome comprising SEQ ID NO: 2048 and a capsid comprising SEQ ID NO: 2809. In some embodiments, the AAV particle comprises a viral genome comprising SEQ ID NO: 2048 and a capsid comprising SEQ ID NO: 2871.

[0808] In some embodiments, the AAV particle comprises a viral genome comprising SEQ ID NO: 2049 and a VOY101 capsid. In some embodiments, the AAV particle comprises a viral genome comprising SEQ ID NO: 2049 and a VOY201 capsid. In some embodiments, the AAV particle comprises a viral genome comprising SEQ ID NO: 2049 and an AAV9 capsid. In some embodiments, the AAV particle comprises a viral genome comprising SEQ ID NO: 2049 and an AAV9K449R capsid. In some embodiments, the AAV particle comprises a viral genome comprising SEQ ID NO: 2049 and an AAVPHP.B capsid. In some embodiments, the AAV particle comprises a viral genome comprising SEQ ID NO: 2049 and an AAVPHP.N capsid. In some embodiments, the AAV particle comprises a viral genome comprising SEQ ID NO: 2049 and an AAV2 variant capsid. In some embodiments, the AAV particle comprises a viral genome comprising SEQ ID NO: 2049 and an AAV2/3 variant capsid. In some embodiments, the AAV particle comprises a viral genome comprising SEQ ID NO: 2049 and a capsid comprising SEQ ID NO: 1. In some embodiments, the AAV particle comprises a viral genome comprising SEQ ID NO: 2049 and a capsid encoded by a nucleic acid sequence comprising SEQ ID NO: 2. In some embodiments, the AAV particle comprises a viral genome comprising SEQ ID NO: 2049 and a capsid comprising SEQ ID NO: 4534. In some embodiments, the AAV particle comprises a viral genome comprising SEQ ID NO: 2049 and a capsid encoded by a nucleic acid sequence comprising SEQ ID NO: 3. In some embodiments, the AAV particle comprises a viral genome comprising SEQ ID NO: 2049 and a capsid comprising SEQ ID NO: 138. In some embodiments, the AAV particle comprises a viral genome comprising SEQ ID NO: 2049 and a capsid encoded by a nucleic acid sequence comprising SEQ ID NO: 137. In some embodiments, the AAV particle comprises a viral genome comprising SEQ ID NO: 2049 and a capsid comprising SEQ ID NO: 5. In some embodiments, the AAV particle comprises a viral genome comprising SEQ ID NO: 2049 and a capsid encoded by a nucleic acid sequence comprising SEQ ID NO: 6. In some embodiments, the AAV particle comprises a viral genome comprising SEQ ID NO: 2049 and a capsid comprising SEQ ID NO: 4. In some embodiments, the AAV particle comprises a viral genome comprising SEQ ID NO: 2049 and a capsid comprising SEQ ID NO: 11. In some embodiments, the AAV particle comprises a viral genome comprising SEQ ID NO: 2049 and a capsid comprising SEQ ID NO: 2679. In some embodiments, the AAV particle comprises a viral genome comprising SEQ ID NO: 2049 and a capsid comprising SEQ ID NO: 2809. In some embodiments, the AAV particle comprises a viral genome comprising SEQ ID NO: 2049 and a capsid comprising SEQ ID NO: 2871.

[0809] In some embodiments, the AAV particle comprises a viral genome comprising SEQ ID NO: 2050 and a VOY101 capsid. In some embodiments, the AAV particle comprises a viral genome comprising SEQ ID NO: 2050 and a VOY201 capsid. In some embodiments, the AAV particle comprises a viral genome comprising SEQ ID NO: 2050 and an AAV9 capsid. In some embodiments, the AAV particle comprises a viral genome comprising SEQ ID NO: 2050 and an AAV9K449R capsid. In some embodiments, the AAV particle comprises a viral genome comprising SEQ ID NO: 2050 and an AAVPHP.B capsid. In some embodiments, the AAV particle comprises a viral genome comprising SEQ ID NO: 2050 and an AAVPHP.N capsid. In some embodiments, the AAV particle comprises a viral genome comprising SEQ ID NO: 2050 and an AAV2 variant capsid. In some embodiments, the AAV particle comprises a viral genome comprising SEQ ID NO: 2050 and an AAV2/3 variant capsid. In some embodiments, the AAV particle comprises a viral genome comprising SEQ ID NO: 2050 and a capsid comprising SEQ ID NO: 1. In some embodiments, the AAV particle comprises a viral genome comprising SEQ ID NO: 2050 and a capsid encoded by a nucleic acid sequence comprising SEQ ID NO: 2. In some embodiments, the AAV particle comprises a viral genome comprising SEQ ID NO: 2050 and a capsid comprising SEQ ID NO: 4534. In some embodiments, the AAV particle comprises a viral genome comprising SEQ ID NO: 2050 and a capsid encoded by a nucleic acid sequence comprising SEQ ID NO: 3. In some embodiments, the AAV particle comprises a viral genome comprising SEQ ID NO: 2050 and a capsid comprising SEQ ID NO: 138. In some embodiments, the AAV particle comprises a viral genome comprising SEQ ID NO: 2050 and a capsid encoded by a nucleic acid sequence comprising SEQ ID NO: 137. In some embodiments, the AAV particle comprises a viral genome comprising SEQ ID NO: 2050 and a capsid comprising SEQ ID NO: 5. In some embodiments, the AAV particle comprises a viral genome comprising SEQ ID NO: 2050 and a capsid encoded by a nucleic acid sequence comprising SEQ ID NO: 6. In some embodiments, the AAV particle comprises a viral genome comprising SEQ ID NO: 2050 and a capsid comprising SEQ ID NO: 4. In some embodiments, the AAV particle comprises a viral genome comprising SEQ ID NO: 2050 and a capsid comprising SEQ ID NO: 11. In some embodiments, the AAV particle comprises a viral genome comprising SEQ ID NO: 2050 and a capsid comprising SEQ ID NO: 2679. In some embodiments, the AAV particle comprises a viral genome comprising SEQ ID NO: 2050 and a capsid comprising SEQ ID NO: 2809. In some embodiments, the AAV particle comprises a viral genome comprising SEQ ID NO: 2050 and a capsid comprising SEQ ID NO: 2871.

[0810] In some embodiments, the AAV particle comprises a viral genome comprising SEQ ID NO: 2051 and a VOY101 capsid. In some embodiments, the AAV particle comprises a viral genome comprising SEQ ID NO: 2051 and a VOY201 capsid. In some embodiments, the AAV particle comprises a viral genome comprising SEQ ID NO: 2051 and an AAV9 capsid. In some embodiments, the AAV particle comprises a viral genome comprising SEQ ID NO: 2051 and an AAV9K449R capsid. In some embodiments, the AAV particle comprises a viral genome comprising SEQ ID NO: 2051 and an AAVPHP.B capsid. In some embodiments, the AAV particle comprises a viral genome comprising SEQ ID NO: 2051 and an AAVPHP.N capsid. In some embodiments, the AAV particle comprises a viral genome comprising SEQ ID NO: 2051 and an AAV2 variant capsid. In some embodiments, the AAV particle comprises a viral genome comprising SEQ ID NO: 2051 and an AAV2/3 variant capsid. In some embodiments, the AAV particle comprises a viral genome comprising SEQ ID NO: 2051 and a capsid comprising SEQ ID NO: 1. In some embodiments, the AAV particle comprises a viral genome comprising SEQ ID NO: 2051 and a capsid encoded by a nucleic acid sequence comprising SEQ ID NO: 2. In some embodiments, the AAV particle comprises a viral genome comprising SEQ ID NO: 2051 and a capsid comprising SEQ ID NO: 4534. In some embodiments, the AAV particle comprises a viral genome comprising SEQ ID NO: 2051 and a capsid encoded by a nucleic acid sequence comprising SEQ ID NO: 3. In some embodiments, the AAV particle comprises a viral genome comprising SEQ ID NO: 2051 and a capsid comprising SEQ ID NO: 138. In some embodiments, the AAV particle comprises a viral genome comprising SEQ ID NO: 2051 and a capsid encoded by a nucleic acid sequence comprising SEQ ID NO: 137. In some embodiments, the AAV particle comprises a viral genome comprising SEQ ID NO: 2051 and a capsid comprising SEQ ID NO: 5. In some embodiments, the AAV particle comprises a viral genome comprising SEQ ID NO: 2051 and a capsid encoded by a nucleic acid sequence comprising SEQ ID NO: 6. In some embodiments, the AAV particle comprises a viral genome comprising SEQ ID NO: 2051 and a capsid comprising SEQ ID NO: 4. In some embodiments, the AAV particle comprises a viral genome comprising SEQ ID NO: 2051 and a capsid comprising SEQ ID NO: 11. In some embodiments, the AAV particle comprises a viral genome comprising SEQ ID NO: 2051 and a capsid comprising SEQ ID NO: 2679. In some embodiments, the AAV particle comprises a viral genome comprising SEQ ID NO: 2051 and a capsid comprising SEQ ID NO: 2809. In some embodiments, the AAV particle comprises a viral genome comprising SEQ ID NO: 2051 and a capsid comprising SEQ ID NO: 2871.

[0811] In some embodiments, the AAV particle comprises a viral genome comprising SEQ ID NO: 2052 and a VOY101 capsid. In some embodiments, the AAV particle comprises a viral genome comprising SEQ ID NO: 2052 and a VOY201 capsid. In some embodiments, the AAV particle comprises a viral genome comprising SEQ ID NO: 2052 and an AAV9 capsid. In some embodiments, the AAV particle comprises a viral genome comprising SEQ ID NO: 2052 and an AAV9K449R capsid. In some embodiments, the AAV particle comprises a viral genome comprising SEQ ID NO: 2052 and an AAVPHP.B capsid. In some embodiments, the AAV particle comprises a viral genome comprising SEQ ID NO: 2052 and an AAVPHP.N capsid. In some embodiments, the AAV particle comprises a viral genome comprising SEQ ID NO: 2052 and an AAV2 variant capsid. In some embodiments, the AAV particle comprises a viral genome comprising SEQ ID NO: 2052 and an AAV2/3 variant capsid. In some embodiments, the AAV particle comprises a viral genome comprising SEQ ID NO: 2052 and a capsid comprising SEQ ID NO: 1. In some embodiments, the AAV particle comprises a viral genome comprising SEQ ID NO: 2052 and a capsid encoded by a nucleic acid sequence comprising SEQ ID NO: 2. In some embodiments, the AAV particle comprises a viral genome comprising SEQ ID NO: 2052 and a capsid comprising SEQ ID NO: 4534. In some embodiments, the AAV particle comprises a viral genome comprising SEQ ID NO: 2052 and a capsid encoded by a nucleic acid sequence comprising SEQ ID NO: 3. In some embodiments, the AAV particle comprises a viral genome comprising SEQ ID NO: 2052 and a capsid comprising SEQ ID NO: 138. In some embodiments, the AAV particle comprises a viral genome comprising SEQ ID NO: 2052 and a capsid encoded by a nucleic acid sequence comprising SEQ ID NO: 137. In some embodiments, the AAV particle comprises a viral genome comprising SEQ ID NO: 2052 and a capsid comprising SEQ ID NO: 5. In some embodiments, the AAV particle comprises a viral genome comprising SEQ ID NO: 2052 and a capsid encoded by a nucleic acid sequence comprising SEQ ID NO: 6. In some embodiments, the AAV particle comprises a viral genome comprising SEQ ID NO: 2052 and a capsid comprising SEQ ID NO: 4. In some embodiments, the AAV particle comprises a viral genome comprising SEQ ID NO: 2052 and a capsid comprising SEQ ID NO: 11. In some embodiments, the AAV particle comprises a viral genome comprising SEQ ID NO: 2052 and a capsid comprising SEQ ID NO: 2679. In some embodiments, the AAV particle comprises a viral genome comprising SEQ ID NO: 2052 and a capsid comprising SEQ ID NO: 2809. In some embodiments, the AAV particle comprises a viral genome comprising SEQ ID NO: 2052 and a capsid comprising SEQ ID NO: 2871.

[0812] In some embodiments, the AAV particle comprises a viral genome comprising SEQ ID NO: 2053 and a VOY101 capsid. In some embodiments, the AAV particle comprises a viral genome comprising SEQ ID NO: 2053 and a VOY201 capsid. In some embodiments, the AAV particle comprises a viral genome comprising SEQ ID NO: 2053 and an AAV9 capsid. In some embodiments, the AAV particle comprises a viral genome comprising SEQ ID NO: 2053 and an AAV9K449R capsid. In some embodiments, the AAV particle comprises a viral genome comprising SEQ ID NO: 2053 and an AAVPHP.B capsid. In some embodiments, the AAV particle comprises a viral genome comprising SEQ ID NO: 2053 and an AAVPHP.N capsid. In some embodiments, the AAV particle comprises a viral genome comprising SEQ ID NO: 2053 and an AAV2 variant capsid. In some embodiments, the AAV particle comprises a viral genome comprising SEQ ID NO: 2053 and an AAV2/3 variant capsid. In some embodiments, the AAV particle comprises a viral genome comprising SEQ ID NO: 2053 and a capsid comprising SEQ ID NO: 1. In some embodiments, the AAV particle comprises a viral genome comprising SEQ ID NO: 2053 and a capsid encoded by a nucleic acid sequence comprising SEQ ID NO: 2. In some embodiments, the AAV particle comprises a viral genome comprising SEQ ID NO: 2053 and a capsid comprising SEQ ID NO: 4534. In some embodiments, the AAV particle comprises a viral genome comprising SEQ ID NO: 2053 and a capsid encoded by a nucleic acid sequence comprising SEQ ID NO: 3. In some embodiments, the AAV particle comprises a viral genome comprising SEQ ID NO: 2053 and a capsid comprising SEQ ID NO: 138. In some embodiments, the AAV particle comprises a viral genome comprising SEQ ID NO: 2053 and a capsid encoded by a nucleic acid sequence comprising SEQ ID NO: 137. In some embodiments, the AAV particle comprises a viral genome comprising SEQ ID NO: 2053 and a capsid comprising SEQ ID NO: 5. In some embodiments, the AAV particle comprises a viral genome comprising SEQ ID NO: 2053 and a capsid encoded by a nucleic acid sequence comprising SEQ ID NO: 6. In some embodiments, the AAV particle comprises a viral genome comprising SEQ ID NO: 2053 and a capsid comprising SEQ ID NO: 4. In some embodiments, the AAV particle comprises a viral genome comprising SEQ ID NO: 2053 and a capsid comprising SEQ ID NO: 11. In some embodiments, the AAV particle comprises a viral genome comprising SEQ ID NO: 2053 and a capsid comprising SEQ ID NO: 2679. In some embodiments, the AAV particle comprises a viral genome comprising SEQ ID NO: 2053 and a capsid comprising SEQ ID NO: 2809. In some embodiments, the AAV particle comprises a viral genome comprising SEQ ID NO: 2053 and a capsid comprising SEQ ID NO: 2871.

[0813] In some embodiments, the AAV particle comprises a viral genome comprising SEQ ID NO: 2054 and a VOY101 capsid. In some embodiments, the AAV particle comprises a viral genome comprising SEQ ID NO: 2054 and a VOY201 capsid. In some embodiments, the AAV particle comprises a viral genome comprising SEQ ID NO: 2054 and an AAV9 capsid. In some embodiments, the AAV particle comprises a viral genome comprising SEQ ID NO: 2054 and an AAV9K449R capsid. In some embodiments, the AAV particle comprises a viral genome comprising SEQ ID NO: 2054 and an AAVPHP.B capsid. In some embodiments, the AAV particle comprises a viral genome comprising SEQ ID NO: 2054 and an AAVPHP.N capsid. In some embodiments, the AAV particle comprises a viral genome comprising SEQ ID NO: 2054 and an AAV2 variant capsid. In some embodiments, the AAV particle comprises a viral genome comprising SEQ ID NO: 2054 and an AAV2/3 variant capsid. In some embodiments, the AAV particle comprises a viral genome comprising SEQ ID NO: 2054 and a capsid comprising SEQ ID NO: 1. In some embodiments, the AAV particle comprises a viral genome comprising SEQ ID NO: 2054 and a capsid encoded by a nucleic acid sequence comprising SEQ ID NO: 2. In some embodiments, the AAV particle comprises a viral genome comprising SEQ ID NO: 2054 and a capsid comprising SEQ ID NO: 4534. In some embodiments, the AAV particle comprises a viral genome comprising SEQ ID NO: 2054 and a capsid encoded by a nucleic acid sequence comprising SEQ ID NO: 3. In some embodiments, the AAV particle comprises a viral genome comprising SEQ ID NO: 2054 and a capsid comprising SEQ ID NO: 138. In some embodiments, the AAV particle comprises a viral genome comprising SEQ ID NO: 2054 and a capsid encoded by a nucleic acid sequence comprising SEQ ID NO: 137. In some embodiments, the AAV particle comprises a viral genome comprising SEQ ID NO: 2054 and a capsid comprising SEQ ID NO: 5. In some embodiments, the AAV particle comprises a viral genome comprising SEQ ID NO: 2054 and a capsid encoded by a nucleic acid sequence comprising SEQ ID NO: 6. In some embodiments, the AAV particle comprises a viral genome comprising SEQ ID NO: 2054 and a capsid comprising SEQ ID NO: 4. In some embodiments, the AAV particle comprises a viral genome comprising SEQ ID NO: 2054 and a capsid comprising SEQ ID NO: 11. In some embodiments, the AAV particle comprises a viral genome comprising SEQ ID NO: 2054 and a capsid comprising SEQ ID NO: 2679. In some embodiments, the AAV particle comprises a viral genome comprising SEQ ID NO: 2054 and a capsid comprising SEQ ID NO: 2809. In some embodiments, the AAV particle comprises a viral genome comprising SEQ ID NO: 2054 and a capsid comprising SEQ ID NO: 2871.

[0814] In some embodiments, the AAV particle comprises a viral genome comprising SEQ ID NO: 2055 and a VOY101 capsid. In some embodiments, the AAV particle comprises a viral genome comprising SEQ ID NO: 2055 and a VOY201 capsid. In some embodiments, the AAV particle comprises a viral genome comprising SEQ ID NO: 2055 and an AAV9 capsid. In some embodiments, the AAV particle comprises a viral genome comprising SEQ ID NO: 2055 and an AAV9K449R capsid. In some embodiments, the AAV particle comprises a viral genome comprising SEQ ID NO: 2055 and an AAVPHP.B capsid. In some embodiments, the AAV particle comprises a viral genome comprising SEQ ID NO: 2055 and an AAVPHP.N capsid. In some embodiments, the AAV particle comprises a viral genome comprising SEQ ID NO: 2055 and an AAV2 variant capsid. In some embodiments, the AAV particle comprises a viral genome comprising SEQ ID NO: 2055 and an AAV2/3 variant capsid. In some embodiments, the AAV particle comprises a viral genome comprising SEQ ID NO: 2055 and a capsid comprising SEQ ID NO: 1. In some embodiments, the AAV particle comprises a viral genome comprising SEQ ID NO: 2055 and a capsid encoded by a nucleic acid sequence comprising SEQ ID NO: 2. In some embodiments, the AAV particle comprises a viral genome comprising SEQ ID NO: 2055 and a capsid comprising SEQ ID NO: 4534. In some embodiments, the AAV particle comprises a viral genome comprising SEQ ID NO: 2055 and a capsid encoded by a nucleic acid sequence comprising SEQ ID NO: 3. In some embodiments, the AAV particle comprises a viral genome comprising SEQ ID NO: 2055 and a capsid comprising SEQ ID NO: 138. In some embodiments, the AAV particle comprises a viral genome comprising SEQ ID NO: 2055 and a capsid encoded by a nucleic acid sequence comprising SEQ ID NO: 137. In some embodiments, the AAV particle comprises a viral genome comprising SEQ ID NO: 2055 and a capsid comprising SEQ ID NO: 5. In some embodiments, the AAV particle comprises a viral genome comprising SEQ ID NO: 2055 and a capsid encoded by a nucleic acid sequence comprising SEQ ID NO: 6. In some embodiments, the AAV particle comprises a viral genome comprising SEQ ID NO: 2055 and a capsid comprising SEQ ID NO: 4. In some embodiments, the AAV particle comprises a viral genome comprising SEQ ID NO: 2055 and a capsid comprising SEQ ID NO: 11. In some embodiments, the AAV particle comprises a viral genome comprising SEQ ID NO: 2055 and a capsid comprising SEQ ID NO: 2679. In some embodiments, the AAV particle comprises a viral genome comprising SEQ ID NO: 2055 and a capsid comprising SEQ ID NO: 2809. In some embodiments, the AAV particle comprises a viral genome comprising SEQ ID NO: 2055 and a capsid comprising SEQ ID NO: 2871.

[0815] In some embodiments, the AAV particle comprises a viral genome comprising SEQ ID NO: 2056 and a VOY101 capsid. In some embodiments, the AAV particle comprises a viral genome comprising SEQ ID NO: 2056 and a VOY201 capsid. In some embodiments, the AAV particle comprises a viral genome comprising SEQ ID NO: 2056 and an AAV9 capsid. In some embodiments, the AAV particle comprises a viral genome comprising SEQ ID NO: 2056 and an AAV9K449R capsid. In some embodiments, the AAV particle comprises a viral genome comprising SEQ ID NO: 2056 and an AAVPHP.B capsid. In some embodiments, the AAV particle comprises a viral genome comprising SEQ ID NO: 2056 and an AAVPHP.N capsid. In some embodiments, the AAV particle comprises a viral genome comprising SEQ ID NO: 2056 and an AAV2 variant capsid. In some embodiments, the AAV particle comprises a viral genome comprising SEQ ID NO: 2056 and an AAV2/3 variant capsid. In some embodiments, the AAV particle comprises a viral genome comprising SEQ ID NO: 2056 and a capsid comprising SEQ ID NO: 1. In some embodiments, the AAV particle comprises a viral genome comprising SEQ ID NO: 2056 and a capsid encoded by a nucleic acid sequence comprising SEQ ID NO: 2. In some embodiments, the AAV particle comprises a viral genome comprising SEQ ID NO: 2056 and a capsid comprising SEQ ID NO: 4534. In some embodiments, the AAV particle comprises a viral genome comprising SEQ ID NO: 2056 and a capsid encoded by a nucleic acid sequence comprising SEQ ID NO: 3. In some embodiments, the AAV particle comprises a viral genome comprising SEQ ID NO: 2056 and a capsid comprising SEQ ID NO: 138. In some embodiments, the AAV particle comprises a viral genome comprising SEQ ID NO: 2056 and a capsid encoded by a nucleic acid sequence comprising SEQ ID NO: 137. In some embodiments, the AAV particle comprises a viral genome comprising SEQ ID NO: 2056 and a capsid comprising SEQ ID NO: 5. In some embodiments, the AAV particle comprises a viral genome comprising SEQ ID NO: 2056 and a capsid encoded by a nucleic acid sequence comprising SEQ ID NO: 6. In some embodiments, the AAV particle comprises a viral genome comprising SEQ ID NO: 2056 and a capsid comprising SEQ ID NO: 4. In some embodiments, the AAV particle comprises a viral genome comprising SEQ ID NO: 2056 and a capsid comprising SEQ ID NO: 11. In some embodiments, the AAV particle comprises a viral genome comprising SEQ ID NO: 2056 and a capsid comprising SEQ ID NO: 2679. In some embodiments, the AAV particle comprises a viral genome comprising SEQ ID NO: 2056 and a capsid comprising SEQ ID NO: 2809. In some embodiments, the AAV particle comprises a viral genome comprising SEQ ID NO: 2056 and a capsid comprising SEQ ID NO: 2871.

[0816] In some embodiments, the AAV particle comprises a viral genome comprising SEQ ID NO: 2057 and a VOY101 capsid. In some embodiments, the AAV particle comprises a viral genome comprising SEQ ID NO: 2057 and a VOY201 capsid. In some embodiments, the AAV particle comprises a viral genome comprising SEQ ID NO: 2057 and an AAV9 capsid. In some embodiments, the AAV particle comprises a viral genome comprising SEQ ID NO: 2057 and an AAV9K449R capsid. In some embodiments, the AAV particle comprises a viral genome comprising SEQ ID NO: 2057 and an AAVPHP.B capsid. In some embodiments, the AAV particle comprises a viral genome comprising SEQ ID NO: 2057 and an AAVPHP.N capsid. In some embodiments, the AAV particle comprises a viral genome comprising SEQ ID NO: 2057 and an AAV2 variant capsid. In some embodiments, the AAV particle comprises a viral genome comprising SEQ ID NO: 2057 and an AAV2/3 variant capsid. In some embodiments, the AAV particle comprises a viral genome comprising SEQ ID NO: 2057 and a capsid comprising SEQ ID NO: 1. In some embodiments, the AAV particle comprises a viral genome comprising SEQ ID NO: 2057 and a capsid encoded by a nucleic acid sequence comprising SEQ ID NO: 2. In some embodiments, the AAV particle comprises a viral genome comprising SEQ ID NO: 2057 and a capsid comprising SEQ ID NO: 4534. In some embodiments, the AAV particle comprises a viral genome comprising SEQ ID NO: 2057 and a capsid encoded by a nucleic acid sequence comprising SEQ ID NO: 3. In some embodiments, the AAV particle comprises a viral genome comprising SEQ ID NO: 2057 and a capsid comprising SEQ ID NO: 138. In some embodiments, the AAV particle comprises a viral genome comprising SEQ ID NO: 2057 and a capsid encoded by a nucleic acid sequence comprising SEQ ID NO: 137. In some embodiments, the AAV particle comprises a viral genome comprising SEQ ID NO: 2057 and a capsid comprising SEQ ID NO: 5. In some embodiments, the AAV particle comprises a viral genome comprising SEQ ID NO: 2057 and a capsid encoded by a nucleic acid sequence comprising SEQ ID NO: 6. In some embodiments, the AAV particle comprises a viral genome comprising SEQ ID NO: 2057 and a capsid comprising SEQ ID NO: 4. In some embodiments, the AAV particle comprises a viral genome comprising SEQ ID NO: 2057 and a capsid comprising SEQ ID NO: 11. In some embodiments, the AAV particle comprises a viral genome comprising SEQ ID NO: 2057 and a capsid comprising SEQ ID NO: 2679. In some embodiments, the AAV particle comprises a viral genome comprising SEQ ID NO: 2057 and a capsid comprising SEQ ID NO: 2809. In some embodiments, the AAV particle comprises a viral genome comprising SEQ ID NO: 2057 and a capsid comprising SEQ ID NO: 2871.

[0817] In some embodiments, the AAV particle comprises a viral genome comprising SEQ ID NO: 2058 and a VOY101 capsid. In some embodiments, the AAV particle comprises a viral genome comprising SEQ ID NO: 2058 and a VOY201 capsid. In some embodiments, the AAV particle comprises a viral genome comprising SEQ ID NO: 2058 and an AAV9 capsid. In some embodiments, the AAV particle comprises a viral genome comprising SEQ ID NO: 2058 and an AAV9K449R capsid. In some embodiments, the AAV particle comprises a viral genome comprising SEQ ID NO: 2058 and an AAVPHP.B capsid. In some embodiments, the AAV particle comprises a viral genome comprising SEQ ID NO: 2058 and an AAVPHP.N capsid. In some embodiments, the AAV particle comprises a viral genome comprising SEQ ID NO: 2058 and an AAV2 variant capsid. In some embodiments, the AAV particle comprises a viral genome comprising SEQ ID NO: 2058 and an AAV2/3 variant capsid. In some embodiments, the AAV particle comprises a viral genome comprising SEQ ID NO: 2058 and a capsid comprising SEQ ID NO: 1. In some embodiments, the AAV particle comprises a viral genome comprising SEQ ID NO: 2058 and a capsid encoded by a nucleic acid sequence comprising SEQ ID NO: 2. In some embodiments, the AAV particle comprises a viral genome comprising SEQ ID NO: 2058 and a capsid comprising SEQ ID NO: 4534. In some embodiments, the AAV particle comprises a viral genome comprising SEQ ID NO: 2058 and a capsid encoded by a nucleic acid sequence comprising SEQ ID NO: 3. In some embodiments, the AAV particle comprises a viral genome comprising SEQ ID NO: 2058 and a capsid comprising SEQ ID NO: 138. In some embodiments, the AAV particle comprises a viral genome comprising SEQ ID NO: 2058 and a capsid encoded by a nucleic acid sequence comprising SEQ ID NO: 137. In some embodiments, the AAV particle comprises a viral genome comprising SEQ ID NO: 2058 and a capsid comprising SEQ ID NO: 5. In some embodiments, the AAV particle comprises a viral genome comprising SEQ ID NO: 2058 and a capsid encoded by a nucleic acid sequence comprising SEQ ID NO: 6. In some embodiments, the AAV particle comprises a viral genome comprising SEQ ID NO: 2058 and a capsid comprising SEQ ID NO: 4. In some embodiments, the AAV particle comprises a viral genome comprising SEQ ID NO: 2058 and a capsid comprising SEQ ID NO: 11. In some embodiments, the AAV particle comprises a viral genome comprising SEQ ID NO: 2058 and a capsid comprising SEQ ID NO: 2679. In some embodiments, the AAV particle comprises a viral genome comprising SEQ ID NO: 2058 and a capsid comprising SEQ ID NO: 2809. In some embodiments, the AAV particle comprises a viral genome comprising SEQ ID NO: 2058 and a capsid comprising SEQ ID NO: 2871.

[0818] In some embodiments, the AAV particle comprises a viral genome comprising SEQ ID NO: 2059 and a VOY101 capsid. In some embodiments, the AAV particle comprises a viral genome comprising SEQ ID NO: 2059 and a VOY201 capsid. In some embodiments, the AAV particle comprises a viral genome comprising SEQ ID NO: 2059 and an AAV9 capsid. In some embodiments, the AAV particle comprises a viral genome comprising SEQ ID NO: 2059 and an AAV9K449R capsid. In some embodiments, the AAV particle comprises a viral genome comprising SEQ ID NO: 2059 and an AAVPHP.B capsid. In some embodiments, the AAV particle comprises a viral genome comprising SEQ ID NO: 2059 and an AAVPHP.N capsid. In some embodiments, the AAV particle comprises a viral genome comprising SEQ ID NO: 2059 and an AAV2 variant capsid. In some embodiments, the AAV particle comprises a viral genome comprising SEQ ID NO: 2059 and an AAV2/3 variant capsid. In some embodiments, the AAV particle comprises a viral genome comprising SEQ ID NO: 2059 and a capsid comprising SEQ ID NO: 1. In some embodiments, the AAV particle comprises a viral genome comprising SEQ ID NO: 2059 and a capsid encoded by a nucleic acid sequence comprising SEQ ID NO: 2. In some embodiments, the AAV particle comprises a viral genome comprising SEQ ID NO: 2059 and a capsid comprising SEQ ID NO: 4534. In some embodiments, the AAV particle comprises a viral genome comprising SEQ ID NO: 2059 and a capsid encoded by a nucleic acid sequence comprising SEQ ID NO: 3. In some embodiments, the AAV particle comprises a viral genome comprising SEQ ID NO: 2059 and a capsid comprising SEQ ID NO: 138. In some embodiments, the AAV particle comprises a viral genome comprising SEQ ID NO: 2059 and a capsid encoded by a nucleic acid sequence comprising SEQ ID NO: 137. In some embodiments, the AAV particle comprises a viral genome comprising SEQ ID NO: 2059 and a capsid comprising SEQ ID NO: 5. In some embodiments, the AAV particle comprises a viral genome comprising SEQ ID NO: 2059 and a capsid encoded by a nucleic acid sequence comprising SEQ ID NO: 6. In some embodiments, the AAV particle comprises a viral genome comprising SEQ ID NO: 2059 and a capsid comprising SEQ ID NO: 4. In some embodiments, the AAV particle comprises a viral genome comprising SEQ ID NO: 2059 and a capsid comprising SEQ ID NO: 11. In some embodiments, the AAV particle comprises a viral genome comprising SEQ ID NO: 2059 and a capsid comprising SEQ ID NO: 2679. In some embodiments, the AAV particle comprises a viral genome comprising SEQ ID NO: 2059 and a capsid comprising SEQ ID NO: 2809. In some embodiments, the AAV particle comprises a viral genome comprising SEQ ID NO: 2059 and a capsid comprising SEQ ID NO: 2871.

[0819] In some embodiments, the AAV particle comprises a viral genome comprising SEQ ID NO: 2060 and a VOY101 capsid. In some embodiments, the AAV particle comprises a viral genome comprising SEQ ID NO: 2060 and a VOY201 capsid. In some embodiments, the AAV particle comprises a viral genome comprising SEQ ID NO: 2060 and an AAV9 capsid. In some embodiments, the AAV particle comprises a viral genome comprising SEQ ID NO: 2060 and an AAV9K449R capsid. In some embodiments, the AAV particle comprises a viral genome comprising SEQ ID NO: 2060 and an AAVPHP.B capsid. In some embodiments, the AAV particle comprises a viral genome comprising SEQ ID NO: 2060 and an AAVPHP.N capsid. In some embodiments, the AAV particle comprises a viral genome comprising SEQ ID NO: 2060 and an AAV2 variant capsid. In some embodiments, the AAV particle comprises a viral genome comprising SEQ ID NO: 2060 and an AAV2/3 variant capsid. In some embodiments, the AAV particle comprises a viral genome comprising SEQ ID NO: 2060 and a capsid comprising SEQ ID NO: 1. In some embodiments, the AAV particle comprises a viral genome comprising SEQ ID NO: 2060 and a capsid encoded by a nucleic acid sequence comprising SEQ ID NO: 2. In some embodiments, the AAV particle comprises a viral genome comprising SEQ ID NO: 2060 and a capsid comprising SEQ ID NO: 4534. In some embodiments, the AAV particle comprises a viral genome comprising SEQ ID NO: 2060 and a capsid encoded by a nucleic acid sequence comprising SEQ ID NO: 3. In some embodiments, the AAV particle comprises a viral genome comprising SEQ ID NO: 2060 and a capsid comprising SEQ ID NO: 138. In some embodiments, the AAV particle comprises a viral genome comprising SEQ ID NO: 2060 and a capsid encoded by a nucleic acid sequence comprising SEQ ID NO: 137. In some embodiments, the AAV particle comprises a viral genome comprising SEQ ID NO: 2060 and a capsid comprising SEQ ID NO: 5. In some embodiments, the AAV particle comprises a viral genome comprising SEQ ID NO: 2060 and a capsid encoded by a nucleic acid sequence comprising SEQ ID NO: 6. In some embodiments, the AAV particle comprises a viral genome comprising SEQ ID NO: 2060 and a capsid comprising SEQ ID NO: 4. In some embodiments, the AAV particle comprises a viral genome comprising SEQ ID NO: 2060 and a capsid comprising SEQ ID NO: 11. In some embodiments, the AAV particle comprises a viral genome comprising SEQ ID NO: 2060 and a capsid comprising SEQ ID NO: 2679. In some embodiments, the AAV particle comprises a viral genome comprising SEQ ID NO: 2060 and a capsid comprising SEQ ID NO: 2809. In some embodiments, the AAV particle comprises a viral genome comprising SEQ ID NO: 2060 and a capsid comprising SEQ ID NO: 2871.

[0820] In some embodiments, the AAV particle comprises a viral genome comprising SEQ ID NO: 2061 and a VOY101 capsid. In some embodiments, the AAV particle comprises a viral genome comprising SEQ ID NO: 2061 and a VOY201 capsid. In some embodiments, the AAV particle comprises a viral genome comprising SEQ ID NO: 2061 and an AAV9 capsid. In some embodiments, the AAV particle comprises a viral genome comprising SEQ ID NO: 2061 and an AAV9K449R capsid. In some embodiments, the AAV particle comprises a viral genome comprising SEQ ID NO: 2061 and an AAVPHP.B capsid. In some embodiments, the AAV particle comprises a viral genome comprising SEQ ID NO: 2061 and an AAVPHP.N capsid. In some embodiments, the AAV particle comprises a viral genome comprising SEQ ID NO: 2061 and an AAV2 variant capsid. In some embodiments, the AAV particle comprises a viral genome comprising SEQ ID NO: 2061 and an AAV2/3 variant capsid. In some embodiments, the AAV particle comprises a viral genome comprising SEQ ID NO: 2061 and a capsid comprising SEQ ID NO: 1. In some embodiments, the AAV particle comprises a viral genome comprising SEQ ID NO: 2061 and a capsid encoded by a nucleic acid sequence comprising SEQ ID NO: 2. In some embodiments, the AAV particle comprises a viral genome comprising SEQ ID NO: 2061 and a capsid comprising SEQ ID NO: 4534. In some embodiments, the AAV particle comprises a viral genome comprising SEQ ID NO: 2061 and a capsid encoded by a nucleic acid sequence comprising SEQ ID NO: 3. In some embodiments, the AAV particle comprises a viral genome comprising SEQ ID NO: 2061 and a capsid comprising SEQ ID NO: 138. In some embodiments, the AAV particle comprises a viral genome comprising SEQ ID NO: 2061 and a capsid encoded by a nucleic acid sequence comprising SEQ ID NO: 137. In some embodiments, the AAV particle comprises a viral genome comprising SEQ ID NO: 2061 and a capsid comprising SEQ ID NO: 5. In some embodiments, the AAV particle comprises a viral genome comprising SEQ ID NO: 2061 and a capsid encoded by a nucleic acid sequence comprising SEQ ID NO: 6. In some embodiments, the AAV particle comprises a viral genome comprising SEQ ID NO: 2061 and a capsid comprising SEQ ID NO: 4. In some embodiments, the AAV particle comprises a viral genome comprising SEQ ID NO: 2061 and a capsid comprising SEQ ID NO: 11. In some embodiments, the AAV particle comprises a viral genome comprising SEQ ID NO: 2061 and a capsid comprising SEQ ID NO: 2679. In some embodiments, the AAV particle comprises a viral genome comprising SEQ ID NO: 2061 and a capsid comprising SEQ ID NO: 2809. In some embodiments, the AAV particle comprises a viral genome comprising SEQ ID NO: 2061 and a capsid comprising SEQ ID NO: 2871.

[0821] In some embodiments, the AAV particle comprises a viral genome comprising SEQ ID NO: 2062 and a VOY101 capsid. In some embodiments, the AAV particle comprises a viral genome comprising SEQ ID NO: 2062 and a VOY201 capsid. In some embodiments, the AAV particle comprises a viral genome comprising SEQ ID NO: 2062 and an AAV9 capsid. In some embodiments, the AAV particle comprises a viral genome comprising SEQ ID NO: 2062 and an AAV9K449R capsid. In some embodiments, the AAV particle comprises a viral genome comprising SEQ ID NO: 2062 and an AAVPHP.B capsid. In some embodiments, the AAV particle comprises a viral genome comprising SEQ ID NO: 2062 and an AAVPHP.N capsid. In some embodiments, the AAV particle comprises a viral genome comprising SEQ ID NO: 2062 and an AAV2 variant capsid. In some embodiments, the AAV particle comprises a viral genome comprising SEQ ID NO: 2062 and an AAV2/3 variant capsid. In some embodiments, the AAV particle comprises a viral genome comprising SEQ ID NO: 2062 and a capsid comprising SEQ ID NO: 1. In some embodiments, the AAV particle comprises a viral genome comprising SEQ ID NO: 2062 and a capsid encoded by a nucleic acid sequence comprising SEQ ID NO: 2. In some embodiments, the AAV particle comprises a viral genome comprising SEQ ID NO: 2062 and a capsid comprising SEQ ID NO: 4534. In some embodiments, the AAV particle comprises a viral genome comprising SEQ ID NO: 2062 and a capsid encoded by a nucleic acid sequence comprising SEQ ID NO: 3. In some embodiments, the AAV particle comprises a viral genome comprising SEQ ID NO: 2062 and a capsid comprising SEQ ID NO: 138. In some embodiments, the AAV particle comprises a viral genome comprising SEQ ID NO: 2062 and a capsid encoded by a nucleic acid sequence comprising SEQ ID NO: 137. In some embodiments, the AAV particle comprises a viral genome comprising SEQ ID NO: 2062 and a capsid comprising SEQ ID NO: 5. In some embodiments, the AAV particle comprises a viral genome comprising SEQ ID NO: 2062 and a capsid encoded by a nucleic acid sequence comprising SEQ ID NO: 6. In some embodiments, the AAV particle comprises a viral genome comprising SEQ ID NO: 2062 and a capsid comprising SEQ ID NO: 4. In some embodiments, the AAV particle comprises a viral genome comprising SEQ ID NO: 2062 and a capsid comprising SEQ ID NO: 11. In some embodiments, the AAV particle comprises a viral genome comprising SEQ ID NO: 2062 and a capsid comprising SEQ ID NO: 2679. In some embodiments, the AAV particle comprises a viral genome comprising SEQ ID NO: 2062 and a capsid comprising SEQ ID NO: 2809. In some embodiments, the AAV particle comprises a viral genome comprising SEQ ID NO: 2062 and a capsid comprising SEQ ID NO: 2871.

[0822] In some embodiments, the AAV particle comprises a viral genome comprising SEQ ID NO: 2063 and a VOY101 capsid. In some embodiments, the AAV particle comprises a viral genome comprising SEQ ID NO: 2063 and a VOY201 capsid. In some embodiments, the AAV particle comprises a viral genome comprising SEQ ID NO: 2063 and an AAV9 capsid. In some embodiments, the AAV particle comprises a viral genome comprising SEQ ID NO: 2063 and an AAV9K449R capsid. In some embodiments, the AAV particle comprises a viral genome comprising SEQ ID NO: 2063 and an AAVPHP.B capsid. In some embodiments, the AAV particle comprises a viral genome comprising SEQ ID NO: 2063 and an AAVPHP.N capsid. In some embodiments, the AAV particle comprises a viral genome comprising SEQ ID NO: 2063 and an AAV2 variant capsid. In some embodiments, the AAV particle comprises a viral genome comprising SEQ ID NO: 2063 and an AAV2/3 variant capsid. In some embodiments, the AAV particle comprises a viral genome comprising SEQ ID NO: 2063 and a capsid comprising SEQ ID NO: 1. In some embodiments, the AAV particle comprises a viral genome comprising SEQ ID NO: 2063 and a capsid encoded by a nucleic acid sequence comprising SEQ ID NO: 2. In some embodiments, the AAV particle comprises a viral genome comprising SEQ ID NO: 2063 and a capsid comprising SEQ ID NO: 4534. In some embodiments, the AAV particle comprises a viral genome comprising SEQ ID NO: 2063 and a capsid encoded by a nucleic acid sequence comprising SEQ ID NO: 3. In some embodiments, the AAV particle comprises a viral genome comprising SEQ ID NO: 2063 and a capsid comprising SEQ ID NO: 138. In some embodiments, the AAV particle comprises a viral genome comprising SEQ ID NO: 2063 and a capsid encoded by a nucleic acid sequence comprising SEQ ID NO: 137. In some embodiments, the AAV particle comprises a viral genome comprising SEQ ID NO: 2063 and a capsid comprising SEQ ID NO: 5. In some embodiments, the AAV particle comprises a viral genome comprising SEQ ID NO: 2063 and a capsid encoded by a nucleic acid sequence comprising SEQ ID NO: 6. In some embodiments, the AAV particle comprises a viral genome comprising SEQ ID NO: 2063 and a capsid comprising SEQ ID NO: 4. In some embodiments, the AAV particle comprises a viral genome comprising SEQ ID NO: 2063 and a capsid comprising SEQ ID NO: 11. In some embodiments, the AAV particle comprises a viral genome comprising SEQ ID NO: 2063 and a capsid comprising SEQ ID NO: 2679. In some embodiments, the AAV particle comprises a viral genome comprising SEQ ID NO: 2063 and a capsid comprising SEQ ID NO: 2809. In some embodiments, the AAV particle comprises a viral genome comprising SEQ ID NO: 2063 and a capsid comprising SEQ ID NO: 2871.

[0823] In some embodiments, the AAV particle comprises a viral genome comprising SEQ ID NO: 2064 and a VOY101 capsid. In some embodiments, the AAV particle comprises a viral genome comprising SEQ ID NO: 2064 and a VOY201 capsid. In some embodiments, the AAV particle comprises a viral genome comprising SEQ ID NO: 2064 and an AAV9 capsid. In some embodiments, the AAV particle comprises a viral genome comprising SEQ ID NO: 2064 and an AAV9K449R capsid. In some embodiments, the AAV particle comprises a viral genome comprising SEQ ID NO: 2064 and an AAVPHP.B capsid. In some embodiments, the AAV particle comprises a viral genome comprising SEQ ID NO: 2064 and an AAVPHP.N capsid. In some embodiments, the AAV particle comprises a viral genome comprising SEQ ID NO: 2064 and an AAV2 variant capsid. In some embodiments, the AAV particle comprises a viral genome comprising SEQ ID NO: 2064 and an AAV2/3 variant capsid. In some embodiments, the AAV particle comprises a viral genome comprising SEQ ID NO: 2064 and a capsid comprising SEQ ID NO: 1. In some embodiments, the AAV particle comprises a viral genome comprising SEQ ID NO: 2064 and a capsid encoded by a nucleic acid sequence comprising SEQ ID NO: 2. In some embodiments, the AAV particle comprises a viral genome comprising SEQ ID NO: 2064 and a capsid comprising SEQ ID NO: 4534. In some embodiments, the AAV particle comprises a viral genome comprising SEQ ID NO: 2064 and a capsid encoded by a nucleic acid sequence comprising SEQ ID NO: 3. In some embodiments, the AAV particle comprises a viral genome comprising SEQ ID NO: 2064 and a capsid comprising SEQ ID NO: 138. In some embodiments, the AAV particle comprises a viral genome comprising SEQ ID NO: 2064 and a capsid encoded by a nucleic acid sequence comprising SEQ ID NO: 137. In some embodiments, the AAV particle comprises a viral genome comprising SEQ ID NO: 2064 and a capsid comprising SEQ ID NO: 5. In some embodiments, the AAV particle comprises a viral genome comprising SEQ ID NO: 2064 and a capsid encoded by a nucleic acid sequence comprising SEQ ID NO: 6. In some embodiments, the AAV particle comprises a viral genome comprising SEQ ID NO: 2064 and a capsid comprising SEQ ID NO: 4. In some embodiments, the AAV particle comprises a viral genome comprising SEQ ID NO: 2064 and a capsid comprising SEQ ID NO: 11. In some embodiments, the AAV particle comprises a viral genome comprising SEQ ID NO: 2064 and a capsid comprising SEQ ID NO: 2679. In some embodiments, the AAV particle comprises a viral genome comprising SEQ ID NO: 2064 and a capsid comprising SEQ ID NO: 2809. In some embodiments, the AAV particle comprises a viral genome comprising SEQ ID NO: 2064 and a capsid comprising SEQ ID NO: 2871.

[0824] In some embodiments, the AAV particle comprises a viral genome comprising SEQ ID NO: 2065 and a VOY101 capsid. In some embodiments, the AAV particle comprises a viral genome comprising SEQ ID NO: 2065 and a VOY201 capsid. In some embodiments, the AAV particle comprises a viral genome comprising SEQ ID NO: 2065 and an AAV9 capsid. In some embodiments, the AAV particle comprises a viral genome comprising SEQ ID NO: 2065 and an AAV9K449R capsid. In some embodiments, the AAV particle comprises a viral genome comprising SEQ ID NO: 2065 and an AAVPHP.B capsid. In some embodiments, the AAV particle comprises a viral genome comprising SEQ ID NO: 2065 and an AAVPHP.N capsid. In some embodiments, the AAV particle comprises a viral genome comprising SEQ ID NO: 2065 and an AAV2 variant capsid. In some embodiments, the AAV particle comprises a viral genome comprising SEQ ID NO: 2065 and an AAV2/3 variant capsid. In some embodiments, the AAV particle comprises a viral genome comprising SEQ ID NO: 2065 and a capsid comprising SEQ ID NO: 1. In some embodiments, the AAV particle comprises a viral genome comprising SEQ ID NO: 2065 and a capsid encoded by a nucleic acid sequence comprising SEQ ID NO: 2. In some embodiments, the AAV particle comprises a viral genome comprising SEQ ID NO: 2065 and a capsid comprising SEQ ID NO: 4534. In some embodiments, the AAV particle comprises a viral genome comprising SEQ ID NO: 2065 and a capsid encoded by a nucleic acid sequence comprising SEQ ID NO: 3. In some embodiments, the AAV particle comprises a viral genome comprising SEQ ID NO: 2065 and a capsid comprising SEQ ID NO: 138. In some embodiments, the AAV particle comprises a viral genome comprising SEQ ID NO: 2065 and a capsid encoded by a nucleic acid sequence comprising SEQ ID NO: 137. In some embodiments, the AAV particle comprises a viral genome comprising SEQ ID NO: 2065 and a capsid comprising SEQ ID NO: 5. In some embodiments, the AAV particle comprises a viral genome comprising SEQ ID NO: 2065 and a capsid encoded by a nucleic acid sequence comprising SEQ ID NO: 6. In some embodiments, the AAV particle comprises a viral genome comprising SEQ ID NO: 2065 and a capsid comprising SEQ ID NO: 4. In some embodiments, the AAV particle comprises a viral genome comprising SEQ ID NO: 2065 and a capsid comprising SEQ ID NO: 11. In some embodiments, the AAV particle comprises a viral genome comprising SEQ ID NO: 2065 and a capsid comprising SEQ ID NO: 2679. In some embodiments, the AAV particle comprises a viral genome comprising SEQ ID NO: 2065 and a capsid comprising SEQ ID NO: 2809. In some embodiments, the AAV particle comprises a viral genome comprising SEQ ID NO: 2065 and a capsid comprising SEQ ID NO: 2871.

[0825] In some embodiments, the AAV particle comprises a viral genome comprising SEQ ID NO: 2066 and a VOY101 capsid. In some embodiments, the AAV particle comprises a viral genome comprising SEQ ID NO: 2066 and a VOY201 capsid. In some embodiments, the AAV particle comprises a viral genome comprising SEQ ID NO: 2066 and an AAV9 capsid. In some embodiments, the AAV particle comprises a viral genome comprising SEQ ID NO: 2066 and an AAV9K449R capsid. In some embodiments, the AAV particle comprises a viral genome comprising SEQ ID NO: 2066 and an AAVPHP.B capsid. In some embodiments, the AAV particle comprises a viral genome comprising SEQ ID NO: 2066 and an AAVPHP.N capsid. In some embodiments, the AAV particle comprises a viral genome comprising SEQ ID NO: 2066 and an AAV2 variant capsid. In some embodiments, the AAV particle comprises a viral genome comprising SEQ ID NO: 2066 and an AAV2/3 variant capsid. In some embodiments, the AAV particle comprises a viral genome comprising SEQ ID NO: 2066 and a capsid comprising SEQ ID NO: 1. In some embodiments, the AAV particle comprises a viral genome comprising SEQ ID NO: 2066 and a capsid encoded by a nucleic acid sequence comprising SEQ ID NO: 2. In some embodiments, the AAV particle comprises a viral genome comprising SEQ ID NO: 2066 and a capsid comprising SEQ ID NO: 4534. In some embodiments, the AAV particle comprises a viral genome comprising SEQ ID NO: 2066 and a capsid encoded by a nucleic acid sequence comprising SEQ ID NO: 3. In some embodiments, the AAV particle comprises a viral genome comprising SEQ ID NO: 2066 and a capsid comprising SEQ ID NO: 138. In some embodiments, the AAV particle comprises a viral genome comprising SEQ ID NO: 2066 and a capsid encoded by a nucleic acid sequence comprising SEQ ID NO: 137. In some embodiments, the AAV particle comprises a viral genome comprising SEQ ID NO: 2066 and a capsid comprising SEQ ID NO: 5. In some embodiments, the AAV particle comprises a viral genome comprising SEQ ID NO: 2066 and a capsid encoded by a nucleic acid sequence comprising SEQ ID NO: 6. In some embodiments, the AAV particle comprises a viral genome comprising SEQ ID NO: 2066 and a capsid comprising SEQ ID NO: 4. In some embodiments, the AAV particle comprises a viral genome comprising SEQ ID NO: 2066 and a capsid comprising SEQ ID NO: 11. In some embodiments, the AAV particle comprises a viral genome comprising SEQ ID NO: 2066 and a capsid comprising SEQ ID NO: 2679. In some embodiments, the AAV particle comprises a viral genome comprising SEQ ID NO: 2066 and a capsid comprising SEQ ID NO: 2809. In some embodiments, the AAV particle comprises a viral genome comprising SEQ ID NO: 2066 and a capsid comprising SEQ ID NO: 2871.

[0826] In some embodiments, the AAV particle comprises a viral genome comprising SEQ ID NO: 2067 and a VOY101 capsid. In some embodiments, the AAV particle comprises a viral genome comprising SEQ ID NO: 2067 and a VOY201 capsid. In some embodiments, the AAV particle comprises a viral genome comprising SEQ ID NO: 2067 and an AAV9 capsid. In some embodiments, the AAV particle comprises a viral genome comprising SEQ ID NO: 2067 and an AAV9K449R capsid. In some embodiments, the AAV particle comprises a viral genome comprising SEQ ID NO: 2067 and an AAVPHP.B capsid. In some embodiments, the AAV particle comprises a viral genome comprising SEQ ID NO: 2067 and an AAVPHP.N capsid. In some embodiments, the AAV particle comprises a viral genome comprising SEQ ID NO: 2067 and an AAV2 variant capsid. In some embodiments, the AAV particle comprises a viral genome comprising SEQ ID NO: 2067 and an AAV2/3 variant capsid. In some embodiments, the AAV particle comprises a viral genome comprising SEQ ID NO: 2067 and a capsid comprising SEQ ID NO: 1. In some embodiments, the AAV particle comprises a viral genome comprising SEQ ID NO: 2067 and a capsid encoded by a nucleic acid sequence comprising SEQ ID NO: 2. In some embodiments, the AAV particle comprises a viral genome comprising SEQ ID NO: 2067 and a capsid comprising SEQ ID NO: 4534. In some embodiments, the AAV particle comprises a viral genome comprising SEQ ID NO: 2067 and a capsid encoded by a nucleic acid sequence comprising SEQ ID NO: 3. In some embodiments, the AAV particle comprises a viral genome comprising SEQ ID NO: 2067 and a capsid comprising SEQ ID NO: 138. In some embodiments, the AAV particle comprises a viral genome comprising SEQ ID NO: 2067 and a capsid encoded by a nucleic acid sequence comprising SEQ ID NO: 137. In some embodiments, the AAV particle comprises a viral genome comprising SEQ ID NO: 2067 and a capsid comprising SEQ ID NO: 5. In some embodiments, the AAV particle comprises a viral genome comprising SEQ ID NO: 2067 and a capsid encoded by a nucleic acid sequence comprising SEQ ID NO: 6. In some embodiments, the AAV particle comprises a viral genome comprising SEQ ID NO: 2067 and a capsid comprising SEQ ID NO: 4. In some embodiments, the AAV particle comprises a viral genome comprising SEQ ID NO: 2067 and a capsid comprising SEQ ID NO: 11. In some embodiments, the AAV particle comprises a viral genome comprising SEQ ID NO: 2067 and a capsid comprising SEQ ID NO: 2679. In some embodiments, the AAV particle comprises a viral genome comprising SEQ ID NO: 2067 and a capsid comprising SEQ ID NO: 2809. In some embodiments, the AAV particle comprises a viral genome comprising SEQ ID NO: 2067 and a capsid comprising SEQ ID NO: 2871.

[0827] In some embodiments, the AAV particle comprises a viral genome comprising SEQ ID NO: 2068 and a VOY101 capsid. In some embodiments, the AAV particle comprises a viral genome comprising SEQ ID NO: 2068 and a VOY201 capsid. In some embodiments, the AAV particle comprises a viral genome comprising SEQ ID NO: 2068 and an AAV9 capsid. In some embodiments, the AAV particle comprises a viral genome comprising SEQ ID NO: 2068 and an AAV9K449R capsid. In some embodiments, the AAV particle comprises a viral genome comprising SEQ ID NO: 2068 and an AAVPHP.B capsid. In some embodiments, the AAV particle comprises a viral genome comprising SEQ ID NO: 2068 and an AAVPHP.N capsid. In some embodiments, the AAV particle comprises a viral genome comprising SEQ ID NO: 2068 and an AAV2 variant capsid. In some embodiments, the AAV particle comprises a viral genome comprising SEQ ID NO: 2068 and an AAV2/3 variant capsid. In some embodiments, the AAV particle comprises a viral genome comprising SEQ ID NO: 2068 and a capsid comprising SEQ ID NO: 1. In some embodiments, the AAV particle comprises a viral genome comprising SEQ ID NO: 2068 and a capsid encoded by a nucleic acid sequence comprising SEQ ID NO: 2. In some embodiments, the AAV particle comprises a viral genome comprising SEQ ID NO: 2068 and a capsid comprising SEQ ID NO: 4534. In some embodiments, the AAV particle comprises a viral genome comprising SEQ ID NO: 2068 and a capsid encoded by a nucleic acid sequence comprising SEQ ID NO: 3. In some embodiments, the AAV particle comprises a viral genome comprising SEQ ID NO: 2068 and a capsid comprising SEQ ID NO: 138. In some embodiments, the AAV particle comprises a viral genome comprising SEQ ID NO: 2068 and a capsid encoded by a nucleic acid sequence comprising SEQ ID NO: 137. In some embodiments, the AAV particle comprises a viral genome comprising SEQ ID NO: 2068 and a capsid comprising SEQ ID NO: 5. In some embodiments, the AAV particle comprises a viral genome comprising SEQ ID NO: 2068 and a capsid encoded by a nucleic acid sequence comprising SEQ ID NO: 6. In some embodiments, the AAV particle comprises a viral genome comprising SEQ ID NO: 2068 and a capsid comprising SEQ ID NO: 4. In some embodiments, the AAV particle comprises a viral genome comprising SEQ ID NO: 2068 and a capsid comprising SEQ ID NO: 11. In some embodiments, the AAV particle comprises a viral genome comprising SEQ ID NO: 2068 and a capsid comprising SEQ ID NO: 2679. In some embodiments, the AAV particle comprises a viral genome comprising SEQ ID NO: 2068 and a capsid comprising SEQ ID NO: 2809. In some embodiments, the AAV particle comprises a viral genome comprising SEQ ID NO: 2068 and a capsid comprising SEQ ID NO: 2871.

[0828] In some embodiments, the AAV particle comprises a viral genome comprising SEQ ID NO: 2069 and a VOY101 capsid. In some embodiments, the AAV particle comprises a viral genome comprising SEQ ID NO: 2069 and a VOY201 capsid. In some embodiments, the AAV particle comprises a viral genome comprising SEQ ID NO: 2069 and an AAV9 capsid. In some embodiments, the AAV particle comprises a viral genome comprising SEQ ID NO: 2069 and an AAV9K449R capsid. In some embodiments, the AAV particle comprises a viral genome comprising SEQ ID NO: 2069 and an AAVPHP.B capsid. In some embodiments, the AAV particle comprises a viral genome comprising SEQ ID NO: 2069 and an AAVPHP.N capsid. In some embodiments, the AAV particle comprises a viral genome comprising SEQ ID NO: 2069 and an AAV2 variant capsid. In some embodiments, the AAV particle comprises a viral genome comprising SEQ ID NO: 2069 and an AAV2/3 variant capsid. In some embodiments, the AAV particle comprises a viral genome comprising SEQ ID NO: 2069 and a capsid comprising SEQ ID NO: 1. In some embodiments, the AAV particle comprises a viral genome comprising SEQ ID NO: 2069 and a capsid encoded by a nucleic acid sequence comprising SEQ ID NO: 2. In some embodiments, the AAV particle comprises a viral genome comprising SEQ ID NO: 2069 and a capsid comprising SEQ ID NO: 4534. In some embodiments, the AAV particle comprises a viral genome comprising SEQ ID NO: 2069 and a capsid encoded by a nucleic acid sequence comprising SEQ ID NO: 3. In some embodiments, the AAV particle comprises a viral genome comprising SEQ ID NO: 2069 and a capsid comprising SEQ ID NO: 138. In some embodiments, the AAV particle comprises a viral genome comprising SEQ ID NO: 2069 and a capsid encoded by a nucleic acid sequence comprising SEQ ID NO: 137. In some embodiments, the AAV particle comprises a viral genome comprising SEQ ID NO: 2069 and a capsid comprising SEQ ID NO: 5. In some embodiments, the AAV particle comprises a viral genome comprising SEQ ID NO: 2069 and a capsid encoded by a nucleic acid sequence comprising SEQ ID NO: 6. In some embodiments, the AAV particle comprises a viral genome comprising SEQ ID NO: 2069 and a capsid comprising SEQ ID NO: 4. In some embodiments, the AAV particle comprises a viral genome comprising SEQ ID NO: 2069 and a capsid comprising SEQ ID NO: 11. In some embodiments, the AAV particle comprises a viral genome comprising SEQ ID NO: 2069 and a capsid comprising SEQ ID NO: 2679. In some embodiments, the AAV particle comprises a viral genome comprising SEQ ID NO: 2069 and a capsid comprising SEQ ID NO: 2809. In some embodiments, the AAV particle comprises a viral genome comprising SEQ ID NO: 2069 and a capsid comprising SEQ ID NO: 2871.

[0829] In some embodiments, the AAV particle comprises a viral genome comprising SEQ ID NO: 2070 and a VOY101 capsid. In some embodiments, the AAV particle comprises a viral genome comprising SEQ ID NO: 2070 and a VOY201 capsid. In some embodiments, the AAV particle comprises a viral genome comprising SEQ ID NO: 2070 and an AAV9 capsid. In some embodiments, the AAV particle comprises a viral genome comprising SEQ ID NO: 2070 and an AAV9K449R capsid. In some embodiments, the AAV particle comprises a viral genome comprising SEQ ID NO: 2070 and an AAVPHP.B capsid. In some embodiments, the AAV particle comprises a viral genome comprising SEQ ID NO: 2070 and an AAVPHP.N capsid. In some embodiments, the AAV particle comprises a viral genome comprising SEQ ID NO: 2070 and an AAV2 variant capsid. In some embodiments, the AAV particle comprises a viral genome comprising SEQ ID NO: 2070 and an AAV2/3 variant capsid. In some embodiments, the AAV particle comprises a viral genome comprising SEQ ID NO: 2070 and a capsid comprising SEQ ID NO: 1. In some embodiments, the AAV particle comprises a viral genome comprising SEQ ID NO: 2070 and a capsid encoded by a nucleic acid sequence comprising SEQ ID NO: 2. In some embodiments, the AAV particle comprises a viral genome comprising SEQ ID NO: 2070 and a capsid comprising SEQ ID NO: 4534. In some embodiments, the AAV particle comprises a viral genome comprising SEQ ID NO: 2070 and a capsid encoded by a nucleic acid sequence comprising SEQ ID NO: 3. In some embodiments, the AAV particle comprises a viral genome comprising SEQ ID NO: 2070 and a capsid comprising SEQ ID NO: 138. In some embodiments, the AAV particle comprises a viral genome comprising SEQ ID NO: 2070 and a capsid encoded by a nucleic acid sequence comprising SEQ ID NO: 137. In some embodiments, the AAV particle comprises a viral genome comprising SEQ ID NO: 2070 and a capsid comprising SEQ ID NO: 5. In some embodiments, the AAV particle comprises a viral genome comprising SEQ ID NO: 2070 and a capsid encoded by a nucleic acid sequence comprising SEQ ID NO: 6. In some embodiments, the AAV particle comprises a viral genome comprising SEQ ID NO: 2070 and a capsid comprising SEQ ID NO: 4. In some embodiments, the AAV particle comprises a viral genome comprising SEQ ID NO: 2070 and a capsid comprising SEQ ID NO: 11. In some embodiments, the AAV particle comprises a viral genome comprising SEQ ID NO: 2070 and a capsid comprising SEQ ID NO: 2679. In some embodiments, the AAV particle comprises a viral genome comprising SEQ ID NO: 2070 and a capsid comprising SEQ ID NO: 2809. In some embodiments, the AAV particle comprises a viral genome comprising SEQ ID NO: 2070 and a capsid comprising SEQ ID NO: 2871.

[0830] In some embodiments, the AAV particle comprises a viral genome comprising SEQ ID NO: 2071 and a VOY101 capsid. In some embodiments, the AAV particle comprises a viral genome comprising SEQ ID NO: 2071 and a VOY201 capsid. In some embodiments, the AAV particle comprises a viral genome comprising SEQ ID NO: 2071 and an AAV9 capsid. In some embodiments, the AAV particle comprises a viral genome comprising SEQ ID NO: 2071 and an AAV9K449R capsid. In some embodiments, the AAV particle comprises a viral genome comprising SEQ ID NO: 2071 and an AAVPHP.B capsid. In some embodiments, the AAV particle comprises a viral genome comprising SEQ ID NO: 2071 and an AAVPHP.N capsid. In some embodiments, the AAV particle comprises a viral genome comprising SEQ ID NO: 2071 and an AAV2 variant capsid. In some embodiments, the AAV particle comprises a viral genome comprising SEQ ID NO: 2071 and an AAV2/3 variant capsid. In some embodiments, the AAV particle comprises a viral genome comprising SEQ ID NO: 2071 and a capsid comprising SEQ ID NO: 1. In some embodiments, the AAV particle comprises a viral genome comprising SEQ ID NO: 2071 and a capsid encoded by a nucleic acid sequence comprising SEQ ID NO: 2. In some embodiments, the AAV particle comprises a viral genome comprising SEQ ID NO: 2071 and a capsid comprising SEQ ID NO: 4534. In some embodiments, the AAV particle comprises a viral genome comprising SEQ ID NO: 2071 and a capsid encoded by a nucleic acid sequence comprising SEQ ID NO: 3. In some embodiments, the AAV particle comprises a viral genome comprising SEQ ID NO: 2071 and a capsid comprising SEQ ID NO: 138. In some embodiments, the AAV particle comprises a viral genome comprising SEQ ID NO: 2071 and a capsid encoded by a nucleic acid sequence comprising SEQ ID NO: 137. In some embodiments, the AAV particle comprises a viral genome comprising SEQ ID NO: 2071 and a capsid comprising SEQ ID NO: 5. In some embodiments, the AAV particle comprises a viral genome comprising SEQ ID NO: 2071 and a capsid encoded by a nucleic acid sequence comprising SEQ ID NO: 6. In some embodiments, the AAV particle comprises a viral genome comprising SEQ ID NO: 2071 and a capsid comprising SEQ ID NO: 4. In some embodiments, the AAV particle comprises a viral genome comprising SEQ ID NO: 2071 and a capsid comprising SEQ ID NO: 11. In some embodiments, the AAV particle comprises a viral genome comprising SEQ ID NO: 2071 and a capsid comprising SEQ ID NO: 2679. In some embodiments, the AAV particle comprises a viral genome comprising SEQ ID NO: 2071 and a capsid comprising SEQ ID NO: 2809. In some embodiments, the AAV particle comprises a viral genome comprising SEQ ID NO: 2071 and a capsid comprising SEQ ID NO: 2871.

[0831] In some embodiments, the AAV particle comprises a viral genome comprising SEQ ID NO: 2072 and a VOY101 capsid. In some embodiments, the AAV particle comprises a viral genome comprising SEQ ID NO: 2072 and a VOY201 capsid. In some embodiments, the AAV particle comprises a viral genome comprising SEQ ID NO: 2072 and an AAV9 capsid. In some embodiments, the AAV particle comprises a viral genome comprising SEQ ID NO: 2072 and an AAV9K449R capsid. In some embodiments, the AAV particle comprises a viral genome comprising SEQ ID NO: 2072 and an AAVPHP.B capsid. In some embodiments, the AAV particle comprises a viral genome comprising SEQ ID NO: 2072 and an AAVPHP.N capsid. In some embodiments, the AAV particle comprises a viral genome comprising SEQ ID NO: 2072 and an AAV2 variant capsid. In some embodiments, the AAV particle comprises a viral genome comprising SEQ ID NO: 2072 and an AAV2/3 variant capsid. In some embodiments, the AAV particle comprises a viral genome comprising SEQ ID NO: 2072 and a capsid comprising SEQ ID NO: 1. In some embodiments, the AAV particle comprises a viral genome comprising SEQ ID NO: 2072 and a capsid encoded by a nucleic acid sequence comprising SEQ ID NO: 2. In some embodiments, the AAV particle comprises a viral genome comprising SEQ ID NO: 2072 and a capsid comprising SEQ ID NO: 4534. In some embodiments, the AAV particle comprises a viral genome comprising SEQ ID NO: 2072 and a capsid encoded by a nucleic acid sequence comprising SEQ ID NO: 3. In some embodiments, the AAV particle comprises a viral genome comprising SEQ ID NO: 2072 and a capsid comprising SEQ ID NO: 138. In some embodiments, the AAV particle comprises a viral genome comprising SEQ ID NO: 2072 and a capsid encoded by a nucleic acid sequence comprising SEQ ID NO: 137. In some embodiments, the AAV particle comprises a viral genome comprising SEQ ID NO: 2072 and a capsid comprising SEQ ID NO: 5. In some embodiments, the AAV particle comprises a viral genome comprising SEQ ID NO: 2072 and a capsid encoded by a nucleic acid sequence comprising SEQ ID NO: 6. In some embodiments, the AAV particle comprises a viral genome comprising SEQ ID NO: 2072 and a capsid comprising SEQ ID NO: 4. In some embodiments, the AAV particle comprises a viral genome comprising SEQ ID NO: 2072 and a capsid comprising SEQ ID NO: 11. In some embodiments, the AAV particle comprises a viral genome comprising SEQ ID NO: 2072 and a capsid comprising SEQ ID NO: 2679. In some embodiments, the AAV particle comprises a viral genome comprising SEQ ID NO: 2072 and a capsid comprising SEQ ID NO: 2809. In some embodiments, the AAV particle comprises a viral genome comprising SEQ ID NO: 2072 and a capsid comprising SEQ ID NO: 2871.

[0832] In some embodiments, the AAV particle comprises a viral genome comprising SEQ ID NO: 2073 and a VOY101 capsid. In some embodiments, the AAV particle comprises a viral genome comprising SEQ ID NO: 2073 and a VOY201 capsid. In some embodiments, the AAV particle comprises a viral genome comprising SEQ ID NO: 2073 and an AAV9 capsid. In some embodiments, the AAV particle comprises a viral genome comprising SEQ ID NO: 2073 and an AAV9K449R capsid. In some embodiments, the AAV particle comprises a viral genome comprising SEQ ID NO: 2073 and an AAVPHP.B capsid. In some embodiments, the AAV particle comprises a viral genome comprising SEQ ID NO: 2073 and an AAVPHP.N capsid. In some embodiments, the AAV particle comprises a viral genome comprising SEQ ID NO: 2073 and an AAV2 variant capsid. In some embodiments, the AAV particle comprises a viral genome comprising SEQ ID NO: 2073 and an AAV2/3 variant capsid. In some embodiments, the AAV particle comprises a viral genome comprising SEQ ID NO: 2073 and a capsid comprising SEQ ID NO: 1. In some embodiments, the AAV particle comprises a viral genome comprising SEQ ID NO: 2073 and a capsid encoded by a nucleic acid sequence comprising SEQ ID NO: 2. In some embodiments, the AAV particle comprises a viral genome comprising SEQ ID NO: 2073 and a capsid comprising SEQ ID NO: 4534. In some embodiments, the AAV particle comprises a viral genome comprising SEQ ID NO: 2073 and a capsid encoded by a nucleic acid sequence comprising SEQ ID NO: 3. In some embodiments, the AAV particle comprises a viral genome comprising SEQ ID NO: 2073 and a capsid comprising SEQ ID NO: 138. In some embodiments, the AAV particle comprises a viral genome comprising SEQ ID NO: 2073 and a capsid encoded by a nucleic acid sequence comprising SEQ ID NO: 137. In some embodiments, the AAV particle comprises a viral genome comprising SEQ ID NO: 2073 and a capsid comprising SEQ ID NO: 5. In some embodiments, the AAV particle comprises a viral genome comprising SEQ ID NO: 2073 and a capsid encoded by a nucleic acid sequence comprising SEQ ID NO: 6. In some embodiments, the AAV particle comprises a viral genome comprising SEQ ID NO: 2073 and a capsid comprising SEQ ID NO: 4. In some embodiments, the AAV particle comprises a viral genome comprising SEQ ID NO: 2073 and a capsid comprising SEQ ID NO: 11. In some embodiments, the AAV particle comprises a viral genome comprising SEQ ID NO: 2073 and a capsid comprising SEQ ID NO: 2679. In some embodiments, the AAV particle comprises a viral genome comprising SEQ ID NO: 2073 and a capsid comprising SEQ ID NO: 2809. In some embodiments, the AAV particle comprises a viral genome comprising SEQ ID NO: 2073 and a capsid comprising SEQ ID NO: 2871.

[0833] In some embodiments, the AAV particle comprises a viral genome comprising SEQ ID NO: 2074 and a VOY101 capsid. In some embodiments, the AAV particle comprises a viral genome comprising SEQ ID NO: 2074 and a VOY201 capsid. In some embodiments, the AAV particle comprises a viral genome comprising SEQ ID NO: 2074 and an AAV9 capsid. In some embodiments, the AAV particle comprises a viral genome comprising SEQ ID NO: 2074 and an AAV9K449R capsid. In some embodiments, the AAV particle comprises a viral genome comprising SEQ ID NO: 2074 and an AAVPHP.B capsid. In some embodiments, the AAV particle comprises a viral genome comprising SEQ ID NO: 2074 and an AAVPHP.N capsid. In some embodiments, the AAV particle comprises a viral genome comprising SEQ ID NO: 2074 and an AAV2 variant capsid. In some embodiments, the AAV particle comprises a viral genome comprising SEQ ID NO: 2074 and an AAV2/3 variant capsid. In some embodiments, the AAV particle comprises a viral genome comprising SEQ ID NO: 2074 and a capsid comprising SEQ ID NO: 1. In some embodiments, the AAV particle comprises a viral genome comprising SEQ ID NO: 2074 and a capsid encoded by a nucleic acid sequence comprising SEQ ID NO: 2. In some embodiments, the AAV particle comprises a viral genome comprising SEQ ID NO: 2074 and a capsid comprising SEQ ID NO: 4534. In some embodiments, the AAV particle comprises a viral genome comprising SEQ ID NO: 2074 and a capsid encoded by a nucleic acid sequence comprising SEQ ID NO: 3. In some embodiments, the AAV particle comprises a viral genome comprising SEQ ID NO: 2074 and a capsid comprising SEQ ID NO: 138. In some embodiments, the AAV particle comprises a viral genome comprising SEQ ID NO: 2074 and a capsid encoded by a nucleic acid sequence comprising SEQ ID NO: 137. In some embodiments, the AAV particle comprises a viral genome comprising SEQ ID NO: 2074 and a capsid comprising SEQ ID NO: 5. In some embodiments, the AAV particle comprises a viral genome comprising SEQ ID NO: 2074 and a capsid encoded by a nucleic acid sequence comprising SEQ ID NO: 6. In some embodiments, the AAV particle comprises a viral genome comprising SEQ ID NO: 2074 and a capsid comprising SEQ ID NO: 4. In some embodiments, the AAV particle comprises a viral genome comprising SEQ ID NO: 2074 and a capsid comprising SEQ ID NO: 11. In some embodiments, the AAV particle comprises a viral genome comprising SEQ ID NO: 2074 and a capsid comprising SEQ ID NO: 2679. In some embodiments, the AAV particle comprises a viral genome comprising SEQ ID NO: 2074 and a capsid comprising SEQ ID NO: 2809. In some embodiments, the AAV particle comprises a viral genome comprising SEQ ID NO: 2074 and a capsid comprising SEQ ID NO: 2871.

[0834] In some embodiments, the AAV particle comprises a viral genome comprising SEQ ID NO: 2075 and a VOY101 capsid. In some embodiments, the AAV particle comprises a viral genome comprising SEQ ID NO: 2075 and a VOY201 capsid. In some embodiments, the AAV particle comprises a viral genome comprising SEQ ID NO: 2075 and an AAV9 capsid. In some embodiments, the AAV particle comprises a viral genome comprising SEQ ID NO: 2075 and an AAV9K449R capsid. In some embodiments, the AAV particle comprises a viral genome comprising SEQ ID NO: 2075 and an AAVPHP.B capsid. In some embodiments, the AAV particle comprises a viral genome comprising SEQ ID NO: 2075 and an AAVPHP.N capsid. In some embodiments, the AAV particle comprises a viral genome comprising SEQ ID NO: 2075 and an AAV2 variant capsid. In some embodiments, the AAV particle comprises a viral genome comprising SEQ ID NO: 2075 and an AAV2/3 variant capsid. In some embodiments, the AAV particle comprises a viral genome comprising SEQ ID NO: 2075 and a capsid comprising SEQ ID NO: 1. In some embodiments, the AAV particle comprises a viral genome comprising SEQ ID NO: 2075 and a capsid encoded by a nucleic acid sequence comprising SEQ ID NO: 2. In some embodiments, the AAV particle comprises a viral genome comprising SEQ ID NO: 2075 and a capsid comprising SEQ ID NO: 4534. In some embodiments, the AAV particle comprises a viral genome comprising SEQ ID NO: 2075 and a capsid encoded by a nucleic acid sequence comprising SEQ ID NO: 3. In some embodiments, the AAV particle comprises a viral genome comprising SEQ ID NO: 2075 and a capsid comprising SEQ ID NO: 138. In some embodiments, the AAV particle comprises a viral genome comprising SEQ ID NO: 2075 and a capsid encoded by a nucleic acid sequence comprising SEQ ID NO: 137. In some embodiments, the AAV particle comprises a viral genome comprising SEQ ID NO: 2075 and a capsid comprising SEQ ID NO: 5. In some embodiments, the AAV particle comprises a viral genome comprising SEQ ID NO: 2075 and a capsid encoded by a nucleic acid sequence comprising SEQ ID NO: 6. In some embodiments, the AAV particle comprises a viral genome comprising SEQ ID NO: 2075 and a capsid comprising SEQ ID NO: 4. In some embodiments, the AAV particle comprises a viral genome comprising SEQ ID NO: 2075 and a capsid comprising SEQ ID NO: 11. In some embodiments, the AAV particle comprises a viral genome comprising SEQ ID NO: 2075 and a capsid comprising SEQ ID NO: 2679. In some embodiments, the AAV particle comprises a viral genome comprising SEQ ID NO: 2075 and a capsid comprising SEQ ID NO: 2809. In some embodiments, the AAV particle comprises a viral genome comprising SEQ ID NO: 2075 and a capsid comprising SEQ ID NO: 2871.

[0835] In some embodiments, the AAV particle comprises a viral genome comprising SEQ ID NO: 2137 and a VOY101 capsid. In some embodiments, the AAV particle comprises a viral genome comprising SEQ ID NO: 2137 and a VOY201 capsid. In some embodiments, the AAV particle comprises a viral genome comprising SEQ ID NO: 2137 and an AAV9 capsid. In some embodiments, the AAV particle comprises a viral genome comprising SEQ ID NO: 2137 and an AAV9K449R capsid. In some embodiments, the AAV particle comprises a viral genome comprising SEQ ID NO: 2137 and an AAVPHP.B capsid. In some embodiments, the AAV particle comprises a viral genome comprising SEQ ID NO: 2137 and an AAVPHP.N capsid. In some embodiments, the AAV particle comprises a viral genome comprising SEQ ID NO: 2137 and an AAV2 variant capsid. In some embodiments, the AAV particle comprises a viral genome comprising SEQ ID NO: 2137 and an AAV2/3 variant capsid. In some embodiments, the AAV particle comprises a viral genome comprising SEQ ID NO: 2137 and a capsid comprising SEQ ID NO: 1. In some embodiments, the AAV particle comprises a viral genome comprising SEQ ID NO: 2137 and a capsid encoded by a nucleic acid sequence comprising SEQ ID NO: 2. In some embodiments, the AAV particle comprises a viral genome comprising SEQ ID NO: 2137 and a capsid comprising SEQ ID NO: 4534. In some embodiments, the AAV particle comprises a viral genome comprising SEQ ID NO: 2137 and a capsid encoded by a nucleic acid sequence comprising SEQ ID NO: 3. In some embodiments, the AAV particle comprises a viral genome comprising SEQ ID NO: 2137 and a capsid comprising SEQ ID NO: 138. In some embodiments, the AAV particle comprises a viral genome comprising SEQ ID NO: 2137 and a capsid encoded by a nucleic acid sequence comprising SEQ ID NO: 137. In some embodiments, the AAV particle comprises a viral genome comprising SEQ ID NO: 2137 and a capsid comprising SEQ ID NO: 5. In some embodiments, the AAV particle comprises a viral genome comprising SEQ ID NO: 2137 and a capsid encoded by a nucleic acid sequence comprising SEQ ID NO: 6. In some embodiments, the AAV particle comprises a viral genome comprising SEQ ID NO: 2137 and a capsid comprising SEQ ID NO: 4. In some embodiments, the AAV particle comprises a viral genome comprising SEQ ID NO: 2137 and a capsid comprising SEQ ID NO: 11. In some embodiments, the AAV particle comprises a viral genome comprising SEQ ID NO: 2137 and a capsid comprising SEQ ID NO: 2679. In some embodiments, the AAV particle comprises a viral genome comprising SEQ ID NO: 2137 and a capsid comprising SEQ ID NO: 2809. In some embodiments, the AAV particle comprises a viral genome comprising SEQ ID NO: 2137 and a capsid comprising SEQ ID NO: 2871.

[0836] In some embodiments, the AAV particle comprises a viral genome comprising SEQ ID NO: 2138 and a VOY101 capsid. In some embodiments, the AAV particle comprises a viral genome comprising SEQ ID NO: 2138 and a VOY201 capsid. In some embodiments, the AAV particle comprises a viral genome comprising SEQ ID NO: 2138 and an AAV9 capsid. In some embodiments, the AAV particle comprises a viral genome comprising SEQ ID NO: 2138 and an AAV9K449R capsid. In some embodiments, the AAV particle comprises a viral genome comprising SEQ ID NO: 2138 and an AAVPHP.B capsid. In some embodiments, the AAV particle comprises a viral genome comprising SEQ ID NO: 2138 and an AAVPHP.N capsid. In some embodiments, the AAV particle comprises a viral genome comprising SEQ ID NO: 2138 and an AAV2 variant capsid. In some embodiments, the AAV particle comprises a viral genome comprising SEQ ID NO: 2138 and an AAV2/3 variant capsid. In some embodiments, the AAV particle comprises a viral genome comprising SEQ ID NO: 2138 and a capsid comprising SEQ ID NO: 1. In some embodiments, the AAV particle comprises a viral genome comprising SEQ ID NO: 2138 and a capsid encoded by a nucleic acid sequence comprising SEQ ID NO: 2. In some embodiments, the AAV particle comprises a viral genome comprising SEQ ID NO: 2138 and a capsid comprising SEQ ID NO: 4534. In some embodiments, the AAV particle comprises a viral genome comprising SEQ ID NO: 2138 and a capsid encoded by a nucleic acid sequence comprising SEQ ID NO: 3. In some embodiments, the AAV particle comprises a viral genome comprising SEQ ID NO: 2138 and a capsid comprising SEQ ID NO: 138. In some embodiments, the AAV particle comprises a viral genome comprising SEQ ID NO: 2138 and a capsid encoded by a nucleic acid sequence comprising SEQ ID NO: 137. In some embodiments, the AAV particle comprises a viral genome comprising SEQ ID NO: 2138 and a capsid comprising SEQ ID NO: 5. In some embodiments, the AAV particle comprises a viral genome comprising SEQ ID NO: 2138 and a capsid encoded by a nucleic acid sequence comprising SEQ ID NO: 6. In some embodiments, the AAV particle comprises a viral genome comprising SEQ ID NO: 2138 and a capsid comprising SEQ ID NO: 4. In some embodiments, the AAV particle comprises a viral genome comprising SEQ ID NO: 2138 and a capsid comprising SEQ ID NO: 11. In some embodiments, the AAV particle comprises a viral genome comprising SEQ ID NO: 2138 and a capsid comprising SEQ ID NO: 2679. In some embodiments, the AAV particle comprises a viral genome comprising SEQ ID NO: 2138 and a capsid comprising SEQ ID NO: 2809. In some embodiments, the AAV particle comprises a viral genome comprising SEQ ID NO: 2138 and a capsid comprising SEQ ID NO: 2871.

[0837] In some embodiments, the AAV particle comprises a viral genome comprising SEQ ID NO: 2139 and a VOY101 capsid. In some embodiments, the AAV particle comprises a viral genome comprising SEQ ID NO: 2139 and a VOY201 capsid. In some embodiments, the AAV particle comprises a viral genome comprising SEQ ID NO: 2139 and an AAV9 capsid. In some embodiments, the AAV particle comprises a viral genome comprising SEQ ID NO: 2139 and an AAV9K449R capsid. In some embodiments, the AAV particle comprises a viral genome comprising SEQ ID NO: 2139 and an AAVPHP.B capsid. In some embodiments, the AAV particle comprises a viral genome comprising SEQ ID NO: 2139 and an AAVPHP.N capsid. In some embodiments, the AAV particle comprises a viral genome comprising SEQ ID NO: 2139 and an AAV2 variant capsid. In some embodiments, the AAV particle comprises a viral genome comprising SEQ ID NO: 2139 and an AAV2/3 variant capsid. In some embodiments, the AAV particle comprises a viral genome comprising SEQ ID NO: 2139 and a capsid comprising SEQ ID NO: 1. In some embodiments, the AAV particle comprises a viral genome comprising SEQ ID NO: 2139 and a capsid encoded by a nucleic acid sequence comprising SEQ ID NO: 2. In some embodiments, the AAV particle comprises a viral genome comprising SEQ ID NO: 2139 and a capsid comprising SEQ ID NO: 4534. In some embodiments, the AAV particle comprises a viral genome comprising SEQ ID NO: 2139 and a capsid encoded by a nucleic acid sequence comprising SEQ ID NO: 3. In some embodiments, the AAV particle comprises a viral genome comprising SEQ ID NO: 2139 and a capsid comprising SEQ ID NO: 138. In some embodiments, the AAV particle comprises a viral genome comprising SEQ ID NO: 2139 and a capsid encoded by a nucleic acid sequence comprising SEQ ID NO: 137. In some embodiments, the AAV particle comprises a viral genome comprising SEQ ID NO: 2139 and a capsid comprising SEQ ID NO: 5. In some embodiments, the AAV particle comprises a viral genome comprising SEQ ID NO: 2139 and a capsid encoded by a nucleic acid sequence comprising SEQ ID NO: 6. In some embodiments, the AAV particle comprises a viral genome comprising SEQ ID NO: 2139 and a capsid comprising SEQ ID NO: 4. In some embodiments, the AAV particle comprises a viral genome comprising SEQ ID NO: 2139 and a capsid comprising SEQ ID NO: 11. In some embodiments, the AAV particle comprises a viral genome comprising SEQ ID NO: 2139 and a capsid comprising SEQ ID NO: 2679. In some embodiments, the AAV particle comprises a viral genome comprising SEQ ID NO: 2139 and a capsid comprising SEQ ID NO: 2809. In some embodiments, the AAV particle comprises a viral genome comprising SEQ ID NO: 2139 and a capsid comprising SEQ ID NO: 2871.

[0838] In some embodiments, the AAV particle comprises a viral genome comprising SEQ ID NO: 2140 and a VOY101 capsid. In some embodiments, the AAV particle comprises a viral genome comprising SEQ ID NO: 2140 and a VOY201 capsid. In some embodiments, the AAV particle comprises a viral genome comprising SEQ ID NO: 2140 and an AAV9 capsid. In some embodiments, the AAV particle comprises a viral genome comprising SEQ ID NO: 2140 and an AAV9K449R capsid. In some embodiments, the AAV particle comprises a viral genome comprising SEQ ID NO: 2140 and an AAVPHP.B capsid. In some embodiments, the AAV particle comprises a viral genome comprising SEQ ID NO: 2140 and an AAVPHP.N capsid. In some embodiments, the AAV particle comprises a viral genome comprising SEQ ID NO: 2140 and an AAV2 variant capsid. In some embodiments, the AAV particle comprises a viral genome comprising SEQ ID NO: 2140 and an AAV2/3 variant capsid. In some embodiments, the AAV particle comprises a viral genome comprising SEQ ID NO: 2140 and a capsid comprising SEQ ID NO: 1. In some embodiments, the AAV particle comprises a viral genome comprising SEQ ID NO: 2140 and a capsid encoded by a nucleic acid sequence comprising SEQ ID NO: 2. In some embodiments, the AAV particle comprises a viral genome comprising SEQ ID NO: 2140 and a capsid comprising SEQ ID NO: 4534. In some embodiments, the AAV particle comprises a viral genome comprising SEQ ID NO: 2140 and a capsid encoded by a nucleic acid sequence comprising SEQ ID NO: 3. In some embodiments, the AAV particle comprises a viral genome comprising SEQ ID NO: 2140 and a capsid comprising SEQ ID NO: 138. In some embodiments, the AAV particle comprises a viral genome comprising SEQ ID NO: 2140 and a capsid encoded by a nucleic acid sequence comprising SEQ ID NO: 137. In some embodiments, the AAV particle comprises a viral genome comprising SEQ ID NO: 2140 and a capsid comprising SEQ ID NO: 5. In some embodiments, the AAV particle comprises a viral genome comprising SEQ ID NO: 2140 and a capsid encoded by a nucleic acid sequence comprising SEQ ID NO: 6. In some embodiments, the AAV particle comprises a viral genome comprising SEQ ID NO: 2140 and a capsid comprising SEQ ID NO: 4. In some embodiments, the AAV particle comprises a viral genome comprising SEQ ID NO: 2140 and a capsid comprising SEQ ID NO: 11. In some embodiments, the AAV particle comprises a viral genome comprising SEQ ID NO: 2140 and a capsid comprising SEQ ID NO: 2679. In some embodiments, the AAV particle comprises a viral genome comprising SEQ ID NO: 2140 and a capsid comprising SEQ ID NO: 2809. In some embodiments, the AAV particle comprises a viral genome comprising SEQ ID NO: 2140 and a capsid comprising SEQ ID NO: 2871.

[0839] In some embodiments, the AAV particle comprises a viral genome comprising SEQ ID NO: 2141 and a VOY101 capsid. In some embodiments, the AAV particle comprises a viral genome comprising SEQ ID NO: 2141 and a VOY201 capsid. In some embodiments, the AAV particle comprises a viral genome comprising SEQ ID NO: 2141 and an AAV9 capsid. In some embodiments, the AAV particle comprises a viral genome comprising SEQ ID NO: 2141 and an AAV9K449R capsid. In some embodiments, the AAV particle comprises a viral genome comprising SEQ ID NO: 2141 and an AAVPHP.B capsid. In some embodiments, the AAV particle comprises a viral genome comprising SEQ ID NO: 2141 and an AAVPHP.N capsid. In some embodiments, the AAV particle comprises a viral genome comprising SEQ ID NO: 2141 and an AAV2 variant capsid. In some embodiments, the AAV particle comprises a viral genome comprising SEQ ID NO: 2141 and an AAV2/3 variant capsid. In some embodiments, the AAV particle comprises a viral genome comprising SEQ ID NO: 2141 and a capsid comprising SEQ ID NO: 1. In some embodiments, the AAV particle comprises a viral genome comprising SEQ ID NO: 2141 and a capsid encoded by a nucleic acid sequence comprising SEQ ID NO: 2. In some embodiments, the AAV particle comprises a viral genome comprising SEQ ID NO: 2141 and a capsid comprising SEQ ID NO: 4534. In some embodiments, the AAV particle comprises a viral genome comprising SEQ ID NO: 2141 and a capsid encoded by a nucleic acid sequence comprising SEQ ID NO: 3. In some embodiments, the AAV particle comprises a viral genome comprising SEQ ID NO: 2141 and a capsid comprising SEQ ID NO: 138. In some embodiments, the AAV particle comprises a viral genome comprising SEQ ID NO: 2141 and a capsid encoded by a nucleic acid sequence comprising SEQ ID NO: 137. In some embodiments, the AAV particle comprises a viral genome comprising SEQ ID NO: 2141 and a capsid comprising SEQ ID NO: 5. In some embodiments, the AAV particle comprises a viral genome comprising SEQ ID NO: 2141 and a capsid encoded by a nucleic acid sequence comprising SEQ ID NO: 6. In some embodiments, the AAV particle comprises a viral genome comprising SEQ ID NO: 2141 and a capsid comprising SEQ ID NO: 4. In some embodiments, the AAV particle comprises a viral genome comprising SEQ ID NO: 2141 and a capsid comprising SEQ ID NO: 11. In some embodiments, the AAV particle comprises a viral genome comprising SEQ ID NO: 2141 and a capsid comprising SEQ ID NO: 2679. In some embodiments, the AAV particle comprises a viral genome comprising SEQ ID NO: 2141 and a capsid comprising SEQ ID NO: 2809. In some embodiments, the AAV particle comprises a viral genome comprising SEQ ID NO: 2141 and a capsid comprising SEQ ID NO: 2871.

[0840] In some embodiments, the AAV particle comprises a viral genome comprising SEQ ID NO: 2142 and a VOY101 capsid. In some embodiments, the AAV particle comprises a viral genome comprising SEQ ID NO: 2142 and a VOY201 capsid. In some embodiments, the AAV particle comprises a viral genome comprising SEQ ID NO: 2142 and an AAV9 capsid. In some embodiments, the AAV particle comprises a viral genome comprising SEQ ID NO: 2142 and an AAV9K449R capsid. In some embodiments, the AAV particle comprises a viral genome comprising SEQ ID NO: 2142 and an AAVPHP.B capsid. In some embodiments, the AAV particle comprises a viral genome comprising SEQ ID NO: 2142 and an AAVPHP.N capsid. In some embodiments, the AAV particle comprises a viral genome comprising SEQ ID NO: 2142 and an AAV2 variant capsid. In some embodiments, the AAV particle comprises a viral genome comprising SEQ ID NO: 2142 and an AAV2/3 variant capsid. In some embodiments, the AAV particle comprises a viral genome comprising SEQ ID NO: 2142 and a capsid comprising SEQ ID NO: 1. In some embodiments, the AAV particle comprises a viral genome comprising SEQ ID NO: 2142 and a capsid encoded by a nucleic acid sequence comprising SEQ ID NO: 2. In some embodiments, the AAV particle comprises a viral genome comprising SEQ ID NO: 2142 and a capsid comprising SEQ ID NO: 4534. In some embodiments, the AAV particle comprises a viral genome comprising SEQ ID NO: 2142 and a capsid encoded by a nucleic acid sequence comprising SEQ ID NO: 3. In some embodiments, the AAV particle comprises a viral genome comprising SEQ ID NO: 2142 and a capsid comprising SEQ ID NO: 138. In some embodiments, the AAV particle comprises a viral genome comprising SEQ ID NO: 2142 and a capsid encoded by a nucleic acid sequence comprising SEQ ID NO: 137. In some embodiments, the AAV particle comprises a viral genome comprising SEQ ID NO: 2142 and a capsid comprising SEQ ID NO: 5. In some embodiments, the AAV particle comprises a viral genome comprising SEQ ID NO: 2142 and a capsid encoded by a nucleic acid sequence comprising SEQ ID NO: 6. In some embodiments, the AAV particle comprises a viral genome comprising SEQ ID NO: 2142 and a capsid comprising SEQ ID NO: 4. In some embodiments, the AAV particle comprises a viral genome comprising SEQ ID NO: 2142 and a capsid comprising SEQ ID NO: 11. In some embodiments, the AAV particle comprises a viral genome comprising SEQ ID NO: 2142 and a capsid comprising SEQ ID NO: 2679. In some embodiments, the AAV particle comprises a viral genome comprising SEQ ID NO: 2142 and a capsid comprising SEQ ID NO: 2809. In some embodiments, the AAV particle comprises a viral genome comprising SEQ ID NO: 2142 and a capsid comprising SEQ ID NO: 2871.

[0841] In some embodiments, the AAV particle comprises a viral genome comprising SEQ ID NO: 2143 and a VOY101 capsid. In some embodiments, the AAV particle comprises a viral genome comprising SEQ ID NO: 2143 and a VOY201 capsid. In some embodiments, the AAV particle comprises a viral genome comprising SEQ ID NO: 2143 and an AAV9 capsid. In some embodiments, the AAV particle comprises a viral genome comprising SEQ ID NO: 2143 and an AAV9K449R capsid. In some embodiments, the AAV particle comprises a viral genome comprising SEQ ID NO: 2143 and an AAVPHP.B capsid. In some embodiments, the AAV particle comprises a viral genome comprising SEQ ID NO: 2143 and an AAVPHP.N capsid. In some embodiments, the AAV particle comprises a viral genome comprising SEQ ID NO: 2143 and an AAV2 variant capsid. In some embodiments, the AAV particle comprises a viral genome comprising SEQ ID NO: 2143 and an AAV2/3 variant capsid. In some embodiments, the AAV particle comprises a viral genome comprising SEQ ID NO: 2143 and a capsid comprising SEQ ID NO: 1. In some embodiments, the AAV particle comprises a viral genome comprising SEQ ID NO: 2143 and a capsid encoded by a nucleic acid sequence comprising SEQ ID NO: 2. In some embodiments, the AAV particle comprises a viral genome comprising SEQ ID NO: 2143 and a capsid comprising SEQ ID NO: 4534. In some embodiments, the AAV particle comprises a viral genome comprising SEQ ID NO: 2143 and a capsid encoded by a nucleic acid sequence comprising SEQ ID NO: 3. In some embodiments, the AAV particle comprises a viral genome comprising SEQ ID NO: 2143 and a capsid comprising SEQ ID NO: 138. In some embodiments, the AAV particle comprises a viral genome comprising SEQ ID NO: 2143 and a capsid encoded by a nucleic acid sequence comprising SEQ ID NO: 137. In some embodiments, the AAV particle comprises a viral genome comprising SEQ ID NO: 2143 and a capsid comprising SEQ ID NO: 5. In some embodiments, the AAV particle comprises a viral genome comprising SEQ ID NO: 2143 and a capsid encoded by a nucleic acid sequence comprising SEQ ID NO: 6. In some embodiments, the AAV particle comprises a viral genome comprising SEQ ID NO: 2143 and a capsid comprising SEQ ID NO: 4. In some embodiments, the AAV particle comprises a viral genome comprising SEQ ID NO: 2143 and a capsid comprising SEQ ID NO: 11. In some embodiments, the AAV particle comprises a viral genome comprising SEQ ID NO: 2143 and a capsid comprising SEQ ID NO: 2679. In some embodiments, the AAV particle comprises a viral genome comprising SEQ ID NO: 2143 and a capsid comprising SEQ ID NO: 2809. In some embodiments, the AAV particle comprises a viral genome comprising SEQ ID NO: 2143 and a capsid comprising SEQ ID NO: 2871.

[0842] In some embodiments, the AAV particle comprises a viral genome comprising SEQ ID NO: 2144 and a VOY101 capsid. In some embodiments, the AAV particle comprises a viral genome comprising SEQ ID NO: 2144 and a VOY201 capsid. In some embodiments, the AAV particle comprises a viral genome comprising SEQ ID NO: 2144 and an AAV9 capsid. In some embodiments, the AAV particle comprises a viral genome comprising SEQ ID NO: 2144 and an AAV9K449R capsid. In some embodiments, the AAV particle comprises a viral genome comprising SEQ ID NO: 2144 and an AAVPHP.B capsid. In some embodiments, the AAV particle comprises a viral genome comprising SEQ ID NO: 2144 and an AAVPHP.N capsid. In some embodiments, the AAV particle comprises a viral genome comprising SEQ ID NO: 2144 and an AAV2 variant capsid. In some embodiments, the AAV particle comprises a viral genome comprising SEQ ID NO: 2144 and an AAV2/3 variant capsid. In some embodiments, the AAV particle comprises a viral genome comprising SEQ ID NO: 2144 and a capsid comprising SEQ ID NO: 1. In some embodiments, the AAV particle comprises a viral genome comprising SEQ ID NO: 2144 and a capsid encoded by a nucleic acid sequence comprising SEQ ID NO: 2. In some embodiments, the AAV particle comprises a viral genome comprising SEQ ID NO: 2144 and a capsid comprising SEQ ID NO: 4534. In some embodiments, the AAV particle comprises a viral genome comprising SEQ ID NO: 2144 and a capsid encoded by a nucleic acid sequence comprising SEQ ID NO: 3. In some embodiments, the AAV particle comprises a viral genome comprising SEQ ID NO: 2144 and a capsid comprising SEQ ID NO: 138. In some embodiments, the AAV particle comprises a viral genome comprising SEQ ID NO: 2144 and a capsid encoded by a nucleic acid sequence comprising SEQ ID NO: 137. In some embodiments, the AAV particle comprises a viral genome comprising SEQ ID NO: 2144 and a capsid comprising SEQ ID NO: 5. In some embodiments, the AAV particle comprises a viral genome comprising SEQ ID NO: 2144 and a capsid encoded by a nucleic acid sequence comprising SEQ ID NO: 6. In some embodiments, the AAV particle comprises a viral genome comprising SEQ ID NO: 2144 and a capsid comprising SEQ ID NO: 4. In some embodiments, the AAV particle comprises a viral genome comprising SEQ ID NO: 2144 and a capsid comprising SEQ ID NO: 11. In some embodiments, the AAV particle comprises a viral genome comprising SEQ ID NO: 2144 and a capsid comprising SEQ ID NO: 2679. In some embodiments, the AAV particle comprises a viral genome comprising SEQ ID NO: 2144 and a capsid comprising SEQ ID NO: 2809. In some embodiments, the AAV particle comprises a viral genome comprising SEQ ID NO: 2144 and a capsid comprising SEQ ID NO: 2871.

[0843] In some embodiments, the AAV particle comprises a viral genome comprising SEQ ID NO: 2145 and a VOY101 capsid. In some embodiments, the AAV particle comprises a viral genome comprising SEQ ID NO: 2145 and a VOY201 capsid. In some embodiments, the AAV particle comprises a viral genome comprising SEQ ID NO: 2145 and an AAV9 capsid. In some embodiments, the AAV particle comprises a viral genome comprising SEQ ID NO: 2145 and an AAV9K449R capsid. In some embodiments, the AAV particle comprises a viral genome comprising SEQ ID NO: 2145 and an AAVPHP.B capsid. In some embodiments, the AAV particle comprises a viral genome comprising SEQ ID NO: 2145 and an AAVPHP.N capsid. In some embodiments, the AAV particle comprises a viral genome comprising SEQ ID NO: 2145 and an AAV2 variant capsid. In some embodiments, the AAV particle comprises a viral genome comprising SEQ ID NO: 2145 and an AAV2/3 variant capsid. In some embodiments, the AAV particle comprises a viral genome comprising SEQ ID NO: 2145 and a capsid comprising SEQ ID NO: 1. In some embodiments, the AAV particle comprises a viral genome comprising SEQ ID NO: 2145 and a capsid encoded by a nucleic acid sequence comprising SEQ ID NO: 2. In some embodiments, the AAV particle comprises a viral genome comprising SEQ ID NO: 2145 and a capsid comprising SEQ ID NO: 4534. In some embodiments, the AAV particle comprises a viral genome comprising SEQ ID NO: 2145 and a capsid encoded by a nucleic acid sequence comprising SEQ ID NO: 3. In some embodiments, the AAV particle comprises a viral genome comprising SEQ ID NO: 2145 and a capsid comprising SEQ ID NO: 138. In some embodiments, the AAV particle comprises a viral genome comprising SEQ ID NO: 2145 and a capsid encoded by a nucleic acid sequence comprising SEQ ID NO: 137. In some embodiments, the AAV particle comprises a viral genome comprising SEQ ID NO: 2145 and a capsid comprising SEQ ID NO: 5. In some embodiments, the AAV particle comprises a viral genome comprising SEQ ID NO: 2145 and a capsid encoded by a nucleic acid sequence comprising SEQ ID NO: 6. In some embodiments, the AAV particle comprises a viral genome comprising SEQ ID NO: 2145 and a capsid comprising SEQ ID NO: 4. In some embodiments, the AAV particle comprises a viral genome comprising SEQ ID NO: 2145 and a capsid comprising SEQ ID NO: 11. In some embodiments, the AAV particle comprises a viral genome comprising SEQ ID NO: 2145 and a capsid comprising SEQ ID NO: 2679. In some embodiments, the AAV particle comprises a viral genome comprising SEQ ID NO: 2145 and a capsid comprising SEQ ID NO: 2809. In some embodiments, the AAV particle comprises a viral genome comprising SEQ ID NO: 2145 and a capsid comprising SEQ ID NO: 2871.

[0844] In some embodiments, the AAV particle comprises a viral genome comprising SEQ ID NO: 2146 and a VOY101 capsid. In some embodiments, the AAV particle comprises a viral genome comprising SEQ ID NO: 2146 and a VOY201 capsid. In some embodiments, the AAV particle comprises a viral genome comprising SEQ ID NO: 2146 and an AAV9 capsid. In some embodiments, the AAV particle comprises a viral genome comprising SEQ ID NO: 2146 and an AAV9K449R capsid. In some embodiments, the AAV particle comprises a viral genome comprising SEQ ID NO: 2146 and an AAVPHP.B capsid. In some embodiments, the AAV particle comprises a viral genome comprising SEQ ID NO: 2146 and an AAVPHP.N capsid. In some embodiments, the AAV particle comprises a viral genome comprising SEQ ID NO: 2146 and an AAV2 variant capsid. In some embodiments, the AAV particle comprises a viral genome comprising SEQ ID NO: 2146 and an AAV2/3 variant capsid. In some embodiments, the AAV particle comprises a viral genome comprising SEQ ID NO: 2146 and a capsid comprising SEQ ID NO: 1. In some embodiments, the AAV particle comprises a viral genome comprising SEQ ID NO: 2146 and a capsid encoded by a nucleic acid sequence comprising SEQ ID NO: 2. In some embodiments, the AAV particle comprises a viral genome comprising SEQ ID NO: 2146 and a capsid comprising SEQ ID NO: 4534. In some embodiments, the AAV particle comprises a viral genome comprising SEQ ID NO: 2146 and a capsid encoded by a nucleic acid sequence comprising SEQ ID NO: 3. In some embodiments, the AAV particle comprises a viral genome comprising SEQ ID NO: 2146 and a capsid comprising SEQ ID NO: 138. In some embodiments, the AAV particle comprises a viral genome comprising SEQ ID NO: 2146 and a capsid encoded by a nucleic acid sequence comprising SEQ ID NO: 137. In some embodiments, the AAV particle comprises a viral genome comprising SEQ ID NO: 2146 and a capsid comprising SEQ ID NO: 5. In some embodiments, the AAV particle comprises a viral genome comprising SEQ ID NO: 2146 and a capsid encoded by a nucleic acid sequence comprising SEQ ID NO: 6. In some embodiments, the AAV particle comprises a viral genome comprising SEQ ID NO: 2146 and a capsid comprising SEQ ID NO: 4. In some embodiments, the AAV particle comprises a viral genome comprising SEQ ID NO: 2146 and a capsid comprising SEQ ID NO: 11. In some embodiments, the AAV particle comprises a viral genome comprising SEQ ID NO: 2146 and a capsid comprising SEQ ID NO: 2679. In some embodiments, the AAV particle comprises a viral genome comprising SEQ ID NO: 2146 and a capsid comprising SEQ ID NO: 2809. In some embodiments, the AAV particle comprises a viral genome comprising SEQ ID NO: 2146 and a capsid comprising SEQ ID NO: 2871.

[0845] In some embodiments, the AAV particle comprises a viral genome comprising SEQ ID NO: 2147 and a VOY101 capsid. In some embodiments, the AAV particle comprises a viral genome comprising SEQ ID NO: 2147 and a VOY201 capsid. In some embodiments, the AAV particle comprises a viral genome comprising SEQ ID NO: 2147 and an AAV9 capsid. In some embodiments, the AAV particle comprises a viral genome comprising SEQ ID NO: 2147 and an AAV9K449R capsid. In some embodiments, the AAV particle comprises a viral genome comprising SEQ ID NO: 2147 and an AAVPHP.B capsid. In some embodiments, the AAV particle comprises a viral genome comprising SEQ ID NO: 2147 and an AAVPHP.N capsid. In some embodiments, the AAV particle comprises a viral genome comprising SEQ ID NO: 2147 and an AAV2 variant capsid. In some embodiments, the AAV particle comprises a viral genome comprising SEQ ID NO: 2147 and an AAV2/3 variant capsid. In some embodiments, the AAV particle comprises a viral genome comprising SEQ ID NO: 2147 and a capsid comprising SEQ ID NO: 1. In some embodiments, the AAV particle comprises a viral genome comprising SEQ ID NO: 2147 and a capsid encoded by a nucleic acid sequence comprising SEQ ID NO: 2. In some embodiments, the AAV particle comprises a viral genome comprising SEQ ID NO: 2147 and a capsid comprising SEQ ID NO: 4534. In some embodiments, the AAV particle comprises a viral genome comprising SEQ ID NO: 2147 and a capsid encoded by a nucleic acid sequence comprising SEQ ID NO: 3. In some embodiments, the AAV particle comprises a viral genome comprising SEQ ID NO: 2147 and a capsid comprising SEQ ID NO: 138. In some embodiments, the AAV particle comprises a viral genome comprising SEQ ID NO: 2147 and a capsid encoded by a nucleic acid sequence comprising SEQ ID NO: 137. In some embodiments, the AAV particle comprises a viral genome comprising SEQ ID NO: 2147 and a capsid comprising SEQ ID NO: 5. In some embodiments, the AAV particle comprises a viral genome comprising SEQ ID NO: 2147 and a capsid encoded by a nucleic acid sequence comprising SEQ ID NO: 6. In some embodiments, the AAV particle comprises a viral genome comprising SEQ ID NO: 2147 and a capsid comprising SEQ ID NO: 4. In some embodiments, the AAV particle comprises a viral genome comprising SEQ ID NO: 2147 and a capsid comprising SEQ ID NO: 11. In some embodiments, the AAV particle comprises a viral genome comprising SEQ ID NO: 2147 and a capsid comprising SEQ ID NO: 2679. In some embodiments, the AAV particle comprises a viral genome comprising SEQ ID NO: 2147 and a capsid comprising SEQ ID NO: 2809. In some embodiments, the AAV particle comprises a viral genome comprising SEQ ID NO: 2147 and a capsid comprising SEQ ID NO: 2871.

[0846] In some embodiments, the AAV particle comprises a viral genome comprising SEQ ID NO: 2148 and a VOY101 capsid. In some embodiments, the AAV particle comprises a viral genome comprising SEQ ID NO: 2148 and a VOY201 capsid. In some embodiments, the AAV particle comprises a viral genome comprising SEQ ID NO: 2148 and an AAV9 capsid. In some embodiments, the AAV particle comprises a viral genome comprising SEQ ID NO: 2148 and an AAV9K449R capsid. In some embodiments, the AAV particle comprises a viral genome comprising SEQ ID NO: 2148 and an AAVPHP.B capsid. In some embodiments, the AAV particle comprises a viral genome comprising SEQ ID NO: 2148 and an AAVPHP.N capsid. In some embodiments, the AAV particle comprises a viral genome comprising SEQ ID NO: 2148 and an AAV2 variant capsid. In some embodiments, the AAV particle comprises a viral genome comprising SEQ ID NO: 2148 and an AAV2/3 variant capsid. In some embodiments, the AAV particle comprises a viral genome comprising SEQ ID NO: 2148 and a capsid comprising SEQ ID NO: 1. In some embodiments, the AAV particle comprises a viral genome comprising SEQ ID NO: 2148 and a capsid encoded by a nucleic acid sequence comprising SEQ ID NO: 2. In some embodiments, the AAV particle comprises a viral genome comprising SEQ ID NO: 2148 and a capsid comprising SEQ ID NO: 4534. In some embodiments, the AAV particle comprises a viral genome comprising SEQ ID NO: 2148 and a capsid encoded by a nucleic acid sequence comprising SEQ ID NO: 3. In some embodiments, the AAV particle comprises a viral genome comprising SEQ ID NO: 2148 and a capsid comprising SEQ ID NO: 138. In some embodiments, the AAV particle comprises a viral genome comprising SEQ ID NO: 2148 and a capsid encoded by a nucleic acid sequence comprising SEQ ID NO: 137. In some embodiments, the AAV particle comprises a viral genome comprising SEQ ID NO: 2148 and a capsid comprising SEQ ID NO: 5. In some embodiments, the AAV particle comprises a viral genome comprising SEQ ID NO: 2148 and a capsid encoded by a nucleic acid sequence comprising SEQ ID NO: 6. In some embodiments, the AAV particle comprises a viral genome comprising SEQ ID NO: 2148 and a capsid comprising SEQ ID NO: 4. In some embodiments, the AAV particle comprises a viral genome comprising SEQ ID NO: 2148 and a capsid comprising SEQ ID NO: 11. In some embodiments, the AAV particle comprises a viral genome comprising SEQ ID NO: 2148 and a capsid comprising SEQ ID NO: 2679. In some embodiments, the AAV particle comprises a viral genome comprising SEQ ID NO: 2148 and a capsid comprising SEQ ID NO: 2809. In some embodiments, the AAV particle comprises a viral genome comprising SEQ ID NO: 2148 and a capsid comprising SEQ ID NO: 2871.

[0847] In some embodiments, the AAV particle comprises a viral genome comprising SEQ ID NO: 2149 and a VOY101 capsid. In some embodiments, the AAV particle comprises a viral genome comprising SEQ ID NO: 2149 and a VOY201 capsid. In some embodiments, the AAV particle comprises a viral genome comprising SEQ ID NO: 2149 and an AAV9 capsid. In some embodiments, the AAV particle comprises a viral genome comprising SEQ ID NO: 2149 and an AAV9K449R capsid. In some embodiments, the AAV particle comprises a viral genome comprising SEQ ID NO: 2149 and an AAVPHP.B capsid. In some embodiments, the AAV particle comprises a viral genome comprising SEQ ID NO: 2149 and an AAVPHP.N capsid. In some embodiments, the AAV particle comprises a viral genome comprising SEQ ID NO: 2149 and an AAV2 variant capsid. In some embodiments, the AAV particle comprises a viral genome comprising SEQ ID NO: 2149 and an AAV2/3 variant capsid. In some embodiments, the AAV particle comprises a viral genome comprising SEQ ID NO: 2149 and a capsid comprising SEQ ID NO: 1. In some embodiments, the AAV particle comprises a viral genome comprising SEQ ID NO: 2149 and a capsid encoded by a nucleic acid sequence comprising SEQ ID NO: 2. In some embodiments, the AAV particle comprises a viral genome comprising SEQ ID NO: 2149 and a capsid comprising SEQ ID NO: 4534. In some embodiments, the AAV particle comprises a viral genome comprising SEQ ID NO: 2149 and a capsid encoded by a nucleic acid sequence comprising SEQ ID NO: 3. In some embodiments, the AAV particle comprises a viral genome comprising SEQ ID NO: 2149 and a capsid comprising SEQ ID NO: 138. In some embodiments, the AAV particle comprises a viral genome comprising SEQ ID NO: 2149 and a capsid encoded by a nucleic acid sequence comprising SEQ ID NO: 137. In some embodiments, the AAV particle comprises a viral genome comprising SEQ ID NO: 2149 and a capsid comprising SEQ ID NO: 5. In some embodiments, the AAV particle comprises a viral genome comprising SEQ ID NO: 2149 and a capsid encoded by a nucleic acid sequence comprising SEQ ID NO: 6. In some embodiments, the AAV particle comprises a viral genome comprising SEQ ID NO: 2149 and a capsid comprising SEQ ID NO: 4. In some embodiments, the AAV particle comprises a viral genome comprising SEQ ID NO: 2149 and a capsid comprising SEQ ID NO: 11. In some embodiments, the AAV particle comprises a viral genome comprising SEQ ID NO: 2149 and a capsid comprising SEQ ID NO: 2679. In some embodiments, the AAV particle comprises a viral genome comprising SEQ ID NO: 2149 and a capsid comprising SEQ ID NO: 2809. In some embodiments, the AAV particle comprises a viral genome comprising SEQ ID NO: 2149 and a capsid comprising SEQ ID NO: 2871.

[0848] In some embodiments, the AAV particle comprises a viral genome comprising SEQ ID NO: 2150 and a VOY101 capsid. In some embodiments, the AAV particle comprises a viral genome comprising SEQ ID NO: 2150 and a VOY201 capsid. In some embodiments, the AAV particle comprises a viral genome comprising SEQ ID NO: 2150 and an AAV9 capsid. In some embodiments, the AAV particle comprises a viral genome comprising SEQ ID NO: 2150 and an AAV9K449R capsid. In some embodiments, the AAV particle comprises a viral genome comprising SEQ ID NO: 2150 and an AAVPHP.B capsid. In some embodiments, the AAV particle comprises a viral genome comprising SEQ ID NO: 2150 and an AAVPHP.N capsid. In some embodiments, the AAV particle comprises a viral genome comprising SEQ ID NO: 2150 and an AAV2 variant capsid. In some embodiments, the AAV particle comprises a viral genome comprising SEQ ID NO: 2150 and an AAV2/3 variant capsid. In some embodiments, the AAV particle comprises a viral genome comprising SEQ ID NO: 2150 and a capsid comprising SEQ ID NO: 1. In some embodiments, the AAV particle comprises a viral genome comprising SEQ ID NO: 2150 and a capsid encoded by a nucleic acid sequence comprising SEQ ID NO: 2. In some embodiments, the AAV particle comprises a viral genome comprising SEQ ID NO: 2150 and a capsid comprising SEQ ID NO: 4534. In some embodiments, the AAV particle comprises a viral genome comprising SEQ ID NO: 2150 and a capsid encoded by a nucleic acid sequence comprising SEQ ID NO: 3. In some embodiments, the AAV particle comprises a viral genome comprising SEQ ID NO: 2150 and a capsid comprising SEQ ID NO: 138. In some embodiments, the AAV particle comprises a viral genome comprising SEQ ID NO: 2150 and a capsid encoded by a nucleic acid sequence comprising SEQ ID NO: 137. In some embodiments, the AAV particle comprises a viral genome comprising SEQ ID NO: 2150 and a capsid comprising SEQ ID NO: 5. In some embodiments, the AAV particle comprises a viral genome comprising SEQ ID NO: 2150 and a capsid encoded by a nucleic acid sequence comprising SEQ ID NO: 6. In some embodiments, the AAV particle comprises a viral genome comprising SEQ ID NO: 2150 and a capsid comprising SEQ ID NO: 4. In some embodiments, the AAV particle comprises a viral genome comprising SEQ ID NO: 2150 and a capsid comprising SEQ ID NO: 11. In some embodiments, the AAV particle comprises a viral genome comprising SEQ ID NO: 2150 and a capsid comprising SEQ ID NO: 2679. In some embodiments, the AAV particle comprises a viral genome comprising SEQ ID NO: 2150 and a capsid comprising SEQ ID NO: 2809. In some embodiments, the AAV particle comprises a viral genome comprising SEQ ID NO: 2150 and a capsid comprising SEQ ID NO: 2871.

[0849] In some embodiments, the AAV particle comprises a viral genome comprising SEQ ID NO: 2151 and a VOY101 capsid. In some embodiments, the AAV particle comprises a viral genome comprising SEQ ID NO: 2151 and a VOY201 capsid. In some embodiments, the AAV particle comprises a viral genome comprising SEQ ID NO: 2151 and an AAV9 capsid. In some embodiments, the AAV particle comprises a viral genome comprising SEQ ID NO: 2151 and an AAV9K449R capsid. In some embodiments, the AAV particle comprises a viral genome comprising SEQ ID NO: 2151 and an AAVPHP.B capsid. In some embodiments, the AAV particle comprises a viral genome comprising SEQ ID NO: 2151 and an AAVPHP.N capsid. In some embodiments, the AAV particle comprises a viral genome comprising SEQ ID NO: 2151 and an AAV2 variant capsid. In some embodiments, the AAV particle comprises a viral genome comprising SEQ ID NO: 2151 and an AAV2/3 variant capsid. In some embodiments, the AAV particle comprises a viral genome comprising SEQ ID NO: 2151 and a capsid comprising SEQ ID NO: 1. In some embodiments, the AAV particle comprises a viral genome comprising SEQ ID NO: 2151 and a capsid encoded by a nucleic acid sequence comprising SEQ ID NO: 2. In some embodiments, the AAV particle comprises a viral genome comprising SEQ ID NO: 2151 and a capsid comprising SEQ ID NO: 4534. In some embodiments, the AAV particle comprises a viral genome comprising SEQ ID NO: 2151 and a capsid encoded by a nucleic acid sequence comprising SEQ ID NO: 3. In some embodiments, the AAV particle comprises a viral genome comprising SEQ ID NO: 2151 and a capsid comprising SEQ ID NO: 138. In some embodiments, the AAV particle comprises a viral genome comprising SEQ ID NO: 2151 and a capsid encoded by a nucleic acid sequence comprising SEQ ID NO: 137. In some embodiments, the AAV particle comprises a viral genome comprising SEQ ID NO: 2151 and a capsid comprising SEQ ID NO: 5. In some embodiments, the AAV particle comprises a viral genome comprising SEQ ID NO: 2151 and a capsid encoded by a nucleic acid sequence comprising SEQ ID NO: 6. In some embodiments, the AAV particle comprises a viral genome comprising SEQ ID NO: 2151 and a capsid comprising SEQ ID NO: 4. In some embodiments, the AAV particle comprises a viral genome comprising SEQ ID NO: 2151 and a capsid comprising SEQ ID NO: 11. In some embodiments, the AAV particle comprises a viral genome comprising SEQ ID NO: 2151 and a capsid comprising SEQ ID NO: 2679. In some embodiments, the AAV particle comprises a viral genome comprising SEQ ID NO: 2151 and a capsid comprising SEQ ID NO: 2809. In some embodiments, the AAV particle comprises a viral genome comprising SEQ ID NO: 2151 and a capsid comprising SEQ ID NO: 2871.

[0850] In some embodiments, the AAV particle comprises a viral genome comprising SEQ ID NO: 2152 and a VOY101 capsid. In some embodiments, the AAV particle comprises a viral genome comprising SEQ ID NO: 2152 and a VOY201 capsid. In some embodiments, the AAV particle comprises a viral genome comprising SEQ ID NO: 2152 and an AAV9 capsid. In some embodiments, the AAV particle comprises a viral genome comprising SEQ ID NO: 2152 and an AAV9K449R capsid. In some embodiments, the AAV particle comprises a viral genome comprising SEQ ID NO: 2152 and an AAVPHP.B capsid. In some embodiments, the AAV particle comprises a viral genome comprising SEQ ID NO: 2152 and an AAVPHP.N capsid. In some embodiments, the AAV particle comprises a viral genome comprising SEQ ID NO: 2152 and an AAV2 variant capsid. In some embodiments, the AAV particle comprises a viral genome comprising SEQ ID NO: 2152 and an AAV2/3 variant capsid. In some embodiments, the AAV particle comprises a viral genome comprising SEQ ID NO: 2152 and a capsid comprising SEQ ID NO: 1. In some embodiments, the AAV particle comprises a viral genome comprising SEQ ID NO: 2152 and a capsid encoded by a nucleic acid sequence comprising SEQ ID NO: 2. In some embodiments, the AAV particle comprises a viral genome comprising SEQ ID NO: 2152 and a capsid comprising SEQ ID NO: 4534. In some embodiments, the AAV particle comprises a viral genome comprising SEQ ID NO: 2152 and a capsid encoded by a nucleic acid sequence comprising SEQ ID NO: 3. In some embodiments, the AAV particle comprises a viral genome comprising SEQ ID NO: 2152 and a capsid comprising SEQ ID NO: 138. In some embodiments, the AAV particle comprises a viral genome comprising SEQ ID NO: 2152 and a capsid encoded by a nucleic acid sequence comprising SEQ ID NO: 137. In some embodiments, the AAV particle comprises a viral genome comprising SEQ ID NO: 2152 and a capsid comprising SEQ ID NO: 5. In some embodiments, the AAV particle comprises a viral genome comprising SEQ ID NO: 2152 and a capsid encoded by a nucleic acid sequence comprising SEQ ID NO: 6. In some embodiments, the AAV particle comprises a viral genome comprising SEQ ID NO: 2152 and a capsid comprising SEQ ID NO: 4. In some embodiments, the AAV particle comprises a viral genome comprising SEQ ID NO: 2152 and a capsid comprising SEQ ID NO: 11. In some embodiments, the AAV particle comprises a viral genome comprising SEQ ID NO: 2152 and a capsid comprising SEQ ID NO: 2679. In some embodiments, the AAV particle comprises a viral genome comprising SEQ ID NO: 2152 and a capsid comprising SEQ ID NO: 2809. In some embodiments, the AAV particle comprises a viral genome comprising SEQ ID NO: 2152 and a capsid comprising SEQ ID NO: 2871.

[0851] In some embodiments, the AAV particle comprises a viral genome comprising SEQ ID NO: 2153 and a VOY101 capsid. In some embodiments, the AAV particle comprises a viral genome comprising SEQ ID NO: 2153 and a VOY201 capsid. In some embodiments, the AAV particle comprises a viral genome comprising SEQ ID NO: 2153 and an AAV9 capsid. In some embodiments, the AAV particle comprises a viral genome comprising SEQ ID NO: 2153 and an AAV9K449R capsid. In some embodiments, the AAV particle comprises a viral genome comprising SEQ ID NO: 2153 and an AAVPHP.B capsid. In some embodiments, the AAV particle comprises a viral genome comprising SEQ ID NO: 2153 and an AAVPHP.N capsid. In some embodiments, the AAV particle comprises a viral genome comprising SEQ ID NO: 2153 and an AAV2 variant capsid. In some embodiments, the AAV particle comprises a viral genome comprising SEQ ID NO: 2153 and an AAV2/3 variant capsid. In some embodiments, the AAV particle comprises a viral genome comprising SEQ ID NO: 2153 and a capsid comprising SEQ ID NO: 1. In some embodiments, the AAV particle comprises a viral genome comprising SEQ ID NO: 2153 and a capsid encoded by a nucleic acid sequence comprising SEQ ID NO: 2. In some embodiments, the AAV particle comprises a viral genome comprising SEQ ID NO: 2153 and a capsid comprising SEQ ID NO: 4534. In some embodiments, the AAV particle comprises a viral genome comprising SEQ ID NO: 2153 and a capsid encoded by a nucleic acid sequence comprising SEQ ID NO: 3. In some embodiments, the AAV particle comprises a viral genome comprising SEQ ID NO: 2153 and a capsid comprising SEQ ID NO: 138. In some embodiments, the AAV particle comprises a viral genome comprising SEQ ID NO: 2153 and a capsid encoded by a nucleic acid sequence comprising SEQ ID NO: 137. In some embodiments, the AAV particle comprises a viral genome comprising SEQ ID NO: 2153 and a capsid comprising SEQ ID NO: 5. In some embodiments, the AAV particle comprises a viral genome comprising SEQ ID NO: 2153 and a capsid encoded by a nucleic acid sequence comprising SEQ ID NO: 6. In some embodiments, the AAV particle comprises a viral genome comprising SEQ ID NO: 2153 and a capsid comprising SEQ ID NO: 4. In some embodiments, the AAV particle comprises a viral genome comprising SEQ ID NO: 2153 and a capsid comprising SEQ ID NO: 11. In some embodiments, the AAV particle comprises a viral genome comprising SEQ ID NO: 2153 and a capsid comprising SEQ ID NO: 2679. In some embodiments, the AAV particle comprises a viral genome comprising SEQ ID NO: 2153 and a capsid comprising SEQ ID NO: 2809. In some embodiments, the AAV particle comprises a viral genome comprising SEQ ID NO: 2153 and a capsid comprising SEQ ID NO: 2871.

[0852] In some embodiments, the AAV particle comprises a viral genome comprising SEQ ID NO: 2154 and a VOY101 capsid. In some embodiments, the AAV particle comprises a viral genome comprising SEQ ID NO: 2154 and a VOY201 capsid. In some embodiments, the AAV particle comprises a viral genome comprising SEQ ID NO: 2154 and an AAV9 capsid. In some embodiments, the AAV particle comprises a viral genome comprising SEQ ID NO: 2154 and an AAV9K449R capsid. In some embodiments, the AAV particle comprises a viral genome comprising SEQ ID NO: 2154 and an AAVPHP.B capsid. In some embodiments, the AAV particle comprises a viral genome comprising SEQ ID NO: 2154 and an AAVPHP.N capsid. In some embodiments, the AAV particle comprises a viral genome comprising SEQ ID NO: 2154 and an AAV2 variant capsid. In some embodiments, the AAV particle comprises a viral genome comprising SEQ ID NO: 2154 and an AAV2/3 variant capsid. In some embodiments, the AAV particle comprises a viral genome comprising SEQ ID NO: 2154 and a capsid comprising SEQ ID NO: 1. In some embodiments, the AAV particle comprises a viral genome comprising SEQ ID NO: 2154 and a capsid encoded by a nucleic acid sequence comprising SEQ ID NO: 2. In some embodiments, the AAV particle comprises a viral genome comprising SEQ ID NO: 2154 and a capsid comprising SEQ ID NO: 4534. In some embodiments, the AAV particle comprises a viral genome comprising SEQ ID NO: 2154 and a capsid encoded by a nucleic acid sequence comprising SEQ ID NO: 3. In some embodiments, the AAV particle comprises a viral genome comprising SEQ ID NO: 2154 and a capsid comprising SEQ ID NO: 138. In some embodiments, the AAV particle comprises a viral genome comprising SEQ ID NO: 2154 and a capsid encoded by a nucleic acid sequence comprising SEQ ID NO: 137. In some embodiments, the AAV particle comprises a viral genome comprising SEQ ID NO: 2154 and a capsid comprising SEQ ID NO: 5. In some embodiments, the AAV particle comprises a viral genome comprising SEQ ID NO: 2154 and a capsid encoded by a nucleic acid sequence comprising SEQ ID NO: 6. In some embodiments, the AAV particle comprises a viral genome comprising SEQ ID NO: 2154 and a capsid comprising SEQ ID NO: 4. In some embodiments, the AAV particle comprises a viral genome comprising SEQ ID NO: 2154 and a capsid comprising SEQ ID NO: 11. In some embodiments, the AAV particle comprises a viral genome comprising SEQ ID NO: 2154 and a capsid comprising SEQ ID NO: 2679. In some embodiments, the AAV particle comprises a viral genome comprising SEQ ID NO: 2154 and a capsid comprising SEQ ID NO: 2809. In some embodiments, the AAV particle comprises a viral genome comprising SEQ ID NO: 2154 and a capsid comprising SEQ ID NO: 2871.

[0853] In some embodiments, the AAV particle comprises a viral genome comprising SEQ ID NO: 2155 and a VOY101 capsid. In some embodiments, the AAV particle comprises a viral genome comprising SEQ ID NO: 2155 and a VOY201 capsid. In some embodiments, the AAV particle comprises a viral genome comprising SEQ ID NO: 2155 and an AAV9 capsid. In some embodiments, the AAV particle comprises a viral genome comprising SEQ ID NO: 2155 and an AAV9K449R capsid. In some embodiments, the AAV particle comprises a viral genome comprising SEQ ID NO: 2155 and an AAVPHP.B capsid. In some embodiments, the AAV particle comprises a viral genome comprising SEQ ID NO: 2155 and an AAVPHP.N capsid. In some embodiments, the AAV particle comprises a viral genome comprising SEQ ID NO: 2155 and an AAV2 variant capsid. In some embodiments, the AAV particle comprises a viral genome comprising SEQ ID NO: 2155 and an AAV2/3 variant capsid. In some embodiments, the AAV particle comprises a viral genome comprising SEQ ID NO: 2155 and a capsid comprising SEQ ID NO: 1. In some embodiments, the AAV particle comprises a viral genome comprising SEQ ID NO: 2155 and a capsid encoded by a nucleic acid sequence comprising SEQ ID NO: 2. In some embodiments, the AAV particle comprises a viral genome comprising SEQ ID NO: 2155 and a capsid comprising SEQ ID NO: 4534. In some embodiments, the AAV particle comprises a viral genome comprising SEQ ID NO: 2155 and a capsid encoded by a nucleic acid sequence comprising SEQ ID NO: 3. In some embodiments, the AAV particle comprises a viral genome comprising SEQ ID NO: 2155 and a capsid comprising SEQ ID NO: 138. In some embodiments, the AAV particle comprises a viral genome comprising SEQ ID NO: 2155 and a capsid encoded by a nucleic acid sequence comprising SEQ ID NO: 137. In some embodiments, the AAV particle comprises a viral genome comprising SEQ ID NO: 2155 and a capsid comprising SEQ ID NO: 5. In some embodiments, the AAV particle comprises a viral genome comprising SEQ ID NO: 2155 and a capsid encoded by a nucleic acid sequence comprising SEQ ID NO: 6. In some embodiments, the AAV particle comprises a viral genome comprising SEQ ID NO: 2155 and a capsid comprising SEQ ID NO: 4. In some embodiments, the AAV particle comprises a viral genome comprising SEQ ID NO: 2155 and a capsid comprising SEQ ID NO: 11. In some embodiments, the AAV particle comprises a viral genome comprising SEQ ID NO: 2155 and a capsid comprising SEQ ID NO: 2679. In some embodiments, the AAV particle comprises a viral genome comprising SEQ ID NO: 2155 and a capsid comprising SEQ ID NO: 2809. In some embodiments, the AAV particle comprises a viral genome comprising SEQ ID NO: 2155 and a capsid comprising SEQ ID NO: 2871.

[0854] In some embodiments, the AAV particle comprises a viral genome comprising SEQ ID NO: 2156 and a VOY101 capsid. In some embodiments, the AAV particle comprises a viral genome comprising SEQ ID NO: 2156 and a VOY201 capsid. In some embodiments, the AAV particle comprises a viral genome comprising SEQ ID NO: 2156 and an AAV9 capsid. In some embodiments, the AAV particle comprises a viral genome comprising SEQ ID NO: 2156 and an AAV9K449R capsid. In some embodiments, the AAV particle comprises a viral genome comprising SEQ ID NO: 2156 and an AAVPHP.B capsid. In some embodiments, the AAV particle comprises a viral genome comprising SEQ ID NO: 2156 and an AAVPHP.N capsid. In some embodiments, the AAV particle comprises a viral genome comprising SEQ ID NO: 2156 and an AAV2 variant capsid. In some embodiments, the AAV particle comprises a viral genome comprising SEQ ID NO: 2156 and an AAV2/3 variant capsid. In some embodiments, the AAV particle comprises a viral genome comprising SEQ ID NO: 2156 and a capsid comprising SEQ ID NO: 1. In some embodiments, the AAV particle comprises a viral genome comprising SEQ ID NO: 2156 and a capsid encoded by a nucleic acid sequence comprising SEQ ID NO: 2. In some embodiments, the AAV particle comprises a viral genome comprising SEQ ID NO: 2156 and a capsid comprising SEQ ID NO: 4534. In some embodiments, the AAV particle comprises a viral genome comprising SEQ ID NO: 2156 and a capsid encoded by a nucleic acid sequence comprising SEQ ID NO: 3. In some embodiments, the AAV particle comprises a viral genome comprising SEQ ID NO: 2156 and a capsid comprising SEQ ID NO: 138. In some embodiments, the AAV particle comprises a viral genome comprising SEQ ID NO: 2156 and a capsid encoded by a nucleic acid sequence comprising SEQ ID NO: 137. In some embodiments, the AAV particle comprises a viral genome comprising SEQ ID NO: 2156 and a capsid comprising SEQ ID NO: 5. In some embodiments, the AAV particle comprises a viral genome comprising SEQ ID NO: 2156 and a capsid encoded by a nucleic acid sequence comprising SEQ ID NO: 6. In some embodiments, the AAV particle comprises a viral genome comprising SEQ ID NO: 2156 and a capsid comprising SEQ ID NO: 4. In some embodiments, the AAV particle comprises a viral genome comprising SEQ ID NO: 2156 and a capsid comprising SEQ ID NO: 11. In some embodiments, the AAV particle comprises a viral genome comprising SEQ ID NO: 2156 and a capsid comprising SEQ ID NO: 2679. In some embodiments, the AAV particle comprises a viral genome comprising SEQ ID NO: 2156 and a capsid comprising SEQ ID NO: 2809. In some embodiments, the AAV particle comprises a viral genome comprising SEQ ID NO: 2156 and a capsid comprising SEQ ID NO: 2871.

[0855] In some embodiments, the AAV particle comprises a viral genome comprising SEQ ID NO: 2157 and a VOY101 capsid. In some embodiments, the AAV particle comprises a viral genome comprising SEQ ID NO: 2157 and a VOY201 capsid. In some embodiments, the AAV particle comprises a viral genome comprising SEQ ID NO: 2157 and an AAV9 capsid. In some embodiments, the AAV particle comprises a viral genome comprising SEQ ID NO: 2157 and an AAV9K449R capsid. In some embodiments, the AAV particle comprises a viral genome comprising SEQ ID NO: 2157 and an AAVPHP.B capsid. In some embodiments, the AAV particle comprises a viral genome comprising SEQ ID NO: 2157 and an AAVPHP.N capsid. In some embodiments, the AAV particle comprises a viral genome comprising SEQ ID NO: 2157 and an AAV2 variant capsid. In some embodiments, the AAV particle comprises a viral genome comprising SEQ ID NO: 2157 and an AAV2/3 variant capsid. In some embodiments, the AAV particle comprises a viral genome comprising SEQ ID NO: 2157 and a capsid comprising SEQ ID NO: 1. In some embodiments, the AAV particle comprises a viral genome comprising SEQ ID NO: 2157 and a capsid encoded by a nucleic acid sequence comprising SEQ ID NO: 2. In some embodiments, the AAV particle comprises a viral genome comprising SEQ ID NO: 2157 and a capsid comprising SEQ ID NO: 4534. In some embodiments, the AAV particle comprises a viral genome comprising SEQ ID NO: 2157 and a capsid encoded by a nucleic acid sequence comprising SEQ ID NO: 3. In some embodiments, the AAV particle comprises a viral genome comprising SEQ ID NO: 2157 and a capsid comprising SEQ ID NO: 138. In some embodiments, the AAV particle comprises a viral genome comprising SEQ ID NO: 2157 and a capsid encoded by a nucleic acid sequence comprising SEQ ID NO: 137. In some embodiments, the AAV particle comprises a viral genome comprising SEQ ID NO: 2157 and a capsid comprising SEQ ID NO: 5. In some embodiments, the AAV particle comprises a viral genome comprising SEQ ID NO: 2157 and a capsid encoded by a nucleic acid sequence comprising SEQ ID NO: 6. In some embodiments, the AAV particle comprises a viral genome comprising SEQ ID NO: 2157 and a capsid comprising SEQ ID NO: 4. In some embodiments, the AAV particle comprises a viral genome comprising SEQ ID NO: 2157 and a capsid comprising SEQ ID NO: 11. In some embodiments, the AAV particle comprises a viral genome comprising SEQ ID NO: 2157 and a capsid comprising SEQ ID NO: 2679. In some embodiments, the AAV particle comprises a viral genome comprising SEQ ID NO: 2157 and a capsid comprising SEQ ID NO: 2809. In some embodiments, the AAV particle comprises a viral genome comprising SEQ ID NO: 2157 and a capsid comprising SEQ ID NO: 2871.

[0856] In some embodiments, the AAV particle comprises a viral genome comprising SEQ ID NO: 2158 and a VOY101 capsid. In some embodiments, the AAV particle comprises a viral genome comprising SEQ ID NO: 2158 and a VOY201 capsid. In some embodiments, the AAV particle comprises a viral genome comprising SEQ ID NO: 2158 and an AAV9 capsid. In some embodiments, the AAV particle comprises a viral genome comprising SEQ ID NO: 2158 and an AAV9K449R capsid. In some embodiments, the AAV particle comprises a viral genome comprising SEQ ID NO: 2158 and an AAVPHP.B capsid. In some embodiments, the AAV particle comprises a viral genome comprising SEQ ID NO: 2158 and an AAVPHP.N capsid. In some embodiments, the AAV particle comprises a viral genome comprising SEQ ID NO: 2158 and an AAV2 variant capsid. In some embodiments, the AAV particle comprises a viral genome comprising SEQ ID NO: 2158 and an AAV2/3 variant capsid. In some embodiments, the AAV particle comprises a viral genome comprising SEQ ID NO: 2158 and a capsid comprising SEQ ID NO: 1. In some embodiments, the AAV particle comprises a viral genome comprising SEQ ID NO: 2158 and a capsid encoded by a nucleic acid sequence comprising SEQ ID NO: 2. In some embodiments, the AAV particle comprises a viral genome comprising SEQ ID NO: 2158 and a capsid comprising SEQ ID NO: 4534. In some embodiments, the AAV particle comprises a viral genome comprising SEQ ID NO: 2158 and a capsid encoded by a nucleic acid sequence comprising SEQ ID NO: 3. In some embodiments, the AAV particle comprises a viral genome comprising SEQ ID NO: 2158 and a capsid comprising SEQ ID NO: 138. In some embodiments, the AAV particle comprises a viral genome comprising SEQ ID NO: 2158 and a capsid encoded by a nucleic acid sequence comprising SEQ ID NO: 137. In some embodiments, the AAV particle comprises a viral genome comprising SEQ ID NO: 2158 and a capsid comprising SEQ ID NO: 5. In some embodiments, the AAV particle comprises a viral genome comprising SEQ ID NO: 2158 and a capsid encoded by a nucleic acid sequence comprising SEQ ID NO: 6. In some embodiments, the AAV particle comprises a viral genome comprising SEQ ID NO: 2158 and a capsid comprising SEQ ID NO: 4. In some embodiments, the AAV particle comprises a viral genome comprising SEQ ID NO: 2158 and a capsid comprising SEQ ID NO: 11. In some embodiments, the AAV particle comprises a viral genome comprising SEQ ID NO: 2158 and a capsid comprising SEQ ID NO: 2679. In some embodiments, the AAV particle comprises a viral genome comprising SEQ ID NO: 2158 and a capsid comprising SEQ ID NO: 2809. In some embodiments, the AAV particle comprises a viral genome comprising SEQ ID NO: 2158 and a capsid comprising SEQ ID NO: 2871.

[0857] In some embodiments, the AAV particle comprises a viral genome comprising SEQ ID NO: 2159 and a VOY101 capsid. In some embodiments, the AAV particle comprises a viral genome comprising SEQ ID NO: 2159 and a VOY201 capsid. In some embodiments, the AAV particle comprises a viral genome comprising SEQ ID NO: 2159 and an AAV9 capsid. In some embodiments, the AAV particle comprises a viral genome comprising SEQ ID NO: 2159 and an AAV9K449R capsid. In some embodiments, the AAV particle comprises a viral genome comprising SEQ ID NO: 2159 and an AAVPHP.B capsid. In some embodiments, the AAV particle comprises a viral genome comprising SEQ ID NO: 2159 and an AAVPHP.N capsid. In some embodiments, the AAV particle comprises a viral genome comprising SEQ ID NO: 2159 and an AAV2 variant capsid. In some embodiments, the AAV particle comprises a viral genome comprising SEQ ID NO: 2159 and an AAV2/3 variant capsid. In some embodiments, the AAV particle comprises a viral genome comprising SEQ ID NO: 2159 and a capsid comprising SEQ ID NO: 1. In some embodiments, the AAV particle comprises a viral genome comprising SEQ ID NO: 2159 and a capsid encoded by a nucleic acid sequence comprising SEQ ID NO: 2. In some embodiments, the AAV particle comprises a viral genome comprising SEQ ID NO: 2159 and a capsid comprising SEQ ID NO: 4534. In some embodiments, the AAV particle comprises a viral genome comprising SEQ ID NO: 2159 and a capsid encoded by a nucleic acid sequence comprising SEQ ID NO: 3. In some embodiments, the AAV particle comprises a viral genome comprising SEQ ID NO: 2159 and a capsid comprising SEQ ID NO: 138. In some embodiments, the AAV particle comprises a viral genome comprising SEQ ID NO: 2159 and a capsid encoded by a nucleic acid sequence comprising SEQ ID NO: 137. In some embodiments, the AAV particle comprises a viral genome comprising SEQ ID NO: 2159 and a capsid comprising SEQ ID NO: 5. In some embodiments, the AAV particle comprises a viral genome comprising SEQ ID NO: 2159 and a capsid encoded by a nucleic acid sequence comprising SEQ ID NO: 6. In some embodiments, the AAV particle comprises a viral genome comprising SEQ ID NO: 2159 and a capsid comprising SEQ ID NO: 4. In some embodiments, the AAV particle comprises a viral genome comprising SEQ ID NO: 2159 and a capsid comprising SEQ ID NO: 11. In some embodiments, the AAV particle comprises a viral genome comprising SEQ ID NO: 2159 and a capsid comprising SEQ ID NO: 2679. In some embodiments, the AAV particle comprises a viral genome comprising SEQ ID NO: 2159 and a capsid comprising SEQ ID NO: 2809. In some embodiments, the AAV particle comprises a viral genome comprising SEQ ID NO: 2159 and a capsid comprising SEQ ID NO: 2871.

[0858] In some embodiments, the AAV particle comprises a viral genome comprising SEQ ID NO: 2160 and a VOY101 capsid. In some embodiments, the AAV particle comprises a viral genome comprising SEQ ID NO: 2160 and a VOY201 capsid. In some embodiments, the AAV particle comprises a viral genome comprising SEQ ID NO: 2160 and an AAV9 capsid. In some embodiments, the AAV particle comprises a viral genome comprising SEQ ID NO: 2160 and an AAV9K449R capsid. In some embodiments, the AAV particle comprises a viral genome comprising SEQ ID NO: 2160 and an AAVPHP.B capsid. In some embodiments, the AAV particle comprises a viral genome comprising SEQ ID NO: 2160 and an AAVPHP.N capsid. In some embodiments, the AAV particle comprises a viral genome comprising SEQ ID NO: 2160 and an AAV2 variant capsid. In some embodiments, the AAV particle comprises a viral genome comprising SEQ ID NO: 2160 and an AAV2/3 variant capsid. In some embodiments, the AAV particle comprises a viral genome comprising SEQ ID NO: 2160 and a capsid comprising SEQ ID NO: 1. In some embodiments, the AAV particle comprises a viral genome comprising SEQ ID NO: 2160 and a capsid encoded by a nucleic acid sequence comprising SEQ ID NO: 2. In some embodiments, the AAV particle comprises a viral genome comprising SEQ ID NO: 2160 and a capsid comprising SEQ ID NO: 4534. In some embodiments, the AAV particle comprises a viral genome comprising SEQ ID NO: 2160 and a capsid encoded by a nucleic acid sequence comprising SEQ ID NO: 3. In some embodiments, the AAV particle comprises a viral genome comprising SEQ ID NO: 2160 and a capsid comprising SEQ ID NO: 138. In some embodiments, the AAV particle comprises a viral genome comprising SEQ ID NO: 2160 and a capsid encoded by a nucleic acid sequence comprising SEQ ID NO: 137. In some embodiments, the AAV particle comprises a viral genome comprising SEQ ID NO: 2160 and a capsid comprising SEQ ID NO: 5. In some embodiments, the AAV particle comprises a viral genome comprising SEQ ID NO: 2160 and a capsid encoded by a nucleic acid sequence comprising SEQ ID NO: 6. In some embodiments, the AAV particle comprises a viral genome comprising SEQ ID NO: 2160 and a capsid comprising SEQ ID NO: 4. In some embodiments, the AAV particle comprises a viral genome comprising SEQ ID NO: 2160 and a capsid comprising SEQ ID NO: 11. In some embodiments, the AAV particle comprises a viral genome comprising SEQ ID NO: 2160 and a capsid comprising SEQ ID NO: 2679. In some embodiments, the AAV particle comprises a viral genome comprising SEQ ID NO: 2160 and a capsid comprising SEQ ID NO: 2809. In some embodiments, the AAV particle comprises a viral genome comprising SEQ ID NO: 2160 and a capsid comprising SEQ ID NO: 2871.

[0859] In some embodiments, the AAV particle comprises a viral genome comprising SEQ ID NO: 2161 and a VOY101 capsid. In some embodiments, the AAV particle comprises a viral genome comprising SEQ ID NO: 2161 and a VOY201 capsid. In some embodiments, the AAV particle comprises a viral genome comprising SEQ ID NO: 2161 and an AAV9 capsid. In some embodiments, the AAV particle comprises a viral genome comprising SEQ ID NO: 2161 and an AAV9K449R capsid. In some embodiments, the AAV particle comprises a viral genome comprising SEQ ID NO: 2161 and an AAVPHP.B capsid. In some embodiments, the AAV particle comprises a viral genome comprising SEQ ID NO: 2161 and an AAVPHP.N capsid. In some embodiments, the AAV particle comprises a viral genome comprising SEQ ID NO: 2161 and an AAV2 variant capsid. In some embodiments, the AAV particle comprises a viral genome comprising SEQ ID NO: 2161 and an AAV2/3 variant capsid. In some embodiments, the AAV particle comprises a viral genome comprising SEQ ID NO: 2161 and a capsid comprising SEQ ID NO: 1. In some embodiments, the AAV particle comprises a viral genome comprising SEQ ID NO: 2161 and a capsid encoded by a nucleic acid sequence comprising SEQ ID NO: 2. In some embodiments, the AAV particle comprises a viral genome comprising SEQ ID NO: 2161 and a capsid comprising SEQ ID NO: 4534. In some embodiments, the AAV particle comprises a viral genome comprising SEQ ID NO: 2161 and a capsid encoded by a nucleic acid sequence comprising SEQ ID NO: 3. In some embodiments, the AAV particle comprises a viral genome comprising SEQ ID NO: 2161 and a capsid comprising SEQ ID NO: 138. In some embodiments, the AAV particle comprises a viral genome comprising SEQ ID NO: 2161 and a capsid encoded by a nucleic acid sequence comprising SEQ ID NO: 137. In some embodiments, the AAV particle comprises a viral genome comprising SEQ ID NO: 2161 and a capsid comprising SEQ ID NO: 5. In some embodiments, the AAV particle comprises a viral genome comprising SEQ ID NO: 2161 and a capsid encoded by a nucleic acid sequence comprising SEQ ID NO: 6. In some embodiments, the AAV particle comprises a viral genome comprising SEQ ID NO: 2161 and a capsid comprising SEQ ID NO: 4. In some embodiments, the AAV particle comprises a viral genome comprising SEQ ID NO: 2161 and a capsid comprising SEQ ID NO: 11. In some embodiments, the AAV particle comprises a viral genome comprising SEQ ID NO: 2161 and a capsid comprising SEQ ID NO: 2679. In some embodiments, the AAV particle comprises a viral genome comprising SEQ ID NO: 2161 and a capsid comprising SEQ ID NO: 2809. In some embodiments, the AAV particle comprises a viral genome comprising SEQ ID NO: 2161 and a capsid comprising SEQ ID NO: 2871.

[0860] In some embodiments, the AAV particle comprises a viral genome comprising SEQ ID NO: 2162 and a VOY101 capsid. In some embodiments, the AAV particle comprises a viral genome comprising SEQ ID NO: 2162 and a VOY201 capsid. In some embodiments, the AAV particle comprises a viral genome comprising SEQ ID NO: 2162 and an AAV9 capsid. In some embodiments, the AAV particle comprises a viral genome comprising SEQ ID NO: 2162 and an AAV9K449R capsid. In some embodiments, the AAV particle comprises a viral genome comprising SEQ ID NO: 2162 and an AAVPHP.B capsid. In some embodiments, the AAV particle comprises a viral genome comprising SEQ ID NO: 2162 and an AAVPHP.N capsid. In some embodiments, the AAV particle comprises a viral genome comprising SEQ ID NO: 2162 and an AAV2 variant capsid. In some embodiments, the AAV particle comprises a viral genome comprising SEQ ID NO: 2162 and an AAV2/3 variant capsid. In some embodiments, the AAV particle comprises a viral genome comprising SEQ ID NO: 2162 and a capsid comprising SEQ ID NO: 1. In some embodiments, the AAV particle comprises a viral genome comprising SEQ ID NO: 2162 and a capsid encoded by a nucleic acid sequence comprising SEQ ID NO: 2. In some embodiments, the AAV particle comprises a viral genome comprising SEQ ID NO: 2162 and a capsid comprising SEQ ID NO: 4534. In some embodiments, the AAV particle comprises a viral genome comprising SEQ ID NO: 2162 and a capsid encoded by a nucleic acid sequence comprising SEQ ID NO: 3. In some embodiments, the AAV particle comprises a viral genome comprising SEQ ID NO: 2162 and a capsid comprising SEQ ID NO: 138. In some embodiments, the AAV particle comprises a viral genome comprising SEQ ID NO: 2162 and a capsid encoded by a nucleic acid sequence comprising SEQ ID NO: 137. In some embodiments, the AAV particle comprises a viral genome comprising SEQ ID NO: 2162 and a capsid comprising SEQ ID NO: 5. In some embodiments, the AAV particle comprises a viral genome comprising SEQ ID NO: 2162 and a capsid encoded by a nucleic acid sequence comprising SEQ ID NO: 6. In some embodiments, the AAV particle comprises a viral genome comprising SEQ ID NO: 2162 and a capsid comprising SEQ ID NO: 4. In some embodiments, the AAV particle comprises a viral genome comprising SEQ ID NO: 2162 and a capsid comprising SEQ ID NO: 11. In some embodiments, the AAV particle comprises a viral genome comprising SEQ ID NO: 2162 and a capsid comprising SEQ ID NO: 2679. In some embodiments, the AAV particle comprises a viral genome comprising SEQ ID NO: 2162 and a capsid comprising SEQ ID NO: 2809. In some embodiments, the AAV particle comprises a viral genome comprising SEQ ID NO: 2162 and a capsid comprising SEQ ID NO: 2871.

[0861] In some embodiments, the AAV particle comprises a viral genome comprising SEQ ID NO: 2163 and a VOY101 capsid. In some embodiments, the AAV particle comprises a viral genome comprising SEQ ID NO: 2163 and a VOY201 capsid. In some embodiments, the AAV particle comprises a viral genome comprising SEQ ID NO: 2163 and an AAV9 capsid. In some embodiments, the AAV particle comprises a viral genome comprising SEQ ID NO: 2163 and an AAV9K449R capsid. In some embodiments, the AAV particle comprises a viral genome comprising SEQ ID NO: 2163 and an AAVPHP.B capsid. In some embodiments, the AAV particle comprises a viral genome comprising SEQ ID NO: 2163 and an AAVPHP.N capsid. In some embodiments, the AAV particle comprises a viral genome comprising SEQ ID NO: 2163 and an AAV2 variant capsid. In some embodiments, the AAV particle comprises a viral genome comprising SEQ ID NO: 2163 and an AAV2/3 variant capsid. In some embodiments, the AAV particle comprises a viral genome comprising SEQ ID NO: 2163 and a capsid comprising SEQ ID NO: 1. In some embodiments, the AAV particle comprises a viral genome comprising SEQ ID NO: 2163 and a capsid encoded by a nucleic acid sequence comprising SEQ ID NO: 2. In some embodiments, the AAV particle comprises a viral genome comprising SEQ ID NO: 2163 and a capsid comprising SEQ ID NO: 4534. In some embodiments, the AAV particle comprises a viral genome comprising SEQ ID NO: 2163 and a capsid encoded by a nucleic acid sequence comprising SEQ ID NO: 3. In some embodiments, the AAV particle comprises a viral genome comprising SEQ ID NO: 2163 and a capsid comprising SEQ ID NO: 138. In some embodiments, the AAV particle comprises a viral genome comprising SEQ ID NO: 2163 and a capsid encoded by a nucleic acid sequence comprising SEQ ID NO: 137. In some embodiments, the AAV particle comprises a viral genome comprising SEQ ID NO: 2163 and a capsid comprising SEQ ID NO: 5. In some embodiments, the AAV particle comprises a viral genome comprising SEQ ID NO: 2163 and a capsid encoded by a nucleic acid sequence comprising SEQ ID NO: 6. In some embodiments, the AAV particle comprises a viral genome comprising SEQ ID NO: 2163 and a capsid comprising SEQ ID NO: 4. In some embodiments, the AAV particle comprises a viral genome comprising SEQ ID NO: 2163 and a capsid comprising SEQ ID NO: 11. In some embodiments, the AAV particle comprises a viral genome comprising SEQ ID NO: 2163 and a capsid comprising SEQ ID NO: 2679. In some embodiments, the AAV particle comprises a viral genome comprising SEQ ID NO: 2163 and a capsid comprising SEQ ID NO: 2809. In some embodiments, the AAV particle comprises a viral genome comprising SEQ ID NO: 2163 and a capsid comprising SEQ ID NO: 2871.

[0862] In some embodiments, the AAV particle comprises a viral genome comprising SEQ ID NO: 2164 and a VOY101 capsid. In some embodiments, the AAV particle comprises a viral genome comprising SEQ ID NO: 2164 and a VOY201 capsid. In some embodiments, the AAV particle comprises a viral genome comprising SEQ ID NO: 2164 and an AAV9 capsid. In some embodiments, the AAV particle comprises a viral genome comprising SEQ ID NO: 2164 and an AAV9K449R capsid. In some embodiments, the AAV particle comprises a viral genome comprising SEQ ID NO: 2164 and an AAVPHP.B capsid. In some embodiments, the AAV particle comprises a viral genome comprising SEQ ID NO: 2164 and an AAVPHP.N capsid. In some embodiments, the AAV particle comprises a viral genome comprising SEQ ID NO: 2164 and an AAV2 variant capsid. In some embodiments, the AAV particle comprises a viral genome comprising SEQ ID NO: 2164 and an AAV2/3 variant capsid. In some embodiments, the AAV particle comprises a viral genome comprising SEQ ID NO: 2164 and a capsid comprising SEQ ID NO: 1. In some embodiments, the AAV particle comprises a viral genome comprising SEQ ID NO: 2164 and a capsid encoded by a nucleic acid sequence comprising SEQ ID NO: 2. In some embodiments, the AAV particle comprises a viral genome comprising SEQ ID NO: 2164 and a capsid comprising SEQ ID NO: 4534. In some embodiments, the AAV particle comprises a viral genome comprising SEQ ID NO: 2164 and a capsid encoded by a nucleic acid sequence comprising SEQ ID NO: 3. In some embodiments, the AAV particle comprises a viral genome comprising SEQ ID NO: 2164 and a capsid comprising SEQ ID NO: 138. In some embodiments, the AAV particle comprises a viral genome comprising SEQ ID NO: 2164 and a capsid encoded by a nucleic acid sequence comprising SEQ ID NO: 137. In some embodiments, the AAV particle comprises a viral genome comprising SEQ ID NO: 2164 and a capsid comprising SEQ ID NO: 5. In some embodiments, the AAV particle comprises a viral genome comprising SEQ ID NO: 2164 and a capsid encoded by a nucleic acid sequence comprising SEQ ID NO: 6. In some embodiments, the AAV particle comprises a viral genome comprising SEQ ID NO: 2164 and a capsid comprising SEQ ID NO: 4. In some embodiments, the AAV particle comprises a viral genome comprising SEQ ID NO: 2164 and a capsid comprising SEQ ID NO: 11. In some embodiments, the AAV particle comprises a viral genome comprising SEQ ID NO: 2164 and a capsid comprising SEQ ID NO: 2679. In some embodiments, the AAV particle comprises a viral genome comprising SEQ ID NO: 2164 and a capsid comprising SEQ ID NO: 2809. In some embodiments, the AAV particle comprises a viral genome comprising SEQ ID NO: 2164 and a capsid comprising SEQ ID NO: 2871.

[0863] In some embodiments, the AAV particle comprises a viral genome comprising SEQ ID NO: 2165 and a VOY101 capsid. In some embodiments, the AAV particle comprises a viral genome comprising SEQ ID NO: 2165 and a VOY201 capsid. In some embodiments, the AAV particle comprises a viral genome comprising SEQ ID NO: 2165 and an AAV9 capsid. In some embodiments, the AAV particle comprises a viral genome comprising SEQ ID NO: 2165 and an AAV9K449R capsid. In some embodiments, the AAV particle comprises a viral genome comprising SEQ ID NO: 2165 and an AAVPHP.B capsid. In some embodiments, the AAV particle comprises a viral genome comprising SEQ ID NO: 2165 and an AAVPHP.N capsid. In some embodiments, the AAV particle comprises a viral genome comprising SEQ ID NO: 2165 and an AAV2 variant capsid. In some embodiments, the AAV particle comprises a viral genome comprising SEQ ID NO: 2165 and an AAV2/3 variant capsid. In some embodiments, the AAV particle comprises a viral genome comprising SEQ ID NO: 2165 and a capsid comprising SEQ ID NO: 1. In some embodiments, the AAV particle comprises a viral genome comprising SEQ ID NO: 2165 and a capsid encoded by a nucleic acid sequence comprising SEQ ID NO: 2. In some embodiments, the AAV particle comprises a viral genome comprising SEQ ID NO: 2165 and a capsid comprising SEQ ID NO: 4534. In some embodiments, the AAV particle comprises a viral genome comprising SEQ ID NO: 2165 and a capsid encoded by a nucleic acid sequence comprising SEQ ID NO: 3. In some embodiments, the AAV particle comprises a viral genome comprising SEQ ID NO: 2165 and a capsid comprising SEQ ID NO: 138. In some embodiments, the AAV particle comprises a viral genome comprising SEQ ID NO: 2165 and a capsid encoded by a nucleic acid sequence comprising SEQ ID NO: 137. In some embodiments, the AAV particle comprises a viral genome comprising SEQ ID NO: 2165 and a capsid comprising SEQ ID NO: 5. In some embodiments, the AAV particle comprises a viral genome comprising SEQ ID NO: 2165 and a capsid encoded by a nucleic acid sequence comprising SEQ ID NO: 6. In some embodiments, the AAV particle comprises a viral genome comprising SEQ ID NO: 2165 and a capsid comprising SEQ ID NO: 4. In some embodiments, the AAV particle comprises a viral genome comprising SEQ ID NO: 2165 and a capsid comprising SEQ ID NO: 11. In some embodiments, the AAV particle comprises a viral genome comprising SEQ ID NO: 2165 and a capsid comprising SEQ ID NO: 2679. In some embodiments, the AAV particle comprises a viral genome comprising SEQ ID NO: 2165 and a capsid comprising SEQ ID NO: 2809. In some embodiments, the AAV particle comprises a viral genome comprising SEQ ID NO: 2165 and a capsid comprising SEQ ID NO: 2871.

[0864] In some embodiments, the AAV particle comprises a viral genome comprising SEQ ID NO: 2166 and a VOY101 capsid. In some embodiments, the AAV particle comprises a viral genome comprising SEQ ID NO: 2166 and a VOY201 capsid. In some embodiments, the AAV particle comprises a viral genome comprising SEQ ID NO: 2166 and an AAV9 capsid. In some embodiments, the AAV particle comprises a viral genome comprising SEQ ID NO: 2166 and an AAV9K449R capsid. In some embodiments, the AAV particle comprises a viral genome comprising SEQ ID NO: 2166 and an AAVPHP.B capsid. In some embodiments, the AAV particle comprises a viral genome comprising SEQ ID NO: 2166 and an AAVPHP.N capsid. In some embodiments, the AAV particle comprises a viral genome comprising SEQ ID NO: 2166 and an AAV2 variant capsid. In some embodiments, the AAV particle comprises a viral genome comprising SEQ ID NO: 2166 and an AAV2/3 variant capsid. In some embodiments, the AAV particle comprises a viral genome comprising SEQ ID NO: 2166 and a capsid comprising SEQ ID NO: 1. In some embodiments, the AAV particle comprises a viral genome comprising SEQ ID NO: 2166 and a capsid encoded by a nucleic acid sequence comprising SEQ ID NO: 2. In some embodiments, the AAV particle comprises a viral genome comprising SEQ ID NO: 2166 and a capsid comprising SEQ ID NO: 4534. In some embodiments, the AAV particle comprises a viral genome comprising SEQ ID NO: 2166 and a capsid encoded by a nucleic acid sequence comprising SEQ ID NO: 3. In some embodiments, the AAV particle comprises a viral genome comprising SEQ ID NO: 2166 and a capsid comprising SEQ ID NO: 138. In some embodiments, the AAV particle comprises a viral genome comprising SEQ ID NO: 2166 and a capsid encoded by a nucleic acid sequence comprising SEQ ID NO: 137. In some embodiments, the AAV particle comprises a viral genome comprising SEQ ID NO: 2166 and a capsid comprising SEQ ID NO: 5. In some embodiments, the AAV particle comprises a viral genome comprising SEQ ID NO: 2166 and a capsid encoded by a nucleic acid sequence comprising SEQ ID NO: 6. In some embodiments, the AAV particle comprises a viral genome comprising SEQ ID NO: 2166 and a capsid comprising SEQ ID NO: 4. In some embodiments, the AAV particle comprises a viral genome comprising SEQ ID NO: 2166 and a capsid comprising SEQ ID NO: 11. In some embodiments, the AAV particle comprises a viral genome comprising SEQ ID NO: 2166 and a capsid comprising SEQ ID NO: 2679. In some embodiments, the AAV particle comprises a viral genome comprising SEQ ID NO: 2166 and a capsid comprising SEQ ID NO: 2809. In some embodiments, the AAV particle comprises a viral genome comprising SEQ ID NO: 2166 and a capsid comprising SEQ ID NO: 2871.

[0865] In some embodiments, the AAV particle comprises a viral genome comprising SEQ ID NO: 2167 and a VOY101 capsid. In some embodiments, the AAV particle comprises a viral genome comprising SEQ ID NO: 2167 and a VOY201 capsid. In some embodiments, the AAV particle comprises a viral genome comprising SEQ ID NO: 2167 and an AAV9 capsid. In some embodiments, the AAV particle comprises a viral genome comprising SEQ ID NO: 2167 and an AAV9K449R capsid. In some embodiments, the AAV particle comprises a viral genome comprising SEQ ID NO: 2167 and an AAVPHP.B capsid. In some embodiments, the AAV particle comprises a viral genome comprising SEQ ID NO: 2167 and an AAVPHP.N capsid. In some embodiments, the AAV particle comprises a viral genome comprising SEQ ID NO: 2167 and an AAV2 variant capsid. In some embodiments, the AAV particle comprises a viral genome comprising SEQ ID NO: 2167 and an AAV2/3 variant capsid. In some embodiments, the AAV particle comprises a viral genome comprising SEQ ID NO: 2167 and a capsid comprising SEQ ID NO: 1. In some embodiments, the AAV particle comprises a viral genome comprising SEQ ID NO: 2167 and a capsid encoded by a nucleic acid sequence comprising SEQ ID NO: 2. In some embodiments, the AAV particle comprises a viral genome comprising SEQ ID NO: 2167 and a capsid comprising SEQ ID NO: 4534. In some embodiments, the AAV particle comprises a viral genome comprising SEQ ID NO: 2167 and a capsid encoded by a nucleic acid sequence comprising SEQ ID NO: 3. In some embodiments, the AAV particle comprises a viral genome comprising SEQ ID NO: 2167 and a capsid comprising SEQ ID NO: 138. In some embodiments, the AAV particle comprises a viral genome comprising SEQ ID NO: 2167 and a capsid encoded by a nucleic acid sequence comprising SEQ ID NO: 137. In some embodiments, the AAV particle comprises a viral genome comprising SEQ ID NO: 2167 and a capsid comprising SEQ ID NO: 5. In some embodiments, the AAV particle comprises a viral genome comprising SEQ ID NO: 2167 and a capsid encoded by a nucleic acid sequence comprising SEQ ID NO: 6. In some embodiments, the AAV particle comprises a viral genome comprising SEQ ID NO: 2167 and a capsid comprising SEQ ID NO: 4. In some embodiments, the AAV particle comprises a viral genome comprising SEQ ID NO: 2167 and a capsid comprising SEQ ID NO: 11. In some embodiments, the AAV particle comprises a viral genome comprising SEQ ID NO: 2167 and a capsid comprising SEQ ID NO: 2679. In some embodiments, the AAV particle comprises a viral genome comprising SEQ ID NO: 2167 and a capsid comprising SEQ ID NO: 2809. In some embodiments, the AAV particle comprises a viral genome comprising SEQ ID NO: 2167 and a capsid comprising SEQ ID NO: 2871.

[0866] In some embodiments, the AAV particle comprises a viral genome comprising SEQ ID NO: 2168 and a VOY101 capsid. In some embodiments, the AAV particle comprises a viral genome comprising SEQ ID NO: 2168 and a VOY201 capsid. In some embodiments, the AAV particle comprises a viral genome comprising SEQ ID NO: 2168 and an AAV9 capsid. In some embodiments, the AAV particle comprises a viral genome comprising SEQ ID NO: 2168 and an AAV9K449R capsid. In some embodiments, the AAV particle comprises a viral genome comprising SEQ ID NO: 2168 and an AAVPHP.B capsid. In some embodiments, the AAV particle comprises a viral genome comprising SEQ ID NO: 2168 and an AAVPHP.N capsid. In some embodiments, the AAV particle comprises a viral genome comprising SEQ ID NO: 2168 and an AAV2 variant capsid. In some embodiments, the AAV particle comprises a viral genome comprising SEQ ID NO: 2168 and an AAV2/3 variant capsid. In some embodiments, the AAV particle comprises a viral genome comprising SEQ ID NO: 2168 and a capsid comprising SEQ ID NO: 1. In some embodiments, the AAV particle comprises a viral genome comprising SEQ ID NO: 2168 and a capsid encoded by a nucleic acid sequence comprising SEQ ID NO: 2. In some embodiments, the AAV particle comprises a viral genome comprising SEQ ID NO: 2168 and a capsid comprising SEQ ID NO: 4534. In some embodiments, the AAV particle comprises a viral genome comprising SEQ ID NO: 2168 and a capsid encoded by a nucleic acid sequence comprising SEQ ID NO: 3. In some embodiments, the AAV particle comprises a viral genome comprising SEQ ID NO: 2168 and a capsid comprising SEQ ID NO: 138. In some embodiments, the AAV particle comprises a viral genome comprising SEQ ID NO: 2168 and a capsid encoded by a nucleic acid sequence comprising SEQ ID NO: 137. In some embodiments, the AAV particle comprises a viral genome comprising SEQ ID NO: 2168 and a capsid comprising SEQ ID NO: 5. In some embodiments, the AAV particle comprises a viral genome comprising SEQ ID NO: 2168 and a capsid encoded by a nucleic acid sequence comprising SEQ ID NO: 6. In some embodiments, the AAV particle comprises a viral genome comprising SEQ ID NO: 2168 and a capsid comprising SEQ ID NO: 4. In some embodiments, the AAV particle comprises a viral genome comprising SEQ ID NO: 2168 and a capsid comprising SEQ ID NO: 11. In some embodiments, the AAV particle comprises a viral genome comprising SEQ ID NO: 2168 and a capsid comprising SEQ ID NO: 2679. In some embodiments, the AAV particle comprises a viral genome comprising SEQ ID NO: 2168 and a capsid comprising SEQ ID NO: 2809. In some embodiments, the AAV particle comprises a viral genome comprising SEQ ID NO: 2168 and a capsid comprising SEQ ID NO: 2871.

[0867] In some embodiments, the AAV particle comprises a viral genome comprising SEQ ID NO: 2171 and a VOY101 capsid. In some embodiments, the AAV particle comprises a viral genome comprising SEQ ID NO: 2171 and a VOY201 capsid. In some embodiments, the AAV particle comprises a viral genome comprising SEQ ID NO: 2171 and an AAV9 capsid. In some embodiments, the AAV particle comprises a viral genome comprising SEQ ID NO: 2171 and an AAV9K449R capsid. In some embodiments, the AAV particle comprises a viral genome comprising SEQ ID NO: 2171 and an AAVPHP.B capsid. In some embodiments, the AAV particle comprises a viral genome comprising SEQ ID NO: 2171 and an AAVPHP.N capsid. In some embodiments, the AAV particle comprises a viral genome comprising SEQ ID NO: 2171 and an AAV2 variant capsid. In some embodiments, the AAV particle comprises a viral genome comprising SEQ ID NO: 2171 and an AAV2/3 variant capsid. In some embodiments, the AAV particle comprises a viral genome comprising SEQ ID NO: 2171 and a capsid comprising SEQ ID NO: 1. In some embodiments, the AAV particle comprises a viral genome comprising SEQ ID NO: 2171 and a capsid encoded by a nucleic acid sequence comprising SEQ ID NO: 2. In some embodiments, the AAV particle comprises a viral genome comprising SEQ ID NO: 2171 and a capsid comprising SEQ ID NO: 4534. In some embodiments, the AAV particle comprises a viral genome comprising SEQ ID NO: 2171 and a capsid encoded by a nucleic acid sequence comprising SEQ ID NO: 3. In some embodiments, the AAV particle comprises a viral genome comprising SEQ ID NO: 2171 and a capsid comprising SEQ ID NO: 138. In some embodiments, the AAV particle comprises a viral genome comprising SEQ ID NO: 2171 and a capsid encoded by a nucleic acid sequence comprising SEQ ID NO: 137. In some embodiments, the AAV particle comprises a viral genome comprising SEQ ID NO: 2171 and a capsid comprising SEQ ID NO: 5. In some embodiments, the AAV particle comprises a viral genome comprising SEQ ID NO: 2171 and a capsid encoded by a nucleic acid sequence comprising SEQ ID NO: 6. In some embodiments, the AAV particle comprises a viral genome comprising SEQ ID NO: 2171 and a capsid comprising SEQ ID NO: 4. In some embodiments, the AAV particle comprises a viral genome comprising SEQ ID NO: 2171 and a capsid comprising SEQ ID NO: 11. In some embodiments, the AAV particle comprises a viral genome comprising SEQ ID NO: 2171 and a capsid comprising SEQ ID NO: 2679. In some embodiments, the AAV particle comprises a viral genome comprising SEQ ID NO: 2171 and a capsid comprising SEQ ID NO: 2809. In some embodiments, the AAV particle comprises a viral genome comprising SEQ ID NO: 2171 and a capsid comprising SEQ ID NO: 2871.

[0868] In some embodiments, the AAV particle comprises a viral genome comprising SEQ ID NO: 2172 and a VOY101 capsid. In some embodiments, the AAV particle comprises a viral genome comprising SEQ ID NO: 2172 and a VOY201 capsid. In some embodiments, the AAV particle comprises a viral genome comprising SEQ ID NO: 2172 and an AAV9 capsid. In some embodiments, the AAV particle comprises a viral genome comprising SEQ ID NO: 2172 and an AAV9K449R capsid. In some embodiments, the AAV particle comprises a viral genome comprising SEQ ID NO: 2172 and an AAVPHP.B capsid. In some embodiments, the AAV particle comprises a viral genome comprising SEQ ID NO: 2172 and an AAVPHP.N capsid. In some embodiments, the AAV particle comprises a viral genome comprising SEQ ID NO: 2172 and an AAV2 variant capsid. In some embodiments, the AAV particle comprises a viral genome comprising SEQ ID NO: 2172 and an AAV2/3 variant capsid. In some embodiments, the AAV particle comprises a viral genome comprising SEQ ID NO: 2172 and a capsid comprising SEQ ID NO: 1. In some embodiments, the AAV particle comprises a viral genome comprising SEQ ID NO: 2172 and a capsid encoded by a nucleic acid sequence comprising SEQ ID NO: 2. In some embodiments, the AAV particle comprises a viral genome comprising SEQ ID NO: 2172 and a capsid comprising SEQ ID NO: 4534. In some embodiments, the AAV particle comprises a viral genome comprising SEQ ID NO: 2172 and a capsid encoded by a nucleic acid sequence comprising SEQ ID NO: 3. In some embodiments, the AAV particle comprises a viral genome comprising SEQ ID NO: 2172 and a capsid comprising SEQ ID NO: 138. In some embodiments, the AAV particle comprises a viral genome comprising SEQ ID NO: 2172 and a capsid encoded by a nucleic acid sequence comprising SEQ ID NO: 137. In some embodiments, the AAV particle comprises a viral genome comprising SEQ ID NO: 2172 and a capsid comprising SEQ ID NO: 5. In some embodiments, the AAV particle comprises a viral genome comprising SEQ ID NO: 2172 and a capsid encoded by a nucleic acid sequence comprising SEQ ID NO: 6. In some embodiments, the AAV particle comprises a viral genome comprising SEQ ID NO: 2172 and a capsid comprising SEQ ID NO: 4. In some embodiments, the AAV particle comprises a viral genome comprising SEQ ID NO: 2172 and a capsid comprising SEQ ID NO: 11. In some embodiments, the AAV particle comprises a viral genome comprising SEQ ID NO: 2172 and a capsid comprising SEQ ID NO: 2679. In some embodiments, the AAV particle comprises a viral genome comprising SEQ ID NO: 2172 and a capsid comprising SEQ ID NO: 2809. In some embodiments, the AAV particle comprises a viral genome comprising SEQ ID NO: 2172 and a capsid comprising SEQ ID NO: 2871.

[0869] In some embodiments, the AAV particle comprises a viral genome comprising SEQ ID NO: 2173 and a VOY101 capsid. In some embodiments, the AAV particle comprises a viral genome comprising SEQ ID NO: 2173 and a VOY201 capsid. In some embodiments, the AAV particle comprises a viral genome comprising SEQ ID NO: 2173 and an AAV9 capsid. In some embodiments, the AAV particle comprises a viral genome comprising SEQ ID NO: 2173 and an AAV9K449R capsid. In some embodiments, the AAV particle comprises a viral genome comprising SEQ ID NO: 2173 and an AAVPHP.B capsid. In some embodiments, the AAV particle comprises a viral genome comprising SEQ ID NO: 2173 and an AAVPHP.N capsid. In some embodiments, the AAV particle comprises a viral genome comprising SEQ ID NO: 2173 and an AAV2 variant capsid. In some embodiments, the AAV particle comprises a viral genome comprising SEQ ID NO: 2173 and an AAV2/3 variant capsid. In some embodiments, the AAV particle comprises a viral genome comprising SEQ ID NO: 2173 and a capsid comprising SEQ ID NO: 1. In some embodiments, the AAV particle comprises a viral genome comprising SEQ ID NO: 2173 and a capsid encoded by a nucleic acid sequence comprising SEQ ID NO: 2. In some embodiments, the AAV particle comprises a viral genome comprising SEQ ID NO: 2173 and a capsid comprising SEQ ID NO: 4534. In some embodiments, the AAV particle comprises a viral genome comprising SEQ ID NO: 2173 and a capsid encoded by a nucleic acid sequence comprising SEQ ID NO: 3. In some embodiments, the AAV particle comprises a viral genome comprising SEQ ID NO: 2173 and a capsid comprising SEQ ID NO: 138. In some embodiments, the AAV particle comprises a viral genome comprising SEQ ID NO: 2173 and a capsid encoded by a nucleic acid sequence comprising SEQ ID NO: 137. In some embodiments, the AAV particle comprises a viral genome comprising SEQ ID NO: 2173 and a capsid comprising SEQ ID NO: 5. In some embodiments, the AAV particle comprises a viral genome comprising SEQ ID NO: 2173 and a capsid encoded by a nucleic acid sequence comprising SEQ ID NO: 6. In some embodiments, the AAV particle comprises a viral genome comprising SEQ ID NO: 2173 and a capsid comprising SEQ ID NO: 4. In some embodiments, the AAV particle comprises a viral genome comprising SEQ ID NO: 2173 and a capsid comprising SEQ ID NO: 11. In some embodiments, the AAV particle comprises a viral genome comprising SEQ ID NO: 2173 and a capsid comprising SEQ ID NO: 2679. In some embodiments, the AAV particle comprises a viral genome comprising SEQ ID NO: 2173 and a capsid comprising SEQ ID NO: 2809. In some embodiments, the AAV particle comprises a viral genome comprising SEQ ID NO: 2173 and a capsid comprising SEQ ID NO: 2871.

[0870] In some embodiments, the AAV particle comprises a viral genome comprising SEQ ID NO: 2174 and a VOY101 capsid. In some embodiments, the AAV particle comprises a viral genome comprising SEQ ID NO: 2174 and a VOY201 capsid. In some embodiments, the AAV particle comprises a viral genome comprising SEQ ID NO: 2174 and an AAV9 capsid. In some embodiments, the AAV particle comprises a viral genome comprising SEQ ID NO: 2174 and an AAV9K449R capsid. In some embodiments, the AAV particle comprises a viral genome comprising SEQ ID NO: 2174 and an AAVPHP.B capsid. In some embodiments, the AAV particle comprises a viral genome comprising SEQ ID NO: 2174 and an AAVPHP.N capsid. In some embodiments, the AAV particle comprises a viral genome comprising SEQ ID NO: 2174 and an AAV2 variant capsid. In some embodiments, the AAV particle comprises a viral genome comprising SEQ ID NO: 2174 and an AAV2/3 variant capsid. In some embodiments, the AAV particle comprises a viral genome comprising SEQ ID NO: 2174 and a capsid comprising SEQ ID NO: 1. In some embodiments, the AAV particle comprises a viral genome comprising SEQ ID NO: 2174 and a capsid encoded by a nucleic acid sequence comprising SEQ ID NO: 2. In some embodiments, the AAV particle comprises a viral genome comprising SEQ ID NO: 2174 and a capsid comprising SEQ ID NO: 4534. In some embodiments, the AAV particle comprises a viral genome comprising SEQ ID NO: 2174 and a capsid encoded by a nucleic acid sequence comprising SEQ ID NO: 3. In some embodiments, the AAV particle comprises a viral genome comprising SEQ ID NO: 2174 and a capsid comprising SEQ ID NO: 138. In some embodiments, the AAV particle comprises a viral genome comprising SEQ ID NO: 2174 and a capsid encoded by a nucleic acid sequence comprising SEQ ID NO: 137. In some embodiments, the AAV particle comprises a viral genome comprising SEQ ID NO: 2174 and a capsid comprising SEQ ID NO: 5. In some embodiments, the AAV particle comprises a viral genome comprising SEQ ID NO: 2174 and a capsid encoded by a nucleic acid sequence comprising SEQ ID NO: 6. In some embodiments, the AAV particle comprises a viral genome comprising SEQ ID NO: 2174 and a capsid comprising SEQ ID NO: 4. In some embodiments, the AAV particle comprises a viral genome comprising SEQ ID NO: 2174 and a capsid comprising SEQ ID NO: 11. In some embodiments, the AAV particle comprises a viral genome comprising SEQ ID NO: 2174 and a capsid comprising SEQ ID NO: 2679. In some embodiments, the AAV particle comprises a viral genome comprising SEQ ID NO: 2174 and a capsid comprising SEQ ID NO: 2809. In some embodiments, the AAV particle comprises a viral genome comprising SEQ ID NO: 2174 and a capsid comprising SEQ ID NO: 2871.

[0871] In some embodiments, the AAV particle comprises a viral genome comprising SEQ ID NO: 2175 and a VOY101 capsid. In some embodiments, the AAV particle comprises a viral genome comprising SEQ ID NO: 2175 and a VOY201 capsid, in some embodiments, the AAV particle comprises a viral genome comprising SEQ ID NO: 2175 and an AAV9 capsid. In some embodiments, the AAV particle comprises a viral genome comprising SEQ ID NO: 2175 and an AAV9K449R capsid. In some embodiments, the AAV particle comprises a viral genome comprising SEQ ID NO: 2175 and an AAVPHP.B capsid. In some embodiments, the AAV particle comprises a viral genome comprising SEQ ID NO: 2175 and an AAVPHP.N capsid. In some embodiments, the AAV particle comprises a viral genome comprising SEQ ID NO: 2175 and an AAV2 variant capsid. In some embodiments, the AAV particle comprises a viral genome comprising SEQ ID NO: 2175 and an AAV2/3 variant capsid. In some embodiments, the AAV particle comprises a viral genome comprising SEQ ID NO: 2175 and a capsid comprising SEQ ID NO: 1. In some embodiments, the AAV particle comprises a viral genome comprising SEQ ID NO: 2175 and a capsid encoded by a nucleic acid sequence comprising SEQ ID NO: 2. In some embodiments, the AAV particle comprises a viral genome comprising SEQ ID NO: 2175 and a capsid comprising SEQ ID NO: 4534. In some embodiments, the AAV particle comprises a viral genome comprising SEQ ID NO: 2175 and a capsid encoded by a nucleic acid sequence comprising SEQ ID NO: 3. In some embodiments, the AAV particle comprises a viral genome comprising SEQ ID NO: 2175 and a capsid comprising SEQ ID NO: 138. In some embodiments, the AAV particle comprises a viral genome comprising SEQ ID NO: 2175 and a capsid encoded by a nucleic acid sequence comprising SEQ ID NO: 137. In some embodiments, the AAV particle comprises a viral genome comprising SEQ ID NO: 2175 and a capsid comprising SEQ ID NO: 5. In some embodiments, the AAV particle comprises a viral genome comprising SEQ ID NO: 2175 and a capsid encoded by a nucleic acid sequence comprising SEQ ID NO: 6. In some embodiments, the AAV particle comprises a viral genome comprising SEQ ID NO: 2175 and a capsid comprising SEQ ID NO: 4. In some embodiments, the AAV particle comprises a viral genome comprising SEQ ID NO: 2175 and a capsid comprising SEQ ID NO: 11. In some embodiments, the AAV particle comprises a viral genome comprising SEQ ID NO: 2175 and a capsid comprising SEQ ID NO: 2679. In some embodiments, the AAV particle comprises a viral genome comprising SEQ ID NO: 2175 and a capsid comprising SEQ ID NO: 2809. In some embodiments, the AAV particle comprises a viral genome comprising SEQ ID NO: 2175 and a capsid comprising SEQ ID NO: 2871.

[0872] In some embodiments, the AAV particle comprises a viral genome comprising SEQ ID NO: 2176 and a VOY101 capsid. In some embodiments, the AAV particle comprises a viral genome comprising SEQ ID NO: 2176 and a VOY201 capsid. In some embodiments, the AAV particle comprises a viral genome comprising SEQ ID NO: 2176 and an AAV9 capsid. In some embodiments, the AAV particle comprises a viral genome comprising SEQ ID NO: 2176 and an AAV9K449R capsid. In some embodiments, the AAV particle comprises a viral genome comprising SEQ ID NO: 2176 and an AAVPHP.B capsid. In some embodiments, the AAV particle comprises a viral genome comprising SEQ ID NO: 2176 and an AAVPHP.N capsid. In some embodiments, the AAV particle comprises a viral genome comprising SEQ ID NO: 2176 and an AAV2 variant capsid. In some embodiments, the AAV particle comprises a viral genome comprising SEQ ID NO: 2176 and an AAV2/3 variant capsid. In some embodiments, the AAV particle comprises a viral genome comprising SEQ ID NO: 2176 and a capsid comprising SEQ ID NO: 1. In some embodiments, the AAV particle comprises a viral genome comprising SEQ ID NO: 2176 and a capsid encoded by a nucleic acid sequence comprising SEQ ID NO: 2. In some embodiments, the AAV particle comprises a viral genome comprising SEQ ID NO: 2176 and a capsid comprising SEQ ID NO: 4534. In some embodiments, the AAV particle comprises a viral genome comprising SEQ ID NO: 2176 and a capsid encoded by a nucleic acid sequence comprising SEQ ID NO: 3. In some embodiments, the AAV particle comprises a viral genome comprising SEQ ID NO: 2176 and a capsid comprising SEQ ID NO: 138. In some embodiments, the AAV particle comprises a viral genome comprising SEQ ID NO: 2176 and a capsid encoded by a nucleic acid sequence comprising SEQ ID NO: 137. In some embodiments, the AAV particle comprises a viral genome comprising SEQ ID NO: 2176 and a capsid comprising SEQ ID NO: 5. In some embodiments, the AAV particle comprises a viral genome comprising SEQ ID NO: 2176 and a capsid encoded by a nucleic acid sequence comprising SEQ ID NO: 6. In some embodiments, the AAV particle comprises a viral genome comprising SEQ ID NO: 2176 and a capsid comprising SEQ ID NO: 4. In some embodiments, the AAV particle comprises a viral genome comprising SEQ ID NO: 2176 and a capsid comprising SEQ ID NO: 11. In some embodiments, the AAV particle comprises a viral genome comprising SEQ ID NO: 2176 and a capsid comprising SEQ ID NO: 2679. In some embodiments, the AAV particle comprises a viral genome comprising SEQ ID NO: 2176 and a capsid comprising SEQ ID NO: 2809. In some embodiments, the AAV particle comprises a viral genome comprising SEQ ID NO: 2176 and a capsid comprising SEQ ID NO: 2871.

[0873] In some embodiments, the AAV particle comprises a viral genome comprising SEQ ID NO: 2177 and a VOY101 capsid. In some embodiments, the AAV particle comprises a viral genome comprising SEQ ID NO: 2177 and a VOY201 capsid. In some embodiments, the AAV particle comprises a viral genome comprising SEQ ID NO: 2177 and an AAV9 capsid. In some embodiments, the AAV particle comprises a viral genome comprising SEQ ID NO: 2177 and an AAV9K449R capsid. In some embodiments, the AAV particle comprises a viral genome comprising SEQ ID NO: 2177 and an AAVPHP.B capsid. In some embodiments, the AAV particle comprises a viral genome comprising SEQ ID NO: 2177 and an AAVPHP.N capsid. In some embodiments, the AAV particle comprises a viral genome comprising SEQ ID NO: 2177 and an AAV2 variant capsid. In some embodiments, the AAV particle comprises a viral genome comprising SEQ ID NO: 2177 and an AAV2/3 variant capsid. In some embodiments, the AAV particle comprises a viral genome comprising SEQ ID NO: 2177 and a capsid comprising SEQ ID NO: 1. In some embodiments, the AAV particle comprises a viral genome comprising SEQ ID NO: 2177 and a capsid encoded by a nucleic acid sequence comprising SEQ ID NO: 2. In some embodiments, the AAV particle comprises a viral genome comprising SEQ ID NO: 2177 and a capsid comprising SEQ ID NO: 4534. In some embodiments, the AAV particle comprises a viral genome comprising SEQ ID NO: 2177 and a capsid encoded by a nucleic acid sequence comprising SEQ ID NO: 3. In some embodiments, the AAV particle comprises a viral genome comprising SEQ ID NO: 2177 and a capsid comprising SEQ ID NO: 138. In some embodiments, the AAV particle comprises a viral genome comprising SEQ ID NO: 2177 and a capsid encoded by a nucleic acid sequence comprising SEQ ID NO: 137. In some embodiments, the AAV particle comprises a viral genome comprising SEQ ID NO: 2177 and a capsid comprising SEQ ID NO: 5. In some embodiments, the AAV particle comprises a viral genome comprising SEQ ID NO: 2177 and a capsid encoded by a nucleic acid sequence comprising SEQ ID NO: 6. In some embodiments, the AAV particle comprises a viral genome comprising SEQ ID NO: 2177 and a capsid comprising SEQ ID NO: 4. In some embodiments, the AAV particle comprises a viral genome comprising SEQ ID NO: 2177 and a capsid comprising SEQ ID NO: 11. In some embodiments, the AAV particle comprises a viral genome comprising SEQ ID NO: 2177 and a capsid comprising SEQ ID NO: 2679. In some embodiments, the AAV particle comprises a viral genome comprising SEQ ID NO: 2177 and a capsid comprising SEQ ID NO: 2809. In some embodiments, the AAV particle comprises a viral genome comprising SEQ ID NO: 2177 and a capsid comprising SEQ ID NO: 2871.

[0874] In some embodiments, the AAV particle comprises a viral genome comprising SEQ ID NO: 2178 and a VOY101 capsid. In some embodiments, the AAV particle comprises a viral genome comprising SEQ ID NO: 2178 and a VOY201 capsid. In some embodiments, the AAV particle comprises a viral genome comprising SEQ ID NO: 2178 and an AAV9 capsid. In some embodiments, the AAV particle comprises a viral genome comprising SEQ ID NO: 2178 and an AAV9K449R capsid. In some embodiments, the AAV particle comprises a viral genome comprising SEQ ID NO: 2178 and an AAVPHP.B capsid. In some embodiments, the AAV particle comprises a viral genome comprising SEQ ID NO: 2178 and an AAVPHP.N capsid. In some embodiments, the AAV particle comprises a viral genome comprising SEQ ID NO: 2178 and an AAV2 variant capsid. In some embodiments, the AAV particle comprises a viral genome comprising SEQ ID NO: 2178 and an AAV2/3 variant capsid. In some embodiments, the AAV particle comprises a viral genome comprising SEQ ID NO: 2178 and a capsid comprising SEQ ID NO: 1. In some embodiments, the AAV particle comprises a viral genome comprising SEQ ID NO: 2178 and a capsid encoded by a nucleic acid sequence comprising SEQ ID NO: 2. In some embodiments, the AAV particle comprises a viral genome comprising SEQ ID NO: 2178 and a capsid comprising SEQ ID NO: 4534. In some embodiments, the AAV particle comprises a viral genome comprising SEQ ID NO: 2178 and a capsid encoded by a nucleic acid sequence comprising SEQ ID NO: 3. In some embodiments, the AAV particle comprises a viral genome comprising SEQ ID NO: 2178 and a capsid comprising SEQ ID NO: 138. In some embodiments, the AAV particle comprises a viral genome comprising SEQ ID NO: 2178 and a capsid encoded by a nucleic acid sequence comprising SEQ ID NO: 137. In some embodiments, the AAV particle comprises a viral genome comprising SEQ ID NO: 2178 and a capsid comprising SEQ ID NO: 5. In some embodiments, the AAV particle comprises a viral genome comprising SEQ ID NO: 2178 and a capsid encoded by a nucleic acid sequence comprising SEQ ID NO: 6. In some embodiments, the AAV particle comprises a viral genome comprising SEQ ID NO: 2178 and a capsid comprising SEQ ID NO: 4. In some embodiments, the AAV particle comprises a viral genome comprising SEQ ID NO: 2178 and a capsid comprising SEQ ID NO: 11. In some embodiments, the AAV particle comprises a viral genome comprising SEQ ID NO: 2178 and a capsid comprising SEQ ID NO: 2679. In some embodiments, the AAV particle comprises a viral genome comprising SEQ ID NO: 2178 and a capsid comprising SEQ ID NO: 2809. In some embodiments, the AAV particle comprises a viral genome comprising SEQ ID NO: 2178 and a capsid comprising SEQ ID NO: 2871.

[0875] In some embodiments, the AAV particle comprises a viral genome comprising SEQ ID NO: 2179 and a VOY101 capsid. In some embodiments, the AAV particle comprises a viral genome comprising SEQ ID NO: 2179 and a VOY201 capsid. In some embodiments, the AAV particle comprises a viral genome comprising SEQ ID NO: 2179 and an AAV9 capsid. In some embodiments, the AAV particle comprises a viral genome comprising SEQ ID NO: 2179 and an AAV9K449R capsid. In some embodiments, the AAV particle comprises a viral genome comprising SEQ ID NO: 2179 and an AAVPHP.B capsid. In some embodiments, the AAV particle comprises a viral genome comprising SEQ ID NO: 2179 and an AAVPHP.N capsid. In some embodiments, the AAV particle comprises a viral genome comprising SEQ ID NO: 2179 and an AAV2 variant capsid. In some embodiments, the AAV particle comprises a viral genome comprising SEQ ID NO: 2179 and an AAV2/3 variant capsid. In some embodiments, the AAV particle comprises a viral genome comprising SEQ ID NO: 2179 and a capsid comprising SEQ ID NO: 1. In some embodiments, the AAV particle comprises a viral genome comprising SEQ ID NO: 2179 and a capsid encoded by a nucleic acid sequence comprising SEQ ID NO: 2. In some embodiments, the AAV particle comprises a viral genome comprising SEQ ID NO: 2179 and a capsid comprising SEQ ID NO: 4534. In some embodiments, the AAV particle comprises a viral genome comprising SEQ ID NO: 2179 and a capsid encoded by a nucleic acid sequence comprising SEQ ID NO: 3. In some embodiments, the AAV particle comprises a viral genome comprising SEQ ID NO: 2179 and a capsid comprising SEQ ID NO: 138. In some embodiments, the AAV particle comprises a viral genome comprising SEQ ID NO: 2179 and a capsid encoded by a nucleic acid sequence comprising SEQ ID NO: 137. In some embodiments, the AAV particle comprises a viral genome comprising SEQ ID NO: 2179 and a capsid comprising SEQ ID NO: 5. In some embodiments, the AAV particle comprises a viral genome comprising SEQ ID NO: 2179 and a capsid encoded by a nucleic acid sequence comprising SEQ ID NO: 6. In some embodiments, the AAV particle comprises a viral genome comprising SEQ ID NO: 2179 and a capsid comprising SEQ ID NO: 4. In some embodiments, the AAV particle comprises a viral genome comprising SEQ ID NO: 2179 and a capsid comprising SEQ ID NO: 11. In some embodiments, the AAV particle comprises a viral genome comprising SEQ ID NO: 2179 and a capsid comprising SEQ ID NO: 2679. In some embodiments, the AAV particle comprises a viral genome comprising SEQ ID NO: 2179 and a capsid comprising SEQ ID NO: 2809. In some embodiments, the AAV particle comprises a viral genome comprising SEQ ID NO: 2179 and a capsid comprising SEQ ID NO: 2871.

[0876] In some embodiments, the AAV particle comprises a viral genome comprising SEQ ID NO: 2180 and a VOY101 capsid. In some embodiments, the AAV particle comprises a viral genome comprising SEQ ID NO: 2180 and a VOY201 capsid. In some embodiments, the AAV particle comprises a viral genome comprising SEQ ID NO: 2180 and an AAV9 capsid. In some embodiments, the AAV particle comprises a viral genome comprising SEQ ID NO: 2180 and an AAV9K449R capsid. In some embodiments, the AAV particle comprises a viral genome comprising SEQ ID NO: 2180 and an AAVPHP.B capsid. In some embodiments, the AAV particle comprises a viral genome comprising SEQ ID NO: 2180 and an AAVPHP.N capsid. In some embodiments, the AAV particle comprises a viral genome comprising SEQ ID NO: 2180 and an AAV2 variant capsid. In some embodiments, the AAV particle comprises a viral genome comprising SEQ ID NO: 2180 and an AAV2/3 variant capsid. In some embodiments, the AAV particle comprises a viral genome comprising SEQ ID NO: 2180 and a capsid comprising SEQ ID NO: 1. In some embodiments, the AAV particle comprises a viral genome comprising SEQ ID NO: 2180 and a capsid encoded by a nucleic acid sequence comprising SEQ ID NO: 2. In some embodiments, the AAV particle comprises a viral genome comprising SEQ ID NO: 2180 and a capsid comprising SEQ ID NO: 4534. In some embodiments, the AAV particle comprises a viral genome comprising SEQ ID NO: 2180 and a capsid encoded by a nucleic acid sequence comprising SEQ ID NO: 3. In some embodiments, the AAV particle comprises a viral genome comprising SEQ ID NO: 2180 and a capsid comprising SEQ ID NO: 138. In some embodiments, the AAV particle comprises a viral genome comprising SEQ ID NO: 2180 and a capsid encoded by a nucleic acid sequence comprising SEQ ID NO: 137. In some embodiments, the AAV particle comprises a viral genome comprising SEQ ID NO: 2180 and a capsid comprising SEQ ID NO: 5. In some embodiments, the AAV particle comprises a viral genome comprising SEQ ID NO: 2180 and a capsid encoded by a nucleic acid sequence comprising SEQ ID NO: 6. In some embodiments, the AAV particle comprises a viral genome comprising SEQ ID NO: 2180 and a capsid comprising SEQ ID NO: 4. In some embodiments, the AAV particle comprises a viral genome comprising SEQ ID NO: 2180 and a capsid comprising SEQ ID NO: 11. In some embodiments, the AAV particle comprises a viral genome comprising SEQ ID NO: 2180 and a capsid comprising SEQ ID NO: 2679. In some embodiments, the AAV particle comprises a viral genome comprising SEQ ID NO: 2180 and a capsid comprising SEQ ID NO: 2809. In some embodiments, the AAV particle comprises a viral genome comprising SEQ ID NO: 2180 and a capsid comprising SEQ ID NO: 2871.

[0877] In some embodiments, the AAV particle comprises a viral genome comprising SEQ ID NO: 2181 and a VOY101 capsid. In some embodiments, the AAV particle comprises a viral genome comprising SEQ ID NO: 2181 and a VOY201 capsid. In some embodiments, the AAV particle comprises a viral genome comprising SEQ ID NO: 2181 and an AAV9 capsid. In some embodiments, the AAV particle comprises a viral genome comprising SEQ ID NO: 2181 and an AAV9K449R capsid. In some embodiments, the AAV particle comprises a viral genome comprising SEQ ID NO: 2181 and an AAVPHP.B capsid. In some embodiments, the AAV particle comprises a viral genome comprising SEQ ID NO: 2181 and an AAVPHP.N capsid. In some embodiments, the AAV particle comprises a viral genome comprising SEQ ID NO: 2181 and an AAV2 variant capsid. In some embodiments, the AAV particle comprises a viral genome comprising SEQ ID NO: 2181 and an AAV2/3 variant capsid. In some embodiments, the AAV particle comprises a viral genome comprising SEQ ID NO: 2181 and a capsid comprising SEQ ID NO: 1. In some embodiments, the AAV particle comprises a viral genome comprising SEQ ID NO: 2181 and a capsid encoded by a nucleic acid sequence comprising SEQ ID NO: 2. In some embodiments, the AAV particle comprises a viral genome comprising SEQ ID NO: 2181 and a capsid comprising SEQ ID NO: 4534. In some embodiments, the AAV particle comprises a viral genome comprising SEQ ID NO: 2181 and a capsid encoded by a nucleic acid sequence comprising SEQ ID NO: 3. In some embodiments, the AAV particle comprises a viral genome comprising SEQ ID NO: 2181 and a capsid comprising SEQ ID NO: 138. In some embodiments, the AAV particle comprises a viral genome comprising SEQ ID NO: 2181 and a capsid encoded by a nucleic acid sequence comprising SEQ ID NO: 137. In some embodiments, the AAV particle comprises a viral genome comprising SEQ ID NO: 2181 and a capsid comprising SEQ ID NO: 5. In some embodiments, the AAV particle comprises a viral genome comprising SEQ ID NO: 2181 and a capsid encoded by a nucleic acid sequence comprising SEQ ID NO: 6. In some embodiments, the AAV particle comprises a viral genome comprising SEQ ID NO: 2181 and a capsid comprising SEQ ID NO: 4. In some embodiments, the AAV particle comprises a viral genome comprising SEQ ID NO: 2181 and a capsid comprising SEQ ID NO: 11. In some embodiments, the AAV particle comprises a viral genome comprising SEQ ID NO: 2181 and a capsid comprising SEQ ID NO: 2679. In some embodiments, the AAV particle comprises a viral genome comprising SEQ ID NO: 2181 and a capsid comprising SEQ ID NO: 2809. In some embodiments, the AAV particle comprises a viral genome comprising SEQ ID NO: 2181 and a capsid comprising SEQ ID NO: 2871.

[0878] In some embodiments, the AAV particle comprises a viral genome comprising SEQ ID NO: 2182 and a VOY101 capsid. In some embodiments, the AAV particle comprises a viral genome comprising SEQ ID NO: 2182 and a VOY201 capsid. In some embodiments, the AAV particle comprises a viral genome comprising SEQ ID NO: 2182 and an AAV9 capsid. In some embodiments, the AAV particle comprises a viral genome comprising SEQ ID NO: 2182 and an AAV9K449R capsid. In some embodiments, the AAV particle comprises a viral genome comprising SEQ ID NO: 2182 and an AAVPHP.B capsid. In some embodiments, the AAV particle comprises a viral genome comprising SEQ ID NO: 2182 and an AAVPHP.N capsid. In some embodiments, the AAV particle comprises a viral genome comprising SEQ ID NO: 2182 and an AAV2 variant capsid. In some embodiments, the AAV particle comprises a viral genome comprising SEQ ID NO: 2182 and an AAV2/3 variant capsid. In some embodiments, the AAV particle comprises a viral genome comprising SEQ ID NO: 2182 and a capsid comprising SEQ ID NO: 1. In some embodiments, the AAV particle comprises a viral genome comprising SEQ ID NO: 2182 and a capsid encoded by a nucleic acid sequence comprising SEQ ID NO: 2. In some embodiments, the AAV particle comprises a viral genome comprising SEQ ID NO: 2182 and a capsid comprising SEQ ID NO: 4534. In some embodiments, the AAV particle comprises a viral genome comprising SEQ ID NO: 2182 and a capsid encoded by a nucleic acid sequence comprising SEQ ID NO: 3. In some embodiments, the AAV particle comprises a viral genome comprising SEQ ID NO: 2182 and a capsid comprising SEQ ID NO: 138. In some embodiments, the AAV particle comprises a viral genome comprising SEQ ID NO: 2182 and a capsid encoded by a nucleic acid sequence comprising SEQ ID NO: 137. In some embodiments, the AAV particle comprises a viral genome comprising SEQ ID NO: 2182 and a capsid comprising SEQ ID NO: 5. In some embodiments, the AAV particle comprises a viral genome comprising SEQ ID NO: 2182 and a capsid encoded by a nucleic acid sequence comprising SEQ ID NO: 6. In some embodiments, the AAV particle comprises a viral genome comprising SEQ ID NO: 2182 and a capsid comprising SEQ ID NO: 4. In some embodiments, the AAV particle comprises a viral genome comprising SEQ ID NO: 2182 and a capsid comprising SEQ ID NO: 11. In some embodiments, the AAV particle comprises a viral genome comprising SEQ ID NO: 2182 and a capsid comprising SEQ ID NO: 2679. In some embodiments, the AAV particle comprises a viral genome comprising SEQ ID NO: 2182 and a capsid comprising SEQ ID NO: 2809. In some embodiments, the AAV particle comprises a viral genome comprising SEQ ID NO: 2182 and a capsid comprising SEQ ID NO: 2871.

[0879] In some embodiments, the AAV particle comprises a viral genome comprising SEQ ID NO: 2183 and a VOY101 capsid. In some embodiments, the AAV particle comprises a viral genome comprising SEQ ID NO: 2183 and a VOY201 capsid. In some embodiments, the AAV particle comprises a viral genome comprising SEQ ID NO: 2183 and an AAV9 capsid. In some embodiments, the AAV particle comprises a viral genome comprising SEQ ID NO: 2183 and an AAV9K449R capsid. In some embodiments, the AAV particle comprises a viral genome comprising SEQ ID NO: 2183 and an AAVPHP.B capsid. In some embodiments, the AAV particle comprises a viral genome comprising SEQ ID NO: 2183 and an AAVPHP.N capsid. In some embodiments, the AAV particle comprises a viral genome comprising SEQ ID NO: 2183 and an AAV2 variant capsid. In some embodiments, the AAV particle comprises a viral genome comprising SEQ ID NO: 2183 and an AAV2/3 variant capsid. In some embodiments, the AAV particle comprises a viral genome comprising SEQ ID NO: 2183 and a capsid comprising SEQ ID NO: 1. In some embodiments, the AAV particle comprises a viral genome comprising SEQ ID NO: 2183 and a capsid encoded by a nucleic acid sequence comprising SEQ ID NO: 2. In some embodiments, the AAV particle comprises a viral genome comprising SEQ ID NO: 2183 and a capsid comprising SEQ ID NO: 4534. In some embodiments, the AAV particle comprises a viral genome comprising SEQ ID NO: 2183 and a capsid encoded by a nucleic acid sequence comprising SEQ ID NO: 3. In some embodiments, the AAV particle comprises a viral genome comprising SEQ ID NO: 2183 and a capsid comprising SEQ ID NO: 138. In some embodiments, the AAV particle comprises a viral genome comprising SEQ ID NO: 2183 and a capsid encoded by a nucleic acid sequence comprising SEQ ID NO: 137. In some embodiments, the AAV particle comprises a viral genome comprising SEQ ID NO: 2183 and a capsid comprising SEQ ID NO: 5. In some embodiments, the AAV particle comprises a viral genome comprising SEQ ID NO: 2183 and a capsid encoded by a nucleic acid sequence comprising SEQ ID NO: 6. In some embodiments, the AAV particle comprises a viral genome comprising SEQ ID NO: 2183 and a capsid comprising SEQ ID NO: 4. In some embodiments, the AAV particle comprises a viral genome comprising SEQ ID NO: 2183 and a capsid comprising SEQ ID NO: 11. In some embodiments, the AAV particle comprises a viral genome comprising SEQ ID NO: 2183 and a capsid comprising SEQ ID NO: 2679. In some embodiments, the AAV particle comprises a viral genome comprising SEQ ID NO: 2183 and a capsid comprising SEQ ID NO: 2809. In some embodiments, the AAV particle comprises a viral genome comprising SEQ ID NO: 2183 and a capsid comprising SEQ ID NO: 2871.

[0880] In some embodiments, the AAV particle comprises a viral genome comprising SEQ ID NO: 2184 and a VOY101 capsid. In some embodiments, the AAV particle comprises a viral genome comprising SEQ ID NO: 2184 and a VOY201 capsid. In some embodiments, the AAV particle comprises a viral genome comprising SEQ ID NO: 2184 and an AAV9 capsid. In some embodiments, the AAV particle comprises a viral genome comprising SEQ ID NO: 2184 and an AAV9K449R capsid. In some embodiments, the AAV particle comprises a viral genome comprising SEQ ID NO: 2184 and an AAVPHP.B capsid. In some embodiments, the AAV particle comprises a viral genome comprising SEQ ID NO: 2184 and an AAVPHP.N capsid. In some embodiments, the AAV particle comprises a viral genome comprising SEQ ID NO: 2184 and an AAV2 variant capsid. In some embodiments, the AAV particle comprises a viral genome comprising SEQ ID NO: 2184 and an AAV2/3 variant capsid. In some embodiments, the AAV particle comprises a viral genome comprising SEQ ID NO: 2184 and a capsid comprising SEQ ID NO: 1. In some embodiments, the AAV particle comprises a viral genome comprising SEQ ID NO: 2184 and a capsid encoded by a nucleic acid sequence comprising SEQ ID NO: 2. In some embodiments, the AAV particle comprises a viral genome comprising SEQ ID NO: 2184 and a capsid comprising SEQ ID NO: 4534. In some embodiments, the AAV particle comprises a viral genome comprising SEQ ID NO: 2184 and a capsid encoded by a nucleic acid sequence comprising SEQ ID NO: 3. In some embodiments, the AAV particle comprises a viral genome comprising SEQ ID NO: 2184 and a capsid comprising SEQ ID NO: 138. In some embodiments, the AAV particle comprises a viral genome comprising SEQ ID NO: 2184 and a capsid encoded by a nucleic acid sequence comprising SEQ ID NO: 137. In some embodiments, the AAV particle comprises a viral genome comprising SEQ ID NO: 2184 and a capsid comprising SEQ ID NO: 5. In some embodiments, the AAV particle comprises a viral genome comprising SEQ ID NO: 2184 and a capsid encoded by a nucleic acid sequence comprising SEQ ID NO: 6. In some embodiments, the AAV particle comprises a viral genome comprising SEQ ID NO: 2184 and a capsid comprising SEQ ID NO: 4. In some embodiments, the AAV particle comprises a viral genome comprising SEQ ID NO: 2184 and a capsid comprising SEQ ID NO: 11. In some embodiments, the AAV particle comprises a viral genome comprising SEQ ID NO: 2184 and a capsid comprising SEQ ID NO: 2679. In some embodiments, the AAV particle comprises a viral genome comprising SEQ ID NO: 2184 and a capsid comprising SEQ ID NO: 2809. In some embodiments, the AAV particle comprises a viral genome comprising SEQ ID NO: 2184 and a capsid comprising SEQ ID NO: 2871.

[0881] In some embodiments, the AAV particle comprises a viral genome comprising SEQ ID NO: 2185 and a VOY101 capsid. In some embodiments, the AAV particle comprises a viral genome comprising SEQ ID NO: 2185 and a VOY201 capsid. In some embodiments, the AAV particle comprises a viral genome comprising SEQ ID NO: 2185 and an AAV9 capsid. In some embodiments, the AAV particle comprises a viral genome comprising SEQ ID NO: 2185 and an AAV9K449R capsid. In some embodiments, the AAV particle comprises a viral genome comprising SEQ ID NO: 2185 and an AAVPHP.B capsid. In some embodiments, the AAV particle comprises a viral genome comprising SEQ ID NO: 2185 and an AAVPHP.N capsid. In some embodiments, the AAV particle comprises a viral genome comprising SEQ ID NO: 2185 and an AAV2 variant capsid. In some embodiments, the AAV particle comprises a viral genome comprising SEQ ID NO: 2185 and an AAV2/3 variant capsid. In some embodiments, the AAV particle comprises a viral genome comprising SEQ ID NO: 2185 and a capsid comprising SEQ ID NO: 1. In some embodiments, the AAV particle comprises a viral genome comprising SEQ ID NO: 2185 and a capsid encoded by a nucleic acid sequence comprising SEQ ID NO: 2. In some embodiments, the AAV particle comprises a viral genome comprising SEQ ID NO: 2185 and a capsid comprising SEQ ID NO: 4534. In some embodiments, the AAV particle comprises a viral genome comprising SEQ ID NO: 2185 and a capsid encoded by a nucleic acid sequence comprising SEQ ID NO: 3. In some embodiments, the AAV particle comprises a viral genome comprising SEQ ID NO: 2185 and a capsid comprising SEQ ID NO: 138. In some embodiments, the AAV particle comprises a viral genome comprising SEQ ID NO: 2185 and a capsid encoded by a nucleic acid sequence comprising SEQ ID NO: 137. In some embodiments, the AAV particle comprises a viral genome comprising SEQ ID NO: 2185 and a capsid comprising SEQ ID NO: 5. In some embodiments, the AAV particle comprises a viral genome comprising SEQ ID NO: 2185 and a capsid encoded by a nucleic acid sequence comprising SEQ ID NO: 6. In some embodiments, the AAV particle comprises a viral genome comprising SEQ ID NO: 2185 and a capsid comprising SEQ ID NO: 4. In some embodiments, the AAV particle comprises a viral genome comprising SEQ ID NO: 2185 and a capsid comprising SEQ ID NO: 11. In some embodiments, the AAV particle comprises a viral genome comprising SEQ ID NO: 2185 and a capsid comprising SEQ ID NO: 2679. In some embodiments, the AAV particle comprises a viral genome comprising SEQ ID NO: 2185 and a capsid comprising SEQ ID NO: 2809. In some embodiments, the AAV particle comprises a viral genome comprising SEQ ID NO: 2185 and a capsid comprising SEQ ID NO: 2871.

[0882] In some embodiments, the AAV particle comprises a viral genome comprising SEQ ID NO: 2186 and a VOY101 capsid. In some embodiments, the AAV particle comprises a viral genome comprising SEQ ID NO: 2186 and a VOY201 capsid. In some embodiments, the AAV particle comprises a viral genome comprising SEQ ID NO: 2186 and an AAV9 capsid. In some embodiments, the AAV particle comprises a viral genome comprising SEQ ID NO: 2186 and an AAV9K449R capsid. In some embodiments, the AAV particle comprises a viral genome comprising SEQ ID NO: 2186 and an AAVPHP.B capsid. In some embodiments, the AAV particle comprises a viral genome comprising SEQ ID NO: 2186 and an AAVPHP.N capsid. In some embodiments, the AAV particle comprises a viral genome comprising SEQ ID NO: 2186 and an AAV2 variant capsid. In some embodiments, the AAV particle comprises a viral genome comprising SEQ ID NO: 2186 and an AAV2/3 variant capsid. In some embodiments, the AAV particle comprises a viral genome comprising SEQ ID NO: 2186 and a capsid comprising SEQ ID NO: 1. In some embodiments, the AAV particle comprises a viral genome comprising SEQ ID NO: 2186 and a capsid encoded by a nucleic acid sequence comprising SEQ ID NO: 2. In some embodiments, the AAV particle comprises a viral genome comprising SEQ ID NO: 2186 and a capsid comprising SEQ ID NO: 4534. In some embodiments, the AAV particle comprises a viral genome comprising SEQ ID NO: 2186 and a capsid encoded by a nucleic acid sequence comprising SEQ ID NO: 3. In some embodiments, the AAV particle comprises a viral genome comprising SEQ ID NO: 2186 and a capsid comprising SEQ ID NO: 138. In some embodiments, the AAV particle comprises a viral genome comprising SEQ ID NO: 2186 and a capsid encoded by a nucleic acid sequence comprising SEQ ID NO: 137. In some embodiments, the AAV particle comprises a viral genome comprising SEQ ID NO: 2186 and a capsid comprising SEQ ID NO: 5. In some embodiments, the AAV particle comprises a viral genome comprising SEQ ID NO: 2186 and a capsid encoded by a nucleic acid sequence comprising SEQ ID NO: 6. In some embodiments, the AAV particle comprises a viral genome comprising SEQ ID NO: 2186 and a capsid comprising SEQ ID NO: 4. In some embodiments, the AAV particle comprises a viral genome comprising SEQ ID NO: 2186 and a capsid comprising SEQ ID NO: 11. In some embodiments, the AAV particle comprises a viral genome comprising SEQ ID NO: 2186 and a capsid comprising SEQ ID NO: 2679. In some embodiments, the AAV particle comprises a viral genome comprising SEQ ID NO: 2186 and a capsid comprising SEQ ID NO: 2809. In some embodiments, the AAV particle comprises a viral genome comprising SEQ ID NO: 2186 and a capsid comprising SEQ ID NO: 2871.

[0883] In some embodiments, the AAV particle comprises a viral genome comprising SEQ ID NO: 2187 and a VOY101 capsid. In some embodiments, the AAV particle comprises a viral genome comprising SEQ ID NO: 2187 and a VOY201 capsid. In some embodiments, the AAV particle comprises a viral genome comprising SEQ ID NO: 2187 and an AAV9 capsid. In some embodiments, the AAV particle comprises a viral genome comprising SEQ ID NO: 2187 and an AAV9K449R capsid. In some embodiments, the AAV particle comprises a viral genome comprising SEQ ID NO: 2187 and an AAVPHP.B capsid. In some embodiments, the AAV particle comprises a viral genome comprising SEQ ID NO: 2187 and an AAVPHP.N capsid. In some embodiments, the AAV particle comprises a viral genome comprising SEQ ID NO: 2187 and an AAV2 variant capsid. In some embodiments, the AAV particle comprises a viral genome comprising SEQ ID NO: 2187 and an AAV2/3 variant capsid. In some embodiments, the AAV particle comprises a viral genome comprising SEQ ID NO: 2187 and a capsid comprising SEQ ID NO: 1. In some embodiments, the AAV particle comprises a viral genome comprising SEQ ID NO: 2187 and a capsid encoded by a nucleic acid sequence comprising SEQ ID NO: 2. In some embodiments, the AAV particle comprises a viral genome comprising SEQ ID NO: 2187 and a capsid comprising SEQ ID NO: 4534. In some embodiments, the AAV particle comprises a viral genome comprising SEQ ID NO: 2187 and a capsid encoded by a nucleic acid sequence comprising SEQ ID NO: 3. In some embodiments, the AAV particle comprises a viral genome comprising SEQ ID NO: 2187 and a capsid comprising SEQ ID NO: 138. In some embodiments, the AAV particle comprises a viral genome comprising SEQ ID NO: 2187 and a capsid encoded by a nucleic acid sequence comprising SEQ ID NO: 137. In some embodiments, the AAV particle comprises a viral genome comprising SEQ ID NO: 2187 and a capsid comprising SEQ ID NO: 5. In some embodiments, the AAV particle comprises a viral genome comprising SEQ ID NO: 2187 and a capsid encoded by a nucleic acid sequence comprising SEQ ID NO: 6. In some embodiments, the AAV particle comprises a viral genome comprising SEQ ID NO: 2187 and a capsid comprising SEQ ID NO: 4. In some embodiments, the AAV particle comprises a viral genome comprising SEQ ID NO: 2187 and a capsid comprising SEQ ID NO: 11. In some embodiments, the AAV particle comprises a viral genome comprising SEQ ID NO: 2187 and a capsid comprising SEQ ID NO: 2679. In some embodiments, the AAV particle comprises a viral genome comprising SEQ ID NO: 2187 and a capsid comprising SEQ ID NO: 2809. In some embodiments, the AAV particle comprises a viral genome comprising SEQ ID NO: 2187 and a capsid comprising SEQ ID NO: 2871.

[0884] In some embodiments, the AAV particle comprises a viral genome comprising SEQ ID NO: 2188 and a VOY101 capsid. In some embodiments, the AAV particle comprises a viral genome comprising SEQ ID NO: 2188 and a VOY201 capsid. In some embodiments, the AAV particle comprises a viral genome comprising SEQ ID NO: 2188 and an AAV9 capsid. In some embodiments, the AAV particle comprises a viral genome comprising SEQ ID NO: 2188 and an AAV9K449R capsid. In some embodiments, the AAV particle comprises a viral genome comprising SEQ ID NO: 2188 and an AAVPHP.B capsid. In some embodiments, the AAV particle comprises a viral genome comprising SEQ ID NO: 2188 and an AAVPHP.N capsid. In some embodiments, the AAV particle comprises a viral genome comprising SEQ ID NO: 2188 and an AAV2 variant capsid. In some embodiments, the AAV particle comprises a viral genome comprising SEQ ID NO: 2188 and an AAV2/3 variant capsid. In some embodiments, the AAV particle comprises a viral genome comprising SEQ ID NO: 2188 and a capsid comprising SEQ ID NO: 1. In some embodiments, the AAV particle comprises a viral genome comprising SEQ ID NO: 2188 and a capsid encoded by a nucleic acid sequence comprising SEQ ID NO: 2. In some embodiments, the AAV particle comprises a viral genome comprising SEQ ID NO: 2188 and a capsid comprising SEQ ID NO: 4534. In some embodiments, the AAV particle comprises a viral genome comprising SEQ ID NO: 2188 and a capsid encoded by a nucleic acid sequence comprising SEQ ID NO: 3. In some embodiments, the AAV particle comprises a viral genome comprising SEQ ID NO: 2188 and a capsid comprising SEQ ID NO: 138. In some embodiments, the AAV particle comprises a viral genome comprising SEQ ID NO: 2188 and a capsid encoded by a nucleic acid sequence comprising SEQ ID NO: 137. In some embodiments, the AAV particle comprises a viral genome comprising SEQ ID NO: 2188 and a capsid comprising SEQ ID NO: 5. In some embodiments, the AAV particle comprises a viral genome comprising SEQ ID NO: 2188 and a capsid encoded by a nucleic acid sequence comprising SEQ ID NO: 6. In some embodiments, the AAV particle comprises a viral genome comprising SEQ ID NO: 2188 and a capsid comprising SEQ ID NO: 4. In some embodiments, the AAV particle comprises a viral genome comprising SEQ ID NO: 2188 and a capsid comprising SEQ ID NO: 11. In some embodiments, the AAV particle comprises a viral genome comprising SEQ ID NO: 2188 and a capsid comprising SEQ ID NO: 2679. In some embodiments, the AAV particle comprises a viral genome comprising SEQ ID NO: 2188 and a capsid comprising SEQ ID NO: 2809. In some embodiments, the AAV particle comprises a viral genome comprising SEQ ID NO: 2188 and a capsid comprising SEQ ID NO: 2871.

[0885] In some embodiments, the AAV particle comprises a viral genome comprising SEQ ID NO: 2189 and a VOY101 capsid. In some embodiments, the AAV particle comprises a viral genome comprising SEQ ID NO: 2189 and a VOY201 capsid. In some embodiments, the AAV particle comprises a viral genome comprising SEQ ID NO: 2189 and an AAV9 capsid. In some embodiments, the AAV particle comprises a viral genome comprising SEQ ID NO: 2189 and an AAV9K449R capsid. In some embodiments, the AAV particle comprises a viral genome comprising SEQ ID NO: 2189 and an AAVPHP.B capsid. In some embodiments, the AAV particle comprises a viral genome comprising SEQ ID NO: 2189 and an AAVPHP.N capsid. In some embodiments, the AAV particle comprises a viral genome comprising SEQ ID NO: 2189 and an AAV2 variant capsid. In some embodiments, the AAV particle comprises a viral genome comprising SEQ ID NO: 2189 and an AAV2/3 variant capsid. In some embodiments, the AAV particle comprises a viral genome comprising SEQ ID NO: 2189 and a capsid comprising SEQ ID NO: 1. In some embodiments, the AAV particle comprises a viral genome comprising SEQ ID NO: 2189 and a capsid encoded by a nucleic acid sequence comprising SEQ ID NO: 2. In some embodiments, the AAV particle comprises a viral genome comprising SEQ ID NO: 2189 and a capsid comprising SEQ ID NO: 4534. In some embodiments, the AAV particle comprises a viral genome comprising SEQ ID NO: 2189 and a capsid encoded by a nucleic acid sequence comprising SEQ ID NO: 3. In some embodiments, the AAV particle comprises a viral genome comprising SEQ ID NO: 2189 and a capsid comprising SEQ ID NO: 138. In some embodiments, the AAV particle comprises a viral genome comprising SEQ ID NO: 2189 and a capsid encoded by a nucleic acid sequence comprising SEQ ID NO: 137. In some embodiments, the AAV particle comprises a viral genome comprising SEQ ID NO: 2189 and a capsid comprising SEQ ID NO: 5. In some embodiments, the AAV particle comprises a viral genome comprising SEQ ID NO: 2189 and a capsid encoded by a nucleic acid sequence comprising SEQ ID NO: 6. In some embodiments, the AAV particle comprises a viral genome comprising SEQ ID NO: 2189 and a capsid comprising SEQ ID NO: 4. In some embodiments, the AAV particle comprises a viral genome comprising SEQ ID NO: 2189 and a capsid comprising SEQ ID NO: 11. In some embodiments, the AAV particle comprises a viral genome comprising SEQ ID NO: 2189 and a capsid comprising SEQ ID NO: 2679. In some embodiments, the AAV particle comprises a viral genome comprising SEQ ID NO: 2189 and a capsid comprising SEQ ID NO: 2809. In some embodiments, the AAV particle comprises a viral genome comprising SEQ ID NO: 2189 and a capsid comprising SEQ ID NO: 2871.

[0886] In some embodiments, the AAV particle comprises a viral genome comprising SEQ ID NO: 2190 and a VOY101 capsid. In some embodiments, the AAV particle comprises a viral genome comprising SEQ ID NO: 2190 and a VOY201 capsid. In some embodiments, the AAV particle comprises a viral genome comprising SEQ ID NO: 2190 and an AAV9 capsid. In some embodiments, the AAV particle comprises a viral genome comprising SEQ ID NO: 2190 and an AAV9K449R capsid. In some embodiments, the AAV particle comprises a viral genome comprising SEQ ID NO: 2190 and an AAVPHP.B capsid. In some embodiments, the AAV particle comprises a viral genome comprising SEQ ID NO: 2190 and an AAVPHP.N capsid. In some embodiments, the AAV particle comprises a viral genome comprising SEQ ID NO: 2190 and an AAV2 variant capsid. In some embodiments, the AAV particle comprises a viral genome comprising SEQ ID NO: 2190 and an AAV2/3 variant capsid. In some embodiments, the AAV particle comprises a viral genome comprising SEQ ID NO: 2190 and a capsid comprising SEQ ID NO: 1. In some embodiments, the AAV particle comprises a viral genome comprising SEQ ID NO: 2190 and a capsid encoded by a nucleic acid sequence comprising SEQ ID NO: 2. In some embodiments, the AAV particle comprises a viral genome comprising SEQ ID NO: 2190 and a capsid comprising SEQ ID NO: 4534. In some embodiments, the AAV particle comprises a viral genome comprising SEQ ID NO: 2190 and a capsid encoded by a nucleic acid sequence comprising SEQ ID NO: 3. In some embodiments, the AAV particle comprises a viral genome comprising SEQ ID NO: 2190 and a capsid comprising SEQ ID NO: 138. In some embodiments, the AAV particle comprises a viral genome comprising SEQ ID NO: 2190 and a capsid encoded by a nucleic acid sequence comprising SEQ ID NO: 137. In some embodiments, the AAV particle comprises a viral genome comprising SEQ ID NO: 2190 and a capsid comprising SEQ ID NO: 5. In some embodiments, the AAV particle comprises a viral genome comprising SEQ ID NO: 2190 and a capsid encoded by a nucleic acid sequence comprising SEQ ID NO: 6. In some embodiments, the AAV particle comprises a viral genome comprising SEQ ID NO: 2190 and a capsid comprising SEQ ID NO: 4. In some embodiments, the AAV particle comprises a viral genome comprising SEQ ID NO: 2190 and a capsid comprising SEQ ID NO: 11. In some embodiments, the AAV particle comprises a viral genome comprising SEQ ID NO: 2190 and a capsid comprising SEQ ID NO: 2679. In some embodiments, the AAV particle comprises a viral genome comprising SEQ ID NO: 2190 and a capsid comprising SEQ ID NO: 2809. In some embodiments, the AAV particle comprises a viral genome comprising SEQ ID NO: 2190 and a capsid comprising SEQ ID NO: 2871.

[0887] In some embodiments, the AAV particle comprises a viral genome comprising SEQ ID NO: 2191 and a VOY101 capsid. In some embodiments, the AAV particle comprises a viral genome comprising SEQ ID NO: 2191 and a VOY201 capsid. In some embodiments, the AAV particle comprises a viral genome comprising SEQ ID NO: 2191 and an AAV9 capsid. In some embodiments, the AAV particle comprises a viral genome comprising SEQ ID NO: 2191 and an AAV9K449R capsid. In some embodiments, the AAV particle comprises a viral genome comprising SEQ ID NO: 2191 and an AAVPHP.B capsid. In some embodiments, the AAV particle comprises a viral genome comprising SEQ ID NO: 2191 and an AAVPHP.N capsid. In some embodiments, the AAV particle comprises a viral genome comprising SEQ ID NO: 2191 and an AAV2 variant capsid. In some embodiments, the AAV particle comprises a viral genome comprising SEQ ID NO: 2191 and an AAV2/3 variant capsid. In some embodiments, the AAV particle comprises a viral genome comprising SEQ ID NO: 2191 and a capsid comprising SEQ ID NO: 1. In some embodiments, the AAV particle comprises a viral genome comprising SEQ ID NO: 2191 and a capsid encoded by a nucleic acid sequence comprising SEQ ID NO: 2. In some embodiments, the AAV particle comprises a viral genome comprising SEQ ID NO: 2191 and a capsid comprising SEQ ID NO: 4534. In some embodiments, the AAV particle comprises a viral genome comprising SEQ ID NO: 2191 and a capsid encoded by a nucleic acid sequence comprising SEQ ID NO: 3. In some embodiments, the AAV particle comprises a viral genome comprising SEQ ID NO: 2191 and a capsid comprising SEQ ID NO: 138. In some embodiments, the AAV particle comprises a viral genome comprising SEQ ID NO: 2191 and a capsid encoded by a nucleic acid sequence comprising SEQ ID NO: 137. In some embodiments, the AAV particle comprises a viral genome comprising SEQ ID NO: 2191 and a capsid comprising SEQ ID NO: 5. In some embodiments, the AAV particle comprises a viral genome comprising SEQ ID NO: 2191 and a capsid encoded by a nucleic acid sequence comprising SEQ ID NO: 6. In some embodiments, the AAV particle comprises a viral genome comprising SEQ ID NO: 2191 and a capsid comprising SEQ ID NO: 4. In some embodiments, the AAV particle comprises a viral genome comprising SEQ ID NO: 2191 and a capsid comprising SEQ ID NO: 11. In some embodiments, the AAV particle comprises a viral genome comprising SEQ ID NO: 2191 and a capsid comprising SEQ ID NO: 2679. In some embodiments, the AAV particle comprises a viral genome comprising SEQ ID NO: 2191 and a capsid comprising SEQ ID NO: 2809. In some embodiments, the AAV particle comprises a viral genome comprising SEQ ID NO: 2191 and a capsid comprising SEQ ID NO: 2871.

[0888] In some embodiments, the AAV particle comprises a viral genome comprising SEQ ID NO: 2192 and a VOY101 capsid. In some embodiments, the AAV particle comprises a viral genome comprising SEQ ID NO: 2192 and a VOY201 capsid. In some embodiments, the AAV particle comprises a viral genome comprising SEQ ID NO: 2192 and an AAV9 capsid. In some embodiments, the AAV particle comprises a viral genome comprising SEQ ID NO: 2192 and an AAV9K449R capsid. In some embodiments, the AAV particle comprises a viral genome comprising SEQ ID NO: 2192 and an AAVPHP.B capsid. In some embodiments, the AAV particle comprises a viral genome comprising SEQ ID NO: 2192 and an AAVPHP.N capsid. In some embodiments, the AAV particle comprises a viral genome comprising SEQ ID NO: 2192 and an AAV2 variant capsid. In some embodiments, the AAV particle comprises a viral genome comprising SEQ ID NO: 2192 and an AAV2/3 variant capsid. In some embodiments, the AAV particle comprises a viral genome comprising SEQ ID NO: 2192 and a capsid comprising SEQ ID NO: 1. In some embodiments, the AAV particle comprises a viral genome comprising SEQ ID NO: 2192 and a capsid encoded by a nucleic acid sequence comprising SEQ ID NO: 2. In some embodiments, the AAV particle comprises a viral genome comprising SEQ ID NO: 2192 and a capsid comprising SEQ ID NO: 4534. In some embodiments, the AAV particle comprises a viral genome comprising SEQ ID NO: 2192 and a capsid encoded by a nucleic acid sequence comprising SEQ ID NO: 3. In some embodiments, the AAV particle comprises a viral genome comprising SEQ ID NO: 2192 and a capsid comprising SEQ ID NO: 138. In some embodiments, the AAV particle comprises a viral genome comprising SEQ ID NO: 2192 and a capsid encoded by a nucleic acid sequence comprising SEQ ID NO: 137. In some embodiments, the AAV particle comprises a viral genome comprising SEQ ID NO: 2192 and a capsid comprising SEQ ID NO: 5. In some embodiments, the AAV particle comprises a viral genome comprising SEQ ID NO: 2192 and a capsid encoded by a nucleic acid sequence comprising SEQ ID NO: 6. In some embodiments, the AAV particle comprises a viral genome comprising SEQ ID NO: 2192 and a capsid comprising SEQ ID NO: 4. In some embodiments, the AAV particle comprises a viral genome comprising SEQ ID NO: 2192 and a capsid comprising SEQ ID NO: 11. In some embodiments, the AAV particle comprises a viral genome comprising SEQ ID NO: 2192 and a capsid comprising SEQ ID NO: 2679. In some embodiments, the AAV particle comprises a viral genome comprising SEQ ID NO: 2192 and a capsid comprising SEQ ID NO: 2809. In some embodiments, the AAV particle comprises a viral genome comprising SEQ ID NO: 2192 and a capsid comprising SEQ ID NO: 2871.

[0889] In some embodiments, the AAV particle comprises a viral genome comprising SEQ ID NO: 2193 and a VOY101 capsid. In some embodiments, the AAV particle comprises a viral genome comprising SEQ ID NO: 2193 and a VOY201 capsid. In some embodiments, the AAV particle comprises a viral genome comprising SEQ ID NO: 2193 and an AAV9 capsid. In some embodiments, the AAV particle comprises a viral genome comprising SEQ ID NO: 2193 and an AAV9K449R capsid. In some embodiments, the AAV particle comprises a viral genome comprising SEQ ID NO: 2193 and an AAVPHP.B capsid. In some embodiments, the AAV particle comprises a viral genome comprising SEQ ID NO: 2193 and an AAVPHP.N capsid. In some embodiments, the AAV particle comprises a viral genome comprising SEQ ID NO: 2193 and an AAV2 variant capsid. In some embodiments, the AAV particle comprises a viral genome comprising SEQ ID NO: 2193 and an AAV2/3 variant capsid. In some embodiments, the AAV particle comprises a viral genome comprising SEQ ID NO: 2193 and a capsid comprising SEQ ID NO: 1. In some embodiments, the AAV particle comprises a viral genome comprising SEQ ID NO: 2193 and a capsid encoded by a nucleic acid sequence comprising SEQ ID NO: 2. In some embodiments, the AAV particle comprises a viral genome comprising SEQ ID NO: 2193 and a capsid comprising SEQ ID NO: 4534. In some embodiments, the AAV particle comprises a viral genome comprising SEQ ID NO: 2193 and a capsid encoded by a nucleic acid sequence comprising SEQ ID NO: 3. In some embodiments, the AAV particle comprises a viral genome comprising SEQ ID NO: 2193 and a capsid comprising SEQ ID NO: 138. In some embodiments, the AAV particle comprises a viral genome comprising SEQ ID NO: 2193 and a capsid encoded by a nucleic acid sequence comprising SEQ ID NO: 137. In some embodiments, the AAV particle comprises a viral genome comprising SEQ ID NO: 2193 and a capsid comprising SEQ ID NO: 5. In some embodiments, the AAV particle comprises a viral genome comprising SEQ ID NO: 2193 and a capsid encoded by a nucleic acid sequence comprising SEQ ID NO: 6. In some embodiments, the AAV particle comprises a viral genome comprising SEQ ID NO: 2193 and a capsid comprising SEQ ID NO: 4. In some embodiments, the AAV particle comprises a viral genome comprising SEQ ID NO: 2193 and a capsid comprising SEQ ID NO: 11. In some embodiments, the AAV particle comprises a viral genome comprising SEQ ID NO: 2193 and a capsid comprising SEQ ID NO: 2679. In some embodiments, the AAV particle comprises a viral genome comprising SEQ ID NO: 2193 and a capsid comprising SEQ ID NO: 2809. In some embodiments, the AAV particle comprises a viral genome comprising SEQ ID NO: 2193 and a capsid comprising SEQ ID NO: 2871.

[0890] In some embodiments, the AAV particle comprises a viral genome comprising SEQ ID NO: 2194 and a VOY101 capsid. In some embodiments, the AAV particle comprises a viral genome comprising SEQ ID NO: 2194 and a VOY201 capsid. In some embodiments, the AAV particle comprises a viral genome comprising SEQ ID NO: 2194 and an AAV9 capsid. In some embodiments, the AAV particle comprises a viral genome comprising SEQ ID NO: 2194 and an AAV9K449R capsid. In some embodiments, the AAV particle comprises a viral genome comprising SEQ ID NO: 2194 and an AAVPHP.B capsid. In some embodiments, the AAV particle comprises a viral genome comprising SEQ ID NO: 2194 and an AAVPHP.N capsid. In some embodiments, the AAV particle comprises a viral genome comprising SEQ ID NO: 2194 and an AAV2 variant capsid. In some embodiments, the AAV particle comprises a viral genome comprising SEQ ID NO: 2194 and an AAV2/3 variant capsid. In some embodiments, the AAV particle comprises a viral genome comprising SEQ ID NO: 2194 and a capsid comprising SEQ ID NO: 1. In some embodiments, the AAV particle comprises a viral genome comprising SEQ ID NO: 2194 and a capsid encoded by a nucleic acid sequence comprising SEQ ID NO: 2. In some embodiments, the AAV particle comprises a viral genome comprising SEQ ID NO: 2194 and a capsid comprising SEQ ID NO: 4534. In some embodiments, the AAV particle comprises a viral genome comprising SEQ ID NO: 2194 and a capsid encoded by a nucleic acid sequence comprising SEQ ID NO: 3. In some embodiments, the AAV particle comprises a viral genome comprising SEQ ID NO: 2194 and a capsid comprising SEQ ID NO: 138. In some embodiments, the AAV particle comprises a viral genome comprising SEQ ID NO: 2194 and a capsid encoded by a nucleic acid sequence comprising SEQ ID NO: 137. In some embodiments, the AAV particle comprises a viral genome comprising SEQ ID NO: 2194 and a capsid comprising SEQ ID NO: 5. In some embodiments, the AAV particle comprises a viral genome comprising SEQ ID NO: 2194 and a capsid encoded by a nucleic acid sequence comprising SEQ ID NO: 6. In some embodiments, the AAV particle comprises a viral genome comprising SEQ ID NO: 2194 and a capsid comprising SEQ ID NO: 4. In some embodiments, the AAV particle comprises a viral genome comprising SEQ ID NO: 2194 and a capsid comprising SEQ ID NO: 11. In some embodiments, the AAV particle comprises a viral genome comprising SEQ ID NO: 2194 and a capsid comprising SEQ ID NO: 2679. In some embodiments, the AAV particle comprises a viral genome comprising SEQ ID NO: 2194 and a capsid comprising SEQ ID NO: 2809. In some embodiments, the AAV particle comprises a viral genome comprising SEQ ID NO: 2194 and a capsid comprising SEQ ID NO: 2871.

[0891] In some embodiments, the AAV particle comprises a viral genome comprising SEQ ID NO: 2195 and a VOY101 capsid. In some embodiments, the AAV particle comprises a viral genome comprising SEQ ID NO: 2195 and a VOY201 capsid. In some embodiments, the AAV particle comprises a viral genome comprising SEQ ID NO: 2195 and an AAV9 capsid. In some embodiments, the AAV particle comprises a viral genome comprising SEQ ID NO: 2195 and an AAV9K449R capsid. In some embodiments, the AAV particle comprises a viral genome comprising SEQ ID NO: 2195 and an AAVPHP.B capsid. In some embodiments, the AAV particle comprises a viral genome comprising SEQ ID NO: 2195 and an AAVPHP.N capsid. In some embodiments, the AAV particle comprises a viral genome comprising SEQ ID NO: 2195 and an AAV2 variant capsid. In some embodiments, the AAV particle comprises a viral genome comprising SEQ ID NO: 2195 and an AAV2/3 variant capsid. In some embodiments, the AAV particle comprises a viral genome comprising SEQ ID NO: 2195 and a capsid comprising SEQ ID NO: 1. In some embodiments, the AAV particle comprises a viral genome comprising SEQ ID NO: 2195 and a capsid encoded by a nucleic acid sequence comprising SEQ ID NO: 2. In some embodiments, the AAV particle comprises a viral genome comprising SEQ ID NO: 2195 and a capsid comprising SEQ ID NO: 4534. In some embodiments, the AAV particle comprises a viral genome comprising SEQ ID NO: 2195 and a capsid encoded by a nucleic acid sequence comprising SEQ ID NO: 3. In some embodiments, the AAV particle comprises a viral genome comprising SEQ ID NO: 2195 and a capsid comprising SEQ ID NO: 138. In some embodiments, the AAV particle comprises a viral genome comprising SEQ ID NO: 2195 and a capsid encoded by a nucleic acid sequence comprising SEQ ID NO: 137. In some embodiments, the AAV particle comprises a viral genome comprising SEQ ID NO: 2195 and a capsid comprising SEQ ID NO: 5. In some embodiments, the AAV particle comprises a viral genome comprising SEQ ID NO: 2195 and a capsid encoded by a nucleic acid sequence comprising SEQ ID NO: 6. In some embodiments, the AAV particle comprises a viral genome comprising SEQ ID NO: 2195 and a capsid comprising SEQ ID NO: 4. In some embodiments, the AAV particle comprises a viral genome comprising SEQ ID NO: 2195 and a capsid comprising SEQ ID NO: 11. In some embodiments, the AAV particle comprises a viral genome comprising SEQ ID NO: 2195 and a capsid comprising SEQ ID NO: 2679. In some embodiments, the AAV particle comprises a viral genome comprising SEQ ID NO: 2195 and a capsid comprising SEQ ID NO: 2809. In some embodiments, the AAV particle comprises a viral genome comprising SEQ ID NO: 2195 and a capsid comprising SEQ ID NO: 2871.

[0892] In some embodiments, the AAV particle comprises a viral genome comprising SEQ ID NO: 2196 and a VOY101 capsid. In some embodiments, the AAV particle comprises a viral genome comprising SEQ ID NO: 2196 and a VOY201 capsid. In some embodiments, the AAV particle comprises a viral genome comprising SEQ ID NO: 2196 and an AAV9 capsid. In some embodiments, the AAV particle comprises a viral genome comprising SEQ ID NO: 2196 and an AAV9K449R capsid. In some embodiments, the AAV particle comprises a viral genome comprising SEQ ID NO: 2196 and an AAVPHP.B capsid. In some embodiments, the AAV particle comprises a viral genome comprising SEQ ID NO: 2196 and an AAVPHP.N capsid. In some embodiments, the AAV particle comprises a viral genome comprising SEQ ID NO: 2196 and an AAV2 variant capsid. In some embodiments, the AAV particle comprises a viral genome comprising SEQ ID NO: 2196 and an AAV2/3 variant capsid. In some embodiments, the AAV particle comprises a viral genome comprising SEQ ID NO: 2196 and a capsid comprising SEQ ID NO: 1. In some embodiments, the AAV particle comprises a viral genome comprising SEQ ID NO: 2196 and a capsid encoded by a nucleic acid sequence comprising SEQ ID NO: 2. In some embodiments, the AAV particle comprises a viral genome comprising SEQ ID NO: 2196 and a capsid comprising SEQ ID NO: 4534. In some embodiments, the AAV particle comprises a viral genome comprising SEQ ID NO: 2196 and a capsid encoded by a nucleic acid sequence comprising SEQ ID NO: 3. In some embodiments, the AAV particle comprises a viral genome comprising SEQ ID NO: 2196 and a capsid comprising SEQ ID NO: 138. In some embodiments, the AAV particle comprises a viral genome comprising SEQ ID NO: 2196 and a capsid encoded by a nucleic acid sequence comprising SEQ ID NO: 137. In some embodiments, the AAV particle comprises a viral genome comprising SEQ ID NO: 2196 and a capsid comprising SEQ ID NO: 5. In some embodiments, the AAV particle comprises a viral genome comprising SEQ ID NO: 2196 and a capsid encoded by a nucleic acid sequence comprising SEQ ID NO: 6. In some embodiments, the AAV particle comprises a viral genome comprising SEQ ID NO: 2196 and a capsid comprising SEQ ID NO: 4. In some embodiments, the AAV particle comprises a viral genome comprising SEQ ID NO: 2196 and a capsid comprising SEQ ID NO: 11. In some embodiments, the AAV particle comprises a viral genome comprising SEQ ID NO: 2196 and a capsid comprising SEQ ID NO: 2679. In some embodiments, the AAV particle comprises a viral genome comprising SEQ ID NO: 2196 and a capsid comprising SEQ ID NO: 2809. In some embodiments, the AAV particle comprises a viral genome comprising SEQ ID NO: 2196 and a capsid comprising SEQ ID NO: 2871.

[0893] In some embodiments, the AAV particle comprises a viral genome comprising SEQ ID NO: 2197 and a VOY101 capsid. In some embodiments, the AAV particle comprises a viral genome comprising SEQ ID NO: 2197 and a VOY201 capsid. In some embodiments, the AAV particle comprises a viral genome comprising SEQ ID NO: 2197 and an AAV9 capsid. In some embodiments, the AAV particle comprises a viral genome comprising SEQ ID NO: 2197 and an AAV9K449R capsid. In some embodiments, the AAV particle comprises a viral genome comprising SEQ ID NO: 2197 and an AAVPHP.B capsid. In some embodiments, the AAV particle comprises a viral genome comprising SEQ ID NO: 2197 and an AAVPHP.N capsid. In some embodiments, the AAV particle comprises a viral genome comprising SEQ ID NO: 2197 and an AAV2 variant capsid. In some embodiments, the AAV particle comprises a viral genome comprising SEQ ID NO: 2197 and an AAV2/3 variant capsid. In some embodiments, the AAV particle comprises a viral genome comprising SEQ ID NO: 2197 and a capsid comprising SEQ ID NO: 1. In some embodiments, the AAV particle comprises a viral genome comprising SEQ ID NO: 2197 and a capsid encoded by a nucleic acid sequence comprising SEQ ID NO: 2. In some embodiments, the AAV particle comprises a viral genome comprising SEQ ID NO: 2197 and a capsid comprising SEQ ID NO: 4534. In some embodiments, the AAV particle comprises a viral genome comprising SEQ ID NO: 2197 and a capsid encoded by a nucleic acid sequence comprising SEQ ID NO: 3. In some embodiments, the AAV particle comprises a viral genome comprising SEQ ID NO: 2197 and a capsid comprising SEQ ID NO: 138. In some embodiments, the AAV particle comprises a viral genome comprising SEQ ID NO: 2197 and a capsid encoded by a nucleic acid sequence comprising SEQ ID NO: 137. In some embodiments, the AAV particle comprises a viral genome comprising SEQ ID NO: 2197 and a capsid comprising SEQ ID NO: 5. In some embodiments, the AAV particle comprises a viral genome comprising SEQ ID NO: 2197 and a capsid encoded by a nucleic acid sequence comprising SEQ ID NO: 6. In some embodiments, the AAV particle comprises a viral genome comprising SEQ ID NO: 2197 and a capsid comprising SEQ ID NO: 4. In some embodiments, the AAV particle comprises a viral genome comprising SEQ ID NO: 2197 and a capsid comprising SEQ ID NO: 11. In some embodiments, the AAV particle comprises a viral genome comprising SEQ ID NO: 2197 and a capsid comprising SEQ ID NO: 2679. In some embodiments, the AAV particle comprises a viral genome comprising SEQ ID NO: 2197 and a capsid comprising SEQ ID NO: 2809. In some embodiments, the AAV particle comprises a viral genome comprising SEQ ID NO: 2197 and a capsid comprising SEQ ID NO: 2871.

[0894] In some embodiments, the AAV particle comprises a viral genome comprising SEQ ID NO: 2198 and a VOY101 capsid. In some embodiments, the AAV particle comprises a viral genome comprising SEQ ID NO: 2198 and a VOY201 capsid. In some embodiments, the AAV particle comprises a viral genome comprising SEQ ID NO: 2198 and an AAV9 capsid. In some embodiments, the AAV particle comprises a viral genome comprising SEQ ID NO: 2198 and an AAV9K449R capsid. In some embodiments, the AAV particle comprises a viral genome comprising SEQ ID NO: 2198 and an AAVPHP.B capsid. In some embodiments, the AAV particle comprises a viral genome comprising SEQ ID NO: 2198 and an AAVPHP.N capsid. In some embodiments, the AAV particle comprises a viral genome comprising SEQ ID NO: 2198 and an AAV2 variant capsid. In some embodiments, the AAV particle comprises a viral genome comprising SEQ ID NO: 2198 and an AAV2/3 variant capsid. In some embodiments, the AAV particle comprises a viral genome comprising SEQ ID NO: 2198 and a capsid comprising SEQ ID NO: 1. In some embodiments, the AAV particle comprises a viral genome comprising SEQ ID NO: 2198 and a capsid encoded by a nucleic acid sequence comprising SEQ ID NO: 2. In some embodiments, the AAV particle comprises a viral genome comprising SEQ ID NO: 2198 and a capsid comprising SEQ ID NO: 4534. In some embodiments, the AAV particle comprises a viral genome comprising SEQ ID NO: 2198 and a capsid encoded by a nucleic acid sequence comprising SEQ ID NO: 3. In some embodiments, the AAV particle comprises a viral genome comprising SEQ ID NO: 2198 and a capsid comprising SEQ ID NO: 138. In some embodiments, the AAV particle comprises a viral genome comprising SEQ ID NO: 2198 and a capsid encoded by a nucleic acid sequence comprising SEQ ID NO: 137. In some embodiments, the AAV particle comprises a viral genome comprising SEQ ID NO: 2198 and a capsid comprising SEQ ID NO: 5. In some embodiments, the AAV particle comprises a viral genome comprising SEQ ID NO: 2198 and a capsid encoded by a nucleic acid sequence comprising SEQ ID NO: 6. In some embodiments, the AAV particle comprises a viral genome comprising SEQ ID NO: 2198 and a capsid comprising SEQ ID NO: 4. In some embodiments, the AAV particle comprises a viral genome comprising SEQ ID NO: 2198 and a capsid comprising SEQ ID NO: 11. In some embodiments, the AAV particle comprises a viral genome comprising SEQ ID NO: 2198 and a capsid comprising SEQ ID NO: 2679. In some embodiments, the AAV particle comprises a viral genome comprising SEQ ID NO: 2198 and a capsid comprising SEQ ID NO: 2809. In some embodiments, the AAV particle comprises a viral genome comprising SEQ ID NO: 2198 and a capsid comprising SEQ ID NO: 2871.

[0895] In some embodiments, the AAV particle comprises a viral genome comprising SEQ ID NO: 2199 and a VOY101 capsid. In some embodiments, the AAV particle comprises a viral genome comprising SEQ ID NO: 2199 and a VOY201 capsid. In some embodiments, the AAV particle comprises a viral genome comprising SEQ ID NO: 2199 and an AAV9 capsid. In some embodiments, the AAV particle comprises a viral genome comprising SEQ ID NO: 2199 and an AAV9K449R capsid. In some embodiments, the AAV particle comprises a viral genome comprising SEQ ID NO: 2199 and an AAVPHP.B capsid. In some embodiments, the AAV particle comprises a viral genome comprising SEQ ID NO: 2199 and an AAVPHP.N capsid. In some embodiments, the AAV particle comprises a viral genome comprising SEQ ID NO: 2199 and an AAV2 variant capsid. In some embodiments, the AAV particle comprises a viral genome comprising SEQ ID NO: 2199 and an AAV2/3 variant capsid. In some embodiments, the AAV particle comprises a viral genome comprising SEQ ID NO: 2199 and a capsid comprising SEQ ID NO: 1. In some embodiments, the AAV particle comprises a viral genome comprising SEQ ID NO: 2199 and a capsid encoded by a nucleic acid sequence comprising SEQ ID NO: 2. In some embodiments, the AAV particle comprises a viral genome comprising SEQ ID NO: 2199 and a capsid comprising SEQ ID NO: 4534. In some embodiments, the AAV particle comprises a viral genome comprising SEQ ID NO: 2199 and a capsid encoded by a nucleic acid sequence comprising SEQ ID NO: 3. In some embodiments, the AAV particle comprises a viral genome comprising SEQ ID NO: 2199 and a capsid comprising SEQ ID NO: 138. In some embodiments, the AAV particle comprises a viral genome comprising SEQ ID NO: 2199 and a capsid encoded by a nucleic acid sequence comprising SEQ ID NO: 137. In some embodiments, the AAV particle comprises a viral genome comprising SEQ ID NO: 2199 and a capsid comprising SEQ ID NO: 5. In some embodiments, the AAV particle comprises a viral genome comprising SEQ ID NO: 2199 and a capsid encoded by a nucleic acid sequence comprising SEQ ID NO: 6. In some embodiments, the AAV particle comprises a viral genome comprising SEQ ID NO: 2199 and a capsid comprising SEQ ID NO: 4. In some embodiments, the AAV particle comprises a viral genome comprising SEQ ID NO: 2199 and a capsid comprising SEQ ID NO: 11. In some embodiments, the AAV particle comprises a viral genome comprising SEQ ID NO: 2199 and a capsid comprising SEQ ID NO: 2679. In some embodiments, the AAV particle comprises a viral genome comprising SEQ ID NO: 2199 and a capsid comprising SEQ ID NO: 2809. In some embodiments, the AAV particle comprises a viral genome comprising SEQ ID NO: 2199 and a capsid comprising SEQ ID NO: 2871.

[0896] In some embodiments, the AAV particle comprises a viral genome comprising SEQ ID NO: 2200 and a VOY101 capsid. In some embodiments, the AAV particle comprises a viral genome comprising SEQ ID NO: 2200 and a VOY201 capsid. In some embodiments, the AAV particle comprises a viral genome comprising SEQ ID NO: 2200 and an AAV9 capsid. In some embodiments, the AAV particle comprises a viral genome comprising SEQ ID NO: 2200 and an AAV9K449R capsid. In some embodiments, the AAV particle comprises a viral genome comprising SEQ ID NO: 2200 and an AAVPHP.B capsid. In some embodiments, the AAV particle comprises a viral genome comprising SEQ ID NO: 2200 and an AAVPHP.N capsid. In some embodiments, the AAV particle comprises a viral genome comprising SEQ ID NO: 2200 and an AAV2 variant capsid. In some embodiments, the AAV particle comprises a viral genome comprising SEQ ID NO: 2200 and an AAV2/3 variant capsid. In some embodiments, the AAV particle comprises a viral genome comprising SEQ ID NO: 2200 and a capsid comprising SEQ ID NO: 1. In some embodiments, the AAV particle comprises a viral genome comprising SEQ ID NO: 2200 and a capsid encoded by a nucleic acid sequence comprising SEQ ID NO: 2. In some embodiments, the AAV particle comprises a viral genome comprising SEQ ID NO: 2200 and a capsid comprising SEQ ID NO: 4534. In some embodiments, the AAV particle comprises a viral genome comprising SEQ ID NO: 2200 and a capsid encoded by a nucleic acid sequence comprising SEQ ID NO: 3. In some embodiments, the AAV particle comprises a viral genome comprising SEQ ID NO: 2200 and a capsid comprising SEQ ID NO: 138. In some embodiments, the AAV particle comprises a viral genome comprising SEQ ID NO: 2200 and a capsid encoded by a nucleic acid sequence comprising SEQ ID NO: 137. In some embodiments, the AAV particle comprises a viral genome comprising SEQ ID NO: 2200 and a capsid comprising SEQ ID NO: 5. In some embodiments, the AAV particle comprises a viral genome comprising SEQ ID NO: 2200 and a capsid encoded by a nucleic acid sequence comprising SEQ ID NO: 6. In some embodiments, the AAV particle comprises a viral genome comprising SEQ ID NO: 2200 and a capsid comprising SEQ ID NO: 4. In some embodiments, the AAV particle comprises a viral genome comprising SEQ ID NO: 2200 and a capsid comprising SEQ ID NO: 11. In some embodiments, the AAV particle comprises a viral genome comprising SEQ ID NO: 2200 and a capsid comprising SEQ ID NO: 2679. In some embodiments, the AAV particle comprises a viral genome comprising SEQ ID NO: 2200 and a capsid comprising SEQ ID NO: 2809. In some embodiments, the AAV particle comprises a viral genome comprising SEQ ID NO: 2200 and a capsid comprising SEQ ID NO: 2871.

[0897] In some embodiments, the AAV particle comprises a viral genome comprising SEQ ID NO: 2201 and a VOY101 capsid. In some embodiments, the AAV particle comprises a viral genome comprising SEQ ID NO: 2201 and a VOY201 capsid. In some embodiments, the AAV particle comprises a viral genome comprising SEQ ID NO: 2201 and an AAV9 capsid. In some embodiments, the AAV particle comprises a viral genome comprising SEQ ID NO: 2201 and an AAV9K449R capsid. In some embodiments, the AAV particle comprises a viral genome comprising SEQ ID NO: 2201 and an AAVPHP.B capsid. In some embodiments, the AAV particle comprises a viral genome comprising SEQ ID NO: 2201 and an AAVPHP.N capsid. In some embodiments, the AAV particle comprises a viral genome comprising SEQ ID NO: 2201 and an AAV2 variant capsid. In some embodiments, the AAV particle comprises a viral genome comprising SEQ ID NO: 2201 and an AAV2/3 variant capsid. In some embodiments, the AAV particle comprises a viral genome comprising SEQ ID NO: 2201 and a capsid comprising SEQ ID NO: 1. In some embodiments, the AAV particle comprises a viral genome comprising SEQ ID NO: 2201 and a capsid encoded by a nucleic acid sequence comprising SEQ ID NO: 2. In some embodiments, the AAV particle comprises a viral genome comprising SEQ ID NO: 2201 and a capsid comprising SEQ ID NO: 4534. In some embodiments, the AAV particle comprises a viral genome comprising SEQ ID NO: 2201 and a capsid encoded by a nucleic acid sequence comprising SEQ ID NO: 3. In some embodiments, the AAV particle comprises a viral genome comprising SEQ ID NO: 2201 and a capsid comprising SEQ ID NO: 138. In some embodiments, the AAV particle comprises a viral genome comprising SEQ ID NO: 2201 and a capsid encoded by a nucleic acid sequence comprising SEQ ID NO: 137. In some embodiments, the AAV particle comprises a viral genome comprising SEQ ID NO: 2201 and a capsid comprising SEQ ID NO: 5. In some embodiments, the AAV particle comprises a viral genome comprising SEQ ID NO: 2201 and a capsid encoded by a nucleic acid sequence comprising SEQ ID NO: 6. In some embodiments, the AAV particle comprises a viral genome comprising SEQ ID NO: 2201 and a capsid comprising SEQ ID NO: 4. In some embodiments, the AAV particle comprises a viral genome comprising SEQ ID NO: 2201 and a capsid comprising SEQ ID NO: 11. In some embodiments, the AAV particle comprises a viral genome comprising SEQ ID NO: 2201 and a capsid comprising SEQ ID NO: 2679. In some embodiments, the AAV particle comprises a viral genome comprising SEQ ID NO: 2201 and a capsid comprising SEQ ID NO: 2809. In some embodiments, the AAV particle comprises a viral genome comprising SEQ ID NO: 2201 and a capsid comprising SEQ ID NO: 2871.

[0898] In some embodiments, the AAV particle comprises a viral genome comprising SEQ ID NO: 2202 and a VOY101 capsid. In some embodiments, the AAV particle comprises a viral genome comprising SEQ ID NO: 2202 and a VOY201 capsid. In some embodiments, the AAV particle comprises a viral genome comprising SEQ ID NO: 2202 and an AAV9 capsid. In some embodiments, the AAV particle comprises a viral genome comprising SEQ ID NO: 2202 and an AAV9K449R capsid. In some embodiments, the AAV particle comprises a viral genome comprising SEQ ID NO: 2202 and an AAVPHP.B capsid. In some embodiments, the AAV particle comprises a viral genome comprising SEQ ID NO: 2202 and an AAVPHP.N capsid. In some embodiments, the AAV particle comprises a viral genome comprising SEQ ID NO: 2202 and an AAV2 variant capsid. In some embodiments, the AAV particle comprises a viral genome comprising SEQ ID NO: 2202 and an AAV2/3 variant capsid. In some embodiments, the AAV particle comprises a viral genome comprising SEQ ID NO: 2202 and a capsid comprising SEQ ID NO: 1. In some embodiments, the AAV particle comprises a viral genome comprising SEQ ID NO: 2202 and a capsid encoded by a nucleic acid sequence comprising SEQ ID NO: 2. In some embodiments, the AAV particle comprises a viral genome comprising SEQ ID NO: 2202 and a capsid comprising SEQ ID NO: 4534. In some embodiments, the AAV particle comprises a viral genome comprising SEQ ID NO: 2202 and a capsid encoded by a nucleic acid sequence comprising SEQ ID NO: 3. In some embodiments, the AAV particle comprises a viral genome comprising SEQ ID NO: 2202 and a capsid comprising SEQ ID NO: 138. In some embodiments, the AAV particle comprises a viral genome comprising SEQ ID NO: 2202 and a capsid encoded by a nucleic acid sequence comprising SEQ ID NO: 137. In some embodiments, the AAV particle comprises a viral genome comprising SEQ ID NO: 2202 and a capsid comprising SEQ ID NO: 5. In some embodiments, the AAV particle comprises a viral genome comprising SEQ ID NO: 2202 and a capsid encoded by a nucleic acid sequence comprising SEQ ID NO: 6. In some embodiments, the AAV particle comprises a viral genome comprising SEQ ID NO: 2202 and a capsid comprising SEQ ID NO: 4. In some embodiments, the AAV particle comprises a viral genome comprising SEQ ID NO: 2202 and a capsid comprising SEQ ID NO: 11. In some embodiments, the AAV particle comprises a viral genome comprising SEQ ID NO: 2202 and a capsid comprising SEQ ID NO: 2679. In some embodiments, the AAV particle comprises a viral genome comprising SEQ ID NO: 2202 and a capsid comprising SEQ ID NO: 2809. In some embodiments, the AAV particle comprises a viral genome comprising SEQ ID NO: 2202 and a capsid comprising SEQ ID NO: 2871.

[0899] In some embodiments, the AAV particle comprises a viral genome comprising SEQ ID NO: 2203 and a VOY101 capsid. In some embodiments, the AAV particle comprises a viral genome comprising SEQ ID NO: 2203 and a VOY201 capsid. In some embodiments, the AAV particle comprises a viral genome comprising SEQ ID NO: 2203 and an AAV9 capsid. In some embodiments, the AAV particle comprises a viral genome comprising SEQ ID NO: 2203 and an AAV9K449R capsid. In some embodiments, the AAV particle comprises a viral genome comprising SEQ ID NO: 2203 and an AAVPHP.B capsid. In some embodiments, the AAV particle comprises a viral genome comprising SEQ ID NO: 2203 and an AAVPHP.N capsid. In some embodiments, the AAV particle comprises a viral genome comprising SEQ ID NO: 2203 and an AAV2 variant capsid. In some embodiments, the AAV particle comprises a viral genome comprising SEQ ID NO: 2203 and an AAV2/3 variant capsid. In some embodiments, the AAV particle comprises a viral genome comprising SEQ ID NO: 2203 and a capsid comprising SEQ ID NO: 1. In some embodiments, the AAV particle comprises a viral genome comprising SEQ ID NO: 2203 and a capsid encoded by a nucleic acid sequence comprising SEQ ID NO: 2. In some embodiments, the AAV particle comprises a viral genome comprising SEQ ID NO: 2203 and a capsid comprising SEQ ID NO: 4534. In some embodiments, the AAV particle comprises a viral genome comprising SEQ ID NO: 2203 and a capsid encoded by a nucleic acid sequence comprising SEQ ID NO: 3. In some embodiments, the AAV particle comprises a viral genome comprising SEQ ID NO: 2203 and a capsid comprising SEQ ID NO: 138. In some embodiments, the AAV particle comprises a viral genome comprising SEQ ID NO: 2203 and a capsid encoded by a nucleic acid sequence comprising SEQ ID NO: 137. In some embodiments, the AAV particle comprises a viral genome comprising SEQ ID NO: 2203 and a capsid comprising SEQ ID NO: 5. In some embodiments, the AAV particle comprises a viral genome comprising SEQ ID NO: 2203 and a capsid encoded by a nucleic acid sequence comprising SEQ ID NO: 6. In some embodiments, the AAV particle comprises a viral genome comprising SEQ ID NO: 2203 and a capsid comprising SEQ ID NO: 4. In some embodiments, the AAV particle comprises a viral genome comprising SEQ ID NO: 2203 and a capsid comprising SEQ ID NO: 11. In some embodiments, the AAV particle comprises a viral genome comprising SEQ ID NO: 2203 and a capsid comprising SEQ ID NO: 2679. In some embodiments, the AAV particle comprises a viral genome comprising SEQ ID NO: 2203 and a capsid comprising SEQ ID NO: 2809. In some embodiments, the AAV particle comprises a viral genome comprising SEQ ID NO: 2203 and a capsid comprising SEQ ID NO: 2871.

[0900] In some embodiments, the AAV particle comprises a viral genome comprising SEQ ID NO: 2204 and a VOY101 capsid. In some embodiments, the AAV particle comprises a viral genome comprising SEQ ID NO: 2204 and a VOY201 capsid. In some embodiments, the AAV particle comprises a viral genome comprising SEQ ID NO: 2204 and an AAV9 capsid. In some embodiments, the AAV particle comprises a viral genome comprising SEQ ID NO: 2204 and an AAV9K449R capsid. In some embodiments, the AAV particle comprises a viral genome comprising SEQ ID NO: 2204 and an AAVPHP.B capsid. In some embodiments, the AAV particle comprises a viral genome comprising SEQ ID NO: 2204 and an AAVPHP.N capsid. In some embodiments, the AAV particle comprises a viral genome comprising SEQ ID NO: 2204 and an AAV2 variant capsid. In some embodiments, the AAV particle comprises a viral genome comprising SEQ ID NO: 2204 and an AAV2/3 variant capsid. In some embodiments, the AAV particle comprises a viral genome comprising SEQ ID NO: 2204 and a capsid comprising SEQ ID NO: 1. In some embodiments, the AAV particle comprises a viral genome comprising SEQ ID NO: 2204 and a capsid encoded by a nucleic acid sequence comprising SEQ ID NO: 2. In some embodiments, the AAV particle comprises a viral genome comprising SEQ ID NO: 2204 and a capsid comprising SEQ ID NO: 4534. In some embodiments, the AAV particle comprises a viral genome comprising SEQ ID NO: 2204 and a capsid encoded by a nucleic acid sequence comprising SEQ ID NO: 3. In some embodiments, the AAV particle comprises a viral genome comprising SEQ ID NO: 2204 and a capsid comprising SEQ ID NO: 138. In some embodiments, the AAV particle comprises a viral genome comprising SEQ ID NO: 2204 and a capsid encoded by a nucleic acid sequence comprising SEQ ID NO: 137. In some embodiments, the AAV particle comprises a viral genome comprising SEQ ID NO: 2204 and a capsid comprising SEQ ID NO: 5. In some embodiments, the AAV particle comprises a viral genome comprising SEQ ID NO: 2204 and a capsid encoded by a nucleic acid sequence comprising SEQ ID NO: 6. In some embodiments, the AAV particle comprises a viral genome comprising SEQ ID NO: 2204 and a capsid comprising SEQ ID NO: 4. In some embodiments, the AAV particle comprises a viral genome comprising SEQ ID NO: 2204 and a capsid comprising SEQ ID NO: 11. In some embodiments, the AAV particle comprises a viral genome comprising SEQ ID NO: 2204 and a capsid comprising SEQ ID NO: 2679. In some embodiments, the AAV particle comprises a viral genome comprising SEQ ID NO: 2204 and a capsid comprising SEQ ID NO: 2809. In some embodiments, the AAV particle comprises a viral genome comprising SEQ ID NO: 2204 and a capsid comprising SEQ ID NO: 2871.

[0901] In some embodiments, the AAV particle comprises a viral genome comprising SEQ ID NO: 2205 and a VOY101 capsid. In some embodiments, the AAV particle comprises a viral genome comprising SEQ ID NO: 2205 and a VOY201 capsid. In some embodiments, the AAV particle comprises a viral genome comprising SEQ ID NO: 2205 and an AAV9 capsid. In some embodiments, the AAV particle comprises a viral genome comprising SEQ ID NO: 2205 and an AAV9K449R capsid. In some embodiments, the AAV particle comprises a viral genome comprising SEQ ID NO: 2205 and an AAVPHP.B capsid. In some embodiments, the AAV particle comprises a viral genome comprising SEQ ID NO: 2205 and an AAVPHP.N capsid. In some embodiments, the AAV particle comprises a viral genome comprising SEQ ID NO: 2205 and an AAV2 variant capsid. In some embodiments, the AAV particle comprises a viral genome comprising SEQ ID NO: 2205 and an AAV2/3 variant capsid. In some embodiments, the AAV particle comprises a viral genome comprising SEQ ID NO: 2205 and a capsid comprising SEQ ID NO: 1. In some embodiments, the AAV particle comprises a viral genome comprising SEQ ID NO: 2205 and a capsid encoded by a nucleic acid sequence comprising SEQ ID NO: 2. In some embodiments, the AAV particle comprises a viral genome comprising SEQ ID NO: 2205 and a capsid comprising SEQ ID NO: 4534. In some embodiments, the AAV particle comprises a viral genome comprising SEQ ID NO: 2205 and a capsid encoded by a nucleic acid sequence comprising SEQ ID NO: 3. In some embodiments, the AAV particle comprises a viral genome comprising SEQ ID NO: 2205 and a capsid comprising SEQ ID NO: 138. In some embodiments, the AAV particle comprises a viral genome comprising SEQ ID NO: 2205 and a capsid encoded by a nucleic acid sequence comprising SEQ ID NO: 137. In some embodiments, the AAV particle comprises a viral genome comprising SEQ ID NO: 2205 and a capsid comprising SEQ ID NO: 5. In some embodiments, the AAV particle comprises a viral genome comprising SEQ ID NO: 2205 and a capsid encoded by a nucleic acid sequence comprising SEQ ID NO: 6. In some embodiments, the AAV particle comprises a viral genome comprising SEQ ID NO: 2205 and a capsid comprising SEQ ID NO: 4. In some embodiments, the AAV particle comprises a viral genome comprising SEQ ID NO: 2205 and a capsid comprising SEQ ID NO: 11. In some embodiments, the AAV particle comprises a viral genome comprising SEQ ID NO: 2205 and a capsid comprising SEQ ID NO: 2679. In some embodiments, the AAV particle comprises a viral genome comprising SEQ ID NO: 2205 and a capsid comprising SEQ ID NO: 2809. In some embodiments, the AAV particle comprises a viral genome comprising SEQ ID NO: 2205 and a capsid comprising SEQ ID NO: 2871.

[0902] In some embodiments, the AAV particle comprises a viral genome comprising SEQ ID NO: 2206 and a VOY101 capsid. In some embodiments, the AAV particle comprises a viral genome comprising SEQ ID NO: 2206 and a VOY201 capsid. In some embodiments, the AAV particle comprises a viral genome comprising SEQ ID NO: 2206 and an AAV9 capsid. In some embodiments, the AAV particle comprises a viral genome comprising SEQ ID NO: 2206 and an AAV9K449R capsid. In some embodiments, the AAV particle comprises a viral genome comprising SEQ ID NO: 2206 and an AAVPHP.B capsid. In some embodiments, the AAV particle comprises a viral genome comprising SEQ ID NO: 2206 and an AAVPHP.N capsid. In some embodiments, the AAV particle comprises a viral genome comprising SEQ ID NO: 2206 and an AAV2 variant capsid. In some embodiments, the AAV particle comprises a viral genome comprising SEQ ID NO: 2206 and an AAV2/3 variant capsid. In some embodiments, the AAV particle comprises a viral genome comprising SEQ ID NO: 2206 and a capsid comprising SEQ ID NO: 1. In some embodiments, the AAV particle comprises a viral genome comprising SEQ ID NO: 2206 and a capsid encoded by a nucleic acid sequence comprising SEQ ID NO: 2. In some embodiments, the AAV particle comprises a viral genome comprising SEQ ID NO: 2206 and a capsid comprising SEQ ID NO: 4534. In some embodiments, the AAV particle comprises a viral genome comprising SEQ ID NO: 2206 and a capsid encoded by a nucleic acid sequence comprising SEQ ID NO: 3. In some embodiments, the AAV particle comprises a viral genome comprising SEQ ID NO: 2206 and a capsid comprising SEQ ID NO: 138. In some embodiments, the AAV particle comprises a viral genome comprising SEQ ID NO: 2206 and a capsid encoded by a nucleic acid sequence comprising SEQ ID NO: 137. In some embodiments, the AAV particle comprises a viral genome comprising SEQ ID NO: 2206 and a capsid comprising SEQ ID NO: 5. In some embodiments, the AAV particle comprises a viral genome comprising SEQ ID NO: 2206 and a capsid encoded by a nucleic acid sequence comprising SEQ ID NO: 6. In some embodiments, the AAV particle comprises a viral genome comprising SEQ ID NO: 2206 and a capsid comprising SEQ ID NO: 4. In some embodiments, the AAV particle comprises a viral genome comprising SEQ ID NO: 2206 and a capsid comprising SEQ ID NO: 11. In some embodiments, the AAV particle comprises a viral genome comprising SEQ ID NO: 2206 and a capsid comprising SEQ ID NO: 2679. In some embodiments, the AAV particle comprises a viral genome comprising SEQ ID NO: 2206 and a capsid comprising SEQ ID NO: 2809. In some embodiments, the AAV particle comprises a viral genome comprising SEQ ID NO: 2206 and a capsid comprising SEQ ID NO: 2871.

[0903] In some embodiments, the AAV particle comprises a viral genome comprising SEQ ID NO: 2207 and a VOY101 capsid. In some embodiments, the AAV particle comprises a viral genome comprising SEQ ID NO: 2207 and a VOY201 capsid. In some embodiments, the AAV particle comprises a viral genome comprising SEQ ID NO: 2207 and an AAV9 capsid. In some embodiments, the AAV particle comprises a viral genome comprising SEQ ID NO: 2207 and an AAV9K449R capsid. In some embodiments, the AAV particle comprises a viral genome comprising SEQ ID NO: 2207 and an AAVPHP.B capsid. In some embodiments, the AAV particle comprises a viral genome comprising SEQ ID NO: 2207 and an AAVPHP.N capsid. In some embodiments, the AAV particle comprises a viral genome comprising SEQ ID NO: 2207 and an AAV2 variant capsid. In some embodiments, the AAV particle comprises a viral genome comprising SEQ ID NO: 2207 and an AAV2/3 variant capsid. In some embodiments, the AAV particle comprises a viral genome comprising SEQ ID NO: 2207 and a capsid comprising SEQ ID NO: 1. In some embodiments, the AAV particle comprises a viral genome comprising SEQ ID NO: 2207 and a capsid encoded by a nucleic acid sequence comprising SEQ ID NO: 2. In some embodiments, the AAV particle comprises a viral genome comprising SEQ ID NO: 2207 and a capsid comprising SEQ ID NO: 4534. In some embodiments, the AAV particle comprises a viral genome comprising SEQ ID NO: 2207 and a capsid encoded by a nucleic acid sequence comprising SEQ ID NO: 3. In some embodiments, the AAV particle comprises a viral genome comprising SEQ ID NO: 2207 and a capsid comprising SEQ ID NO: 138. In some embodiments, the AAV particle comprises a viral genome comprising SEQ ID NO: 2207 and a capsid encoded by a nucleic acid sequence comprising SEQ ID NO: 137. In some embodiments, the AAV particle comprises a viral genome comprising SEQ ID NO: 2207 and a capsid comprising SEQ ID NO: 5. In some embodiments, the AAV particle comprises a viral genome comprising SEQ ID NO: 2207 and a capsid encoded by a nucleic acid sequence comprising SEQ ID NO: 6. In some embodiments, the AAV particle comprises a viral genome comprising SEQ ID NO: 2207 and a capsid comprising SEQ ID NO: 4. In some embodiments, the AAV particle comprises a viral genome comprising SEQ ID NO: 2207 and a capsid comprising SEQ ID NO: 11. In some embodiments, the AAV particle comprises a viral genome comprising SEQ ID NO: 2207 and a capsid comprising SEQ ID NO: 2679. In some embodiments, the AAV particle comprises a viral genome comprising SEQ ID NO: 2207 and a capsid comprising SEQ ID NO: 2809. In some embodiments, the AAV particle comprises a viral genome comprising SEQ ID NO: 2207 and a capsid comprising SEQ ID NO: 2871.

[0904] In some embodiments, the AAV particle comprises a viral genome comprising SEQ ID NO: 2208 and a VOY101 capsid. In some embodiments, the AAV particle comprises a viral genome comprising SEQ ID NO: 2208 and a VOY201 capsid. In some embodiments, the AAV particle comprises a viral genome comprising SEQ ID NO: 2208 and an AAV9 capsid. In some embodiments, the AAV particle comprises a viral genome comprising SEQ ID NO: 2208 and an AAV9K449R capsid. In some embodiments, the AAV particle comprises a viral genome comprising SEQ ID NO: 2208 and an AAVPHP.B capsid. In some embodiments, the AAV particle comprises a viral genome comprising SEQ ID NO: 2208 and an AAVPHP.N capsid. In some embodiments, the AAV particle comprises a viral genome comprising SEQ ID NO: 2208 and an AAV2 variant capsid. In some embodiments, the AAV particle comprises a viral genome comprising SEQ ID NO: 2208 and an AAV2/3 variant capsid. In some embodiments, the AAV particle comprises a viral genome comprising SEQ ID NO: 2208 and a capsid comprising SEQ ID NO: 1. In some embodiments, the AAV particle comprises a viral genome comprising SEQ ID NO: 2208 and a capsid encoded by a nucleic acid sequence comprising SEQ ID NO: 2. In some embodiments, the AAV particle comprises a viral genome comprising SEQ ID NO: 2208 and a capsid comprising SEQ ID NO: 4534. In some embodiments, the AAV particle comprises a viral genome comprising SEQ ID NO: 2208 and a capsid encoded by a nucleic acid sequence comprising SEQ ID NO: 3. In some embodiments, the AAV particle comprises a viral genome comprising SEQ ID NO: 2208 and a capsid comprising SEQ ID NO: 138. In some embodiments, the AAV particle comprises a viral genome comprising SEQ ID NO: 2208 and a capsid encoded by a nucleic acid sequence comprising SEQ ID NO: 137. In some embodiments, the AAV particle comprises a viral genome comprising SEQ ID NO: 2208 and a capsid comprising SEQ ID NO: 5. In some embodiments, the AAV particle comprises a viral genome comprising SEQ ID NO: 2208 and a capsid encoded by a nucleic acid sequence comprising SEQ ID NO: 6. In some embodiments, the AAV particle comprises a viral genome comprising SEQ ID NO: 2208 and a capsid comprising SEQ ID NO: 4. In some embodiments, the AAV particle comprises a viral genome comprising SEQ ID NO: 2208 and a capsid comprising SEQ ID NO: 11. In some embodiments, the AAV particle comprises a viral genome comprising SEQ ID NO: 2208 and a capsid comprising SEQ ID NO: 2679. In some embodiments, the AAV particle comprises a viral genome comprising SEQ ID NO: 2208 and a capsid comprising SEQ ID NO: 2809. In some embodiments, the AAV particle comprises a viral genome comprising SEQ ID NO: 2208 and a capsid comprising SEQ ID NO: 2871.

[0905] In some embodiments, the AAV particle comprises a viral genome comprising SEQ ID NO: 2209 and a VOY101 capsid. In some embodiments, the AAV particle comprises a viral genome comprising SEQ ID NO: 2209 and a VOY201 capsid. In some embodiments, the AAV particle comprises a viral genome comprising SEQ ID NO: 2209 and an AAV9 capsid. In some embodiments, the AAV particle comprises a viral genome comprising SEQ ID NO: 2209 and an AAV9K449R capsid. In some embodiments, the AAV particle comprises a viral genome comprising SEQ ID NO: 2209 and an AAVPHP.B capsid. In some embodiments, the AAV particle comprises a viral genome comprising SEQ ID NO: 2209 and an AAVPHP.N capsid. In some embodiments, the AAV particle comprises a viral genome comprising SEQ ID NO: 2209 and an AAV2 variant capsid. In some embodiments, the AAV particle comprises a viral genome comprising SEQ ID NO: 2209 and an AAV2/3 variant capsid. In some embodiments, the AAV particle comprises a viral genome comprising SEQ ID NO: 2209 and a capsid comprising SEQ ID NO: 1. In some embodiments, the AAV particle comprises a viral genome comprising SEQ ID NO: 2209 and a capsid encoded by a nucleic acid sequence comprising SEQ ID NO: 2. In some embodiments, the AAV particle comprises a viral genome comprising SEQ ID NO: 2209 and a capsid comprising SEQ ID NO: 4534. In some embodiments, the AAV particle comprises a viral genome comprising SEQ ID NO: 2209 and a capsid encoded by a nucleic acid sequence comprising SEQ ID NO: 3. In some embodiments, the AAV particle comprises a viral genome comprising SEQ ID NO: 2209 and a capsid comprising SEQ ID NO: 138. In some embodiments, the AAV particle comprises a viral genome comprising SEQ ID NO: 2209 and a capsid encoded by a nucleic acid sequence comprising SEQ ID NO: 137. In some embodiments, the AAV particle comprises a viral genome comprising SEQ ID NO: 2209 and a capsid comprising SEQ ID NO: 5. In some embodiments, the AAV particle comprises a viral genome comprising SEQ ID NO: 2209 and a capsid encoded by a nucleic acid sequence comprising SEQ ID NO: 6. In some embodiments, the AAV particle comprises a viral genome comprising SEQ ID NO: 2209 and a capsid comprising SEQ ID NO: 4. In some embodiments, the AAV particle comprises a viral genome comprising SEQ ID NO: 2209 and a capsid comprising SEQ ID NO: 11. In some embodiments, the AAV particle comprises a viral genome comprising SEQ ID NO: 2209 and a capsid comprising SEQ ID NO: 2679. In some embodiments, the AAV particle comprises a viral genome comprising SEQ ID NO: 2209 and a capsid comprising SEQ ID NO: 2809. In some embodiments, the AAV particle comprises a viral genome comprising SEQ ID NO: 2209 and a capsid comprising SEQ ID NO: 2871.

[0906] In some embodiments, the AAV particle comprises a viral genome comprising SEQ ID NO: 2210 and a VOY101 capsid. In some embodiments, the AAV particle comprises a viral genome comprising SEQ ID NO: 2210 and a VOY201 capsid. In some embodiments, the AAV particle comprises a viral genome comprising SEQ ID NO: 2210 and an AAV9 capsid. In some embodiments, the AAV particle comprises a viral genome comprising SEQ ID NO: 2210 and an AAV9K449R capsid. In some embodiments, the AAV particle comprises a viral genome comprising SEQ ID NO: 2210 and an AAVPHP.B capsid. In some embodiments, the AAV particle comprises a viral genome comprising SEQ ID NO: 2210 and an AAVPHP.N capsid. In some embodiments, the AAV particle comprises a viral genome comprising SEQ ID NO: 2210 and an AAV2 variant capsid. In some embodiments, the AAV particle comprises a viral genome comprising SEQ ID NO: 2210 and an AAV2/3 variant capsid. In some embodiments, the AAV particle comprises a viral genome comprising SEQ ID NO: 2210 and a capsid comprising SEQ ID NO: 1. In some embodiments, the AAV particle comprises a viral genome comprising SEQ ID NO: 2210 and a capsid encoded by a nucleic acid sequence comprising SEQ ID NO: 2. In some embodiments, the AAV particle comprises a viral genome comprising SEQ ID NO: 2210 and a capsid comprising SEQ ID NO: 4534. In some embodiments, the AAV particle comprises a viral genome comprising SEQ ID NO: 2210 and a capsid encoded by a nucleic acid sequence comprising SEQ ID NO: 3. In some embodiments, the AAV particle comprises a viral genome comprising SEQ ID NO: 2210 and a capsid comprising SEQ ID NO: 138. In some embodiments, the AAV particle comprises a viral genome comprising SEQ ID NO: 2210 and a capsid encoded by a nucleic acid sequence comprising SEQ ID NO: 137. In some embodiments, the AAV particle comprises a viral genome comprising SEQ ID NO: 2210 and a capsid comprising SEQ ID NO: 5. In some embodiments, the AAV particle comprises a viral genome comprising SEQ ID NO: 2210 and a capsid encoded by a nucleic acid sequence comprising SEQ ID NO: 6. In some embodiments, the AAV particle comprises a viral genome comprising SEQ ID NO: 2210 and a capsid comprising SEQ ID NO: 4. In some embodiments, the AAV particle comprises a viral genome comprising SEQ ID NO: 2210 and a capsid comprising SEQ ID NO: 11. In some embodiments, the AAV particle comprises a viral genome comprising SEQ ID NO: 2210 and a capsid comprising SEQ ID NO: 2679. In some embodiments, the AAV particle comprises a viral genome comprising SEQ ID NO: 2210 and a capsid comprising SEQ ID NO: 2809. In some embodiments, the AAV particle comprises a viral genome comprising SEQ ID NO: 2210 and a capsid comprising SEQ ID NO: 2871.

[0907] In some embodiments, the AAV particle comprises a viral genome comprising SEQ ID NO: 2211 and a VOY101 capsid. In some embodiments, the AAV particle comprises a viral genome comprising SEQ ID NO: 2211 and a VOY201 capsid. In some embodiments, the AAV particle comprises a viral genome comprising SEQ ID NO: 2211 and an AAV9 capsid. In some embodiments, the AAV particle comprises a viral genome comprising SEQ ID NO: 2211 and an AAV9K449R capsid. In some embodiments, the AAV particle comprises a viral genome comprising SEQ ID NO: 2211 and an AAVPHP.B capsid. In some embodiments, the AAV particle comprises a viral genome comprising SEQ ID NO: 2211 and an AAVPHP.N capsid. In some embodiments, the AAV particle comprises a viral genome comprising SEQ ID NO: 2211 and an AAV2 variant capsid. In some embodiments, the AAV particle comprises a viral genome comprising SEQ ID NO: 2211 and an AAV2/3 variant capsid. In some embodiments, the AAV particle comprises a viral genome comprising SEQ ID NO: 2211 and a capsid comprising SEQ ID NO: 1. In some embodiments, the AAV particle comprises a viral genome comprising SEQ ID NO: 2211 and a capsid encoded by a nucleic acid sequence comprising SEQ ID NO: 2. In some embodiments, the AAV particle comprises a viral genome comprising SEQ ID NO: 2211 and a capsid comprising SEQ ID NO: 4534. In some embodiments, the AAV particle comprises a viral genome comprising SEQ ID NO: 2211 and a capsid encoded by a nucleic acid sequence comprising SEQ ID NO: 3. In some embodiments, the AAV particle comprises a viral genome comprising SEQ ID NO: 2211 and a capsid comprising SEQ ID NO: 138. In some embodiments, the AAV particle comprises a viral genome comprising SEQ ID NO: 2211 and a capsid encoded by a nucleic acid sequence comprising SEQ ID NO: 137. In some embodiments, the AAV particle comprises a viral genome comprising SEQ ID NO: 2211 and a capsid comprising SEQ ID NO: 5. In some embodiments, the AAV particle comprises a viral genome comprising SEQ ID NO: 2211 and a capsid encoded by a nucleic acid sequence comprising SEQ ID NO: 6. In some embodiments, the AAV particle comprises a viral genome comprising SEQ ID NO: 2211 and a capsid comprising SEQ ID NO: 4. In some embodiments, the AAV particle comprises a viral genome comprising SEQ ID NO: 2211 and a capsid comprising SEQ ID NO: 11. In some embodiments, the AAV particle comprises a viral genome comprising SEQ ID NO: 2211 and a capsid comprising SEQ ID NO: 2679. In some embodiments, the AAV particle comprises a viral genome comprising SEQ ID NO: 2211 and a capsid comprising SEQ ID NO: 2809. In some embodiments, the AAV particle comprises a viral genome comprising SEQ ID NO: 2211 and a capsid comprising SEQ ID NO: 2871.

[0908] In some embodiments, the AAV particle comprises a viral genome comprising SEQ ID NO: 2212 and a VOY101 capsid. In some embodiments, the AAV particle comprises a viral genome comprising SEQ ID NO: 2212 and a VOY201 capsid. In some embodiments, the AAV particle comprises a viral genome comprising SEQ ID NO: 2212 and an AAV9 capsid. In some embodiments, the AAV particle comprises a viral genome comprising SEQ ID NO: 2212 and an AAV9K449R capsid. In some embodiments, the AAV particle comprises a viral genome comprising SEQ ID NO: 2212 and an AAVPHP.B capsid. In some embodiments, the AAV particle comprises a viral genome comprising SEQ ID NO: 2212 and an AAVPHP.N capsid. In some embodiments, the AAV particle comprises a viral genome comprising SEQ ID NO: 2212 and an AAV2 variant capsid. In some embodiments, the AAV particle comprises a viral genome comprising SEQ ID NO: 2212 and an AAV2/3 variant capsid. In some embodiments, the AAV particle comprises a viral genome comprising SEQ ID NO: 2212 and a capsid comprising SEQ ID NO: 1. In some embodiments, the AAV particle comprises a viral genome comprising SEQ ID NO: 2212 and a capsid encoded by a nucleic acid sequence comprising SEQ ID NO: 2. In some embodiments, the AAV particle comprises a viral genome comprising SEQ ID NO: 2212 and a capsid comprising SEQ ID NO: 4534. In some embodiments, the AAV particle comprises a viral genome comprising SEQ ID NO: 2212 and a capsid encoded by a nucleic acid sequence comprising SEQ ID NO: 3. In some embodiments, the AAV particle comprises a viral genome comprising SEQ ID NO: 2212 and a capsid comprising SEQ ID NO: 138. In some embodiments, the AAV particle comprises a viral genome comprising SEQ ID NO: 2212 and a capsid encoded by a nucleic acid sequence comprising SEQ ID NO: 137. In some embodiments, the AAV particle comprises a viral genome comprising SEQ ID NO: 2212 and a capsid comprising SEQ ID NO: 5. In some embodiments, the AAV particle comprises a viral genome comprising SEQ ID NO: 2212 and a capsid encoded by a nucleic acid sequence comprising SEQ ID NO: 6. In some embodiments, the AAV particle comprises a viral genome comprising SEQ ID NO: 2212 and a capsid comprising SEQ ID NO: 4. In some embodiments, the AAV particle comprises a viral genome comprising SEQ ID NO: 2212 and a capsid comprising SEQ ID NO: 11. In some embodiments, the AAV particle comprises a viral genome comprising SEQ ID NO: 2212 and a capsid comprising SEQ ID NO: 2679. In some embodiments, the AAV particle comprises a viral genome comprising SEQ ID NO: 2212 and a capsid comprising SEQ ID NO: 2809. In some embodiments, the AAV particle comprises a viral genome comprising SEQ ID NO: 2212 and a capsid comprising SEQ ID NO: 2871.

[0909] In some embodiments, the AAV particle comprises a viral genome comprising SEQ ID NO: 2213 and a VOY101 capsid. In some embodiments, the AAV particle comprises a viral genome comprising SEQ ID NO: 2213 and a VOY201 capsid. In some embodiments, the AAV particle comprises a viral genome comprising SEQ ID NO: 2213 and an AAV9 capsid. In some embodiments, the AAV particle comprises a viral genome comprising SEQ ID NO: 2213 and an AAV9K449R capsid. In some embodiments, the AAV particle comprises a viral genome comprising SEQ ID NO: 2213 and an AAVPHP.B capsid. In some embodiments, the AAV particle comprises a viral genome comprising SEQ ID NO: 2213 and an AAVPHP.N capsid. In some embodiments, the AAV particle comprises a viral genome comprising SEQ ID NO: 2213 and an AAV2 variant capsid. In some embodiments, the AAV particle comprises a viral genome comprising SEQ ID NO: 2213 and an AAV2/3 variant capsid. In some embodiments, the AAV particle comprises a viral genome comprising SEQ ID NO: 2213 and a capsid comprising SEQ ID NO: 1. In some embodiments, the AAV particle comprises a viral genome comprising SEQ ID NO: 2213 and a capsid encoded by a nucleic acid sequence comprising SEQ ID NO: 2. In some embodiments, the AAV particle comprises a viral genome comprising SEQ ID NO: 2213 and a capsid comprising SEQ ID NO: 4534. In some embodiments, the AAV particle comprises a viral genome comprising SEQ ID NO: 2213 and a capsid encoded by a nucleic acid sequence comprising SEQ ID NO: 3. In some embodiments, the AAV particle comprises a viral genome comprising SEQ ID NO: 2213 and a capsid comprising SEQ ID NO: 138. In some embodiments, the AAV particle comprises a viral genome comprising SEQ ID NO: 2213 and a capsid encoded by a nucleic acid sequence comprising SEQ ID NO: 137. In some embodiments, the AAV particle comprises a viral genome comprising SEQ ID NO: 2213 and a capsid comprising SEQ ID NO: 5. In some embodiments, the AAV particle comprises a viral genome comprising SEQ ID NO: 2213 and a capsid encoded by a nucleic acid sequence comprising SEQ ID NO: 6. In some embodiments, the AAV particle comprises a viral genome comprising SEQ ID NO: 2213 and a capsid comprising SEQ ID NO: 4. In some embodiments, the AAV particle comprises a viral genome comprising SEQ ID NO: 2213 and a capsid comprising SEQ ID NO: 11. In some embodiments, the AAV particle comprises a viral genome comprising SEQ ID NO: 2213 and a capsid comprising SEQ ID NO: 2679. In some embodiments, the AAV particle comprises a viral genome comprising SEQ ID NO: 2213 and a capsid comprising SEQ ID NO: 2809. In some embodiments, the AAV particle comprises a viral genome comprising SEQ ID NO: 2213 and a capsid comprising SEQ ID NO: 2871.

[0910] In some embodiments, the AAV particle comprises a viral genome comprising SEQ ID NO: 2214 and a VOY101 capsid. In some embodiments, the AAV particle comprises a viral genome comprising SEQ ID NO: 2214 and a VOY201 capsid. In some embodiments, the AAV particle comprises a viral genome comprising SEQ ID NO: 2214 and an AAV9 capsid. In some embodiments, the AAV particle comprises a viral genome comprising SEQ ID NO: 2214 and an AAV9K449R capsid. In some embodiments, the AAV particle comprises a viral genome comprising SEQ ID NO: 2214 and an AAVPHP.B capsid. In some embodiments, the AAV particle comprises a viral genome comprising SEQ ID NO: 2214 and an AAVPHP.N capsid. In some embodiments, the AAV particle comprises a viral genome comprising SEQ ID NO: 2214 and an AAV2 variant capsid. In some embodiments, the AAV particle comprises a viral genome comprising SEQ ID NO: 2214 and an AAV2/3 variant capsid. In some embodiments, the AAV particle comprises a viral genome comprising SEQ ID NO: 2214 and a capsid comprising SEQ ID NO: 1. In some embodiments, the AAV particle comprises a viral genome comprising SEQ ID NO: 2214 and a capsid encoded by a nucleic acid sequence comprising SEQ ID NO: 2. In some embodiments, the AAV particle comprises a viral genome comprising SEQ ID NO: 2214 and a capsid comprising SEQ ID NO: 4534. In some embodiments, the AAV particle comprises a viral genome comprising SEQ ID NO: 2214 and a capsid encoded by a nucleic acid sequence comprising SEQ ID NO: 3. In some embodiments, the AAV particle comprises a viral genome comprising SEQ ID NO: 2214 and a capsid comprising SEQ ID NO: 138. In some embodiments, the AAV particle comprises a viral genome comprising SEQ ID NO: 2214 and a capsid encoded by a nucleic acid sequence comprising SEQ ID NO: 137. In some embodiments, the AAV particle comprises a viral genome comprising SEQ ID NO: 2214 and a capsid comprising SEQ ID NO: 5. In some embodiments, the AAV particle comprises a viral genome comprising SEQ ID NO: 2214 and a capsid encoded by a nucleic acid sequence comprising SEQ ID NO: 6. In some embodiments, the AAV particle comprises a viral genome comprising SEQ ID NO: 2214 and a capsid comprising SEQ ID NO: 4. In some embodiments, the AAV particle comprises a viral genome comprising SEQ ID NO: 2214 and a capsid comprising SEQ ID NO: 11. In some embodiments, the AAV particle comprises a viral genome comprising SEQ ID NO: 2214 and a capsid comprising SEQ ID NO: 2679. In some embodiments, the AAV particle comprises a viral genome comprising SEQ ID NO: 2214 and a capsid comprising SEQ ID NO: 2809. In some embodiments, the AAV particle comprises a viral genome comprising SEQ ID NO: 2214 and a capsid comprising SEQ ID NO: 2871.

[0911] In some embodiments, the AAV particle comprises a viral genome comprising SEQ ID NO: 2215 and a VOY101 capsid. In some embodiments, the AAV particle comprises a viral genome comprising SEQ ID NO: 2215 and a VOY201 capsid. In some embodiments, the AAV particle comprises a viral genome comprising SEQ ID NO: 2215 and an AAV9 capsid. In some embodiments, the AAV particle comprises a viral genome comprising SEQ ID NO: 2215 and an AAV9K449R capsid. In some embodiments, the AAV particle comprises a viral genome comprising SEQ ID NO: 2215 and an AAVPHP.B capsid. In some embodiments, the AAV particle comprises a viral genome comprising SEQ ID NO: 2215 and an AAVPHP.N capsid. In some embodiments, the AAV particle comprises a viral genome comprising SEQ ID NO: 2215 and an AAV2 variant capsid. In some embodiments, the AAV particle comprises a viral genome comprising SEQ ID NO: 2215 and an AAV2/3 variant capsid. In some embodiments, the AAV particle comprises a viral genome comprising SEQ ID NO: 2215 and a capsid comprising SEQ ID NO: 1. In some embodiments, the AAV particle comprises a viral genome comprising SEQ ID NO: 2215 and a capsid encoded by a nucleic acid sequence comprising SEQ ID NO: 2. In some embodiments, the AAV particle comprises a viral genome comprising SEQ ID NO: 2215 and a capsid comprising SEQ ID NO: 4534. In some embodiments, the AAV particle comprises a viral genome comprising SEQ ID NO: 2215 and a capsid encoded by a nucleic acid sequence comprising SEQ ID NO: 3. In some embodiments, the AAV particle comprises a viral genome comprising SEQ ID NO: 2215 and a capsid comprising SEQ ID NO: 138. In some embodiments, the AAV particle comprises a viral genome comprising SEQ ID NO: 2215 and a capsid encoded by a nucleic acid sequence comprising SEQ ID NO: 137. In some embodiments, the AAV particle comprises a viral genome comprising SEQ ID NO: 2215 and a capsid comprising SEQ ID NO: 5. In some embodiments, the AAV particle comprises a viral genome comprising SEQ ID NO: 2215 and a capsid encoded by a nucleic acid sequence comprising SEQ ID NO: 6. In some embodiments, the AAV particle comprises a viral genome comprising SEQ ID NO: 2215 and a capsid comprising SEQ ID NO: 4. In some embodiments, the AAV particle comprises a viral genome comprising SEQ ID NO: 2215 and a capsid comprising SEQ ID NO: 11. In some embodiments, the AAV particle comprises a viral genome comprising SEQ ID NO: 2215 and a capsid comprising SEQ ID NO: 2679. In some embodiments, the AAV particle comprises a viral genome comprising SEQ ID NO: 2215 and a capsid comprising SEQ ID NO: 2809. In some embodiments, the AAV particle comprises a viral genome comprising SEQ ID NO: 2215 and a capsid comprising SEQ ID NO: 2871.

[0912] In some embodiments, the AAV particle comprises a viral genome comprising SEQ ID NO: 2216 and a VOY101 capsid. In some embodiments, the AAV particle comprises a viral genome comprising SEQ ID NO: 2216 and a VOY201 capsid. In some embodiments, the AAV particle comprises a viral genome comprising SEQ ID NO: 2216 and an AAV9 capsid. In some embodiments, the AAV particle comprises a viral genome comprising SEQ ID NO: 2216 and an AAV9K449R capsid. In some embodiments, the AAV particle comprises a viral genome comprising SEQ ID NO: 2216 and an AAVPHP.B capsid. In some embodiments, the AAV particle comprises a viral genome comprising SEQ ID NO: 2216 and an AAVPHP.N capsid. In some embodiments, the AAV particle comprises a viral genome comprising SEQ ID NO: 2216 and an AAV2 variant capsid. In some embodiments, the AAV particle comprises a viral genome comprising SEQ ID NO: 2216 and an AAV2/3 variant capsid. In some embodiments, the AAV particle comprises a viral genome comprising SEQ ID NO: 2216 and a capsid comprising SEQ ID NO: 1. In some embodiments, the AAV particle comprises a viral genome comprising SEQ ID NO: 2216 and a capsid encoded by a nucleic acid sequence comprising SEQ ID NO: 2. In some embodiments, the AAV particle comprises a viral genome comprising SEQ ID NO: 2216 and a capsid comprising SEQ ID NO: 4534. In some embodiments, the AAV particle comprises a viral genome comprising SEQ ID NO: 2216 and a capsid encoded by a nucleic acid sequence comprising SEQ ID NO: 3. In some embodiments, the AAV particle comprises a viral genome comprising SEQ ID NO: 2216 and a capsid comprising SEQ ID NO: 138. In some embodiments, the AAV particle comprises a viral genome comprising SEQ ID NO: 2216 and a capsid encoded by a nucleic acid sequence comprising SEQ ID NO: 137. In some embodiments, the AAV particle comprises a viral genome comprising SEQ ID NO: 2216 and a capsid comprising SEQ ID NO: 5. In some embodiments, the AAV particle comprises a viral genome comprising SEQ ID NO: 2216 and a capsid encoded by a nucleic acid sequence comprising SEQ ID NO: 6. In some embodiments, the AAV particle comprises a viral genome comprising SEQ ID NO: 2216 and a capsid comprising SEQ ID NO: 4. In some embodiments, the AAV particle comprises a viral genome comprising SEQ ID NO: 2216 and a capsid comprising SEQ ID NO: 11. In some embodiments, the AAV particle comprises a viral genome comprising SEQ ID NO: 2216 and a capsid comprising SEQ ID NO: 2679. In some embodiments, the AAV particle comprises a viral genome comprising SEQ ID NO: 2216 and a capsid comprising SEQ ID NO: 2809. In some embodiments, the AAV particle comprises a viral genome comprising SEQ ID NO: 2216 and a capsid comprising SEQ ID NO: 2871.

[0913] In some embodiments, the AAV particle comprises a viral genome comprising SEQ ID NO: 2217 and a VOY101 capsid. In some embodiments, the AAV particle comprises a viral genome comprising SEQ ID NO: 2217 and a VOY201 capsid. In some embodiments, the AAV particle comprises a viral genome comprising SEQ ID NO: 2217 and an AAV9 capsid. In some embodiments, the AAV particle comprises a viral genome comprising SEQ ID NO: 2217 and an AAV9K449R capsid. In some embodiments, the AAV particle comprises a viral genome comprising SEQ ID NO: 2217 and an AAVPHP.B capsid. In some embodiments, the AAV particle comprises a viral genome comprising SEQ ID NO: 2217 and an AAVPHP.N capsid. In some embodiments, the AAV particle comprises a viral genome comprising SEQ ID NO: 2217 and an AAV2 variant capsid. In some embodiments, the AAV particle comprises a viral genome comprising SEQ ID NO: 2217 and an AAV2/3 variant capsid. In some embodiments, the AAV particle comprises a viral genome comprising SEQ ID NO: 2217 and a capsid comprising SEQ ID NO: 1. In some embodiments, the AAV particle comprises a viral genome comprising SEQ ID NO: 2217 and a capsid encoded by a nucleic acid sequence comprising SEQ ID NO: 2. In some embodiments, the AAV particle comprises a viral genome comprising SEQ ID NO: 2217 and a capsid comprising SEQ ID NO: 4534. In some embodiments, the AAV particle comprises a viral genome comprising SEQ ID NO: 2217 and a capsid encoded by a nucleic acid sequence comprising SEQ ID NO: 3. In some embodiments, the AAV particle comprises a viral genome comprising SEQ ID NO: 2217 and a capsid comprising SEQ ID NO: 138. In some embodiments, the AAV particle comprises a viral genome comprising SEQ ID NO: 2217 and a capsid encoded by a nucleic acid sequence comprising SEQ ID NO: 137. In some embodiments, the AAV particle comprises a viral genome comprising SEQ ID NO: 2217 and a capsid comprising SEQ ID NO: 5. In some embodiments, the AAV particle comprises a viral genome comprising SEQ ID NO: 2217 and a capsid encoded by a nucleic acid sequence comprising SEQ ID NO: 6. In some embodiments, the AAV particle comprises a viral genome comprising SEQ ID NO: 2217 and a capsid comprising SEQ ID NO: 4. In some embodiments, the AAV particle comprises a viral genome comprising SEQ ID NO: 2217 and a capsid comprising SEQ ID NO: 11. In some embodiments, the AAV particle comprises a viral genome comprising SEQ ID NO: 2217 and a capsid comprising SEQ ID NO: 2679. In some embodiments, the AAV particle comprises a viral genome comprising SEQ ID NO: 2217 and a capsid comprising SEQ ID NO: 2809. In some embodiments, the AAV particle comprises a viral genome comprising SEQ ID NO: 2217 and a capsid comprising SEQ ID NO: 2871.

[0914] In some embodiments, the AAV particle comprises a viral genome comprising SEQ ID NO: 2218 and a VOY101 capsid. In some embodiments, the AAV particle comprises a viral genome comprising SEQ ID NO: 2218 and a VOY201 capsid. In some embodiments, the AAV particle comprises a viral genome comprising SEQ ID NO: 2218 and an AAV9 capsid. In some embodiments, the AAV particle comprises a viral genome comprising SEQ ID NO: 2218 and an AAV9K449R capsid. In some embodiments, the AAV particle comprises a viral genome comprising SEQ ID NO: 2218 and an AAVPHP.B capsid. In some embodiments, the AAV particle comprises a viral genome comprising SEQ ID NO: 2218 and an AAVPHP.N capsid. In some embodiments, the AAV particle comprises a viral genome comprising SEQ ID NO: 2218 and an AAV2 variant capsid. In some embodiments, the AAV particle comprises a viral genome comprising SEQ ID NO: 2218 and an AAV2/3 variant capsid. In some embodiments, the AAV particle comprises a viral genome comprising SEQ ID NO: 2218 and a capsid comprising SEQ ID NO: 1. In some embodiments, the AAV particle comprises a viral genome comprising SEQ ID NO: 2218 and a capsid encoded by a nucleic acid sequence comprising SEQ ID NO: 2. In some embodiments, the AAV particle comprises a viral genome comprising SEQ ID NO: 2218 and a capsid comprising SEQ ID NO: 4534. In some embodiments, the AAV particle comprises a viral genome comprising SEQ ID NO: 2218 and a capsid encoded by a nucleic acid sequence comprising SEQ ID NO: 3. In some embodiments, the AAV particle comprises a viral genome comprising SEQ ID NO: 2218 and a capsid comprising SEQ ID NO: 138. In some embodiments, the AAV particle comprises a viral genome comprising SEQ ID NO: 2218 and a capsid encoded by a nucleic acid sequence comprising SEQ ID NO: 137. In some embodiments, the AAV particle comprises a viral genome comprising SEQ ID NO: 2218 and a capsid comprising SEQ ID NO: 5. In some embodiments, the AAV particle comprises a viral genome comprising SEQ ID NO: 2218 and a capsid encoded by a nucleic acid sequence comprising SEQ ID NO: 6. In some embodiments, the AAV particle comprises a viral genome comprising SEQ ID NO: 2218 and a capsid comprising SEQ ID NO: 4. In some embodiments, the AAV particle comprises a viral genome comprising SEQ ID NO: 2218 and a capsid comprising SEQ ID NO: 11. In some embodiments, the AAV particle comprises a viral genome comprising SEQ ID NO: 2218 and a capsid comprising SEQ ID NO: 2679. In some embodiments, the AAV particle comprises a viral genome comprising SEQ ID NO: 2218 and a capsid comprising SEQ ID NO: 2809. In some embodiments, the AAV particle comprises a viral genome comprising SEQ ID NO: 2218 and a capsid comprising SEQ ID NO: 2871.

[0915] In some embodiments, the AAV particle comprises a viral genome comprising SEQ ID NO: 2219 and a VOY101 capsid. In some embodiments, the AAV particle comprises a viral genome comprising SEQ ID NO: 2219 and a VOY201 capsid. In some embodiments, the AAV particle comprises a viral genome comprising SEQ ID NO: 2219 and an AAV9 capsid. In some embodiments, the AAV particle comprises a viral genome comprising SEQ ID NO: 2219 and an AAV9K449R capsid. In some embodiments, the AAV particle comprises a viral genome comprising SEQ ID NO: 2219 and an AAVPHP.B capsid. In some embodiments, the AAV particle comprises a viral genome comprising SEQ ID NO: 2219 and an AAVPHP.N capsid. In some embodiments, the AAV particle comprises a viral genome comprising SEQ ID NO: 2219 and an AAV2 variant capsid. In some embodiments, the AAV particle comprises a viral genome comprising SEQ ID NO: 2219 and an AAV2/3 variant capsid. In some embodiments, the AAV particle comprises a viral genome comprising SEQ ID NO: 2219 and a capsid comprising SEQ ID NO: 1. In some embodiments, the AAV particle comprises a viral genome comprising SEQ ID NO: 2219 and a capsid encoded by a nucleic acid sequence comprising SEQ ID NO: 2. In some embodiments, the AAV particle comprises a viral genome comprising SEQ ID NO: 2219 and a capsid comprising SEQ ID NO: 4534. In some embodiments, the AAV particle comprises a viral genome comprising SEQ ID NO: 2219 and a capsid encoded by a nucleic acid sequence comprising SEQ ID NO: 3. In some embodiments, the AAV particle comprises a viral genome comprising SEQ ID NO: 2219 and a capsid comprising SEQ ID NO: 138. In some embodiments, the AAV particle comprises a viral genome comprising SEQ ID NO: 2219 and a capsid encoded by a nucleic acid sequence comprising SEQ ID NO: 137. In some embodiments, the AAV particle comprises a viral genome comprising SEQ ID NO: 2219 and a capsid comprising SEQ ID NO: 5. In some embodiments, the AAV particle comprises a viral genome comprising SEQ ID NO: 2219 and a capsid encoded by a nucleic acid sequence comprising SEQ ID NO: 6. In some embodiments, the AAV particle comprises a viral genome comprising SEQ ID NO: 2219 and a capsid comprising SEQ ID NO: 4. In some embodiments, the AAV particle comprises a viral genome comprising SEQ ID NO: 2219 and a capsid comprising SEQ ID NO: 11. In some embodiments, the AAV particle comprises a viral genome comprising SEQ ID NO: 2219 and a capsid comprising SEQ ID NO: 2679. In some embodiments, the AAV particle comprises a viral genome comprising SEQ ID NO: 2219 and a capsid comprising SEQ ID NO: 2809. In some embodiments, the AAV particle comprises a viral genome comprising SEQ ID NO: 2219 and a capsid comprising SEQ ID NO: 2871.

[0916] In some embodiments, the AAV particle comprises a viral genome comprising SEQ ID NO: 2220 and a VOY101 capsid. In some embodiments, the AAV particle comprises a viral genome comprising SEQ ID NO: 2220 and a VOY201 capsid. In some embodiments, the AAV particle comprises a viral genome comprising SEQ ID NO: 2220 and an AAV9 capsid. In some embodiments, the AAV particle comprises a viral genome comprising SEQ ID NO: 2220 and an AAV9K449R capsid. In some embodiments, the AAV particle comprises a viral genome comprising SEQ ID NO: 2220 and an AAVPHP.B capsid. In some embodiments, the AAV particle comprises a viral genome comprising SEQ ID NO: 2220 and an AAVPHP.N capsid. In some embodiments, the AAV particle comprises a viral genome comprising SEQ ID NO: 2220 and an AAV2 variant capsid. In some embodiments, the AAV particle comprises a viral genome comprising SEQ ID NO: 2220 and an AAV2/3 variant capsid. In some embodiments, the AAV particle comprises a viral genome comprising SEQ ID NO: 2220 and a capsid comprising SEQ ID NO: 1. In some embodiments, the AAV particle comprises a viral genome comprising SEQ ID NO: 2220 and a capsid encoded by a nucleic acid sequence comprising SEQ ID NO: 2. In some embodiments, the AAV particle comprises a viral genome comprising SEQ ID NO: 2220 and a capsid comprising SEQ ID NO: 4534. In some embodiments, the AAV particle comprises a viral genome comprising SEQ ID NO: 2220 and a capsid encoded by a nucleic acid sequence comprising SEQ ID NO: 3. In some embodiments, the AAV particle comprises a viral genome comprising SEQ ID NO: 2220 and a capsid comprising SEQ ID NO: 138. In some embodiments, the AAV particle comprises a viral genome comprising SEQ ID NO: 2220 and a capsid encoded by a nucleic acid sequence comprising SEQ ID NO: 137. In some embodiments, the AAV particle comprises a viral genome comprising SEQ ID NO: 2220 and a capsid comprising SEQ ID NO: 5. In some embodiments, the AAV particle comprises a viral genome comprising SEQ ID NO: 2220 and a capsid encoded by a nucleic acid sequence comprising SEQ ID NO: 6. In some embodiments, the AAV particle comprises a viral genome comprising SEQ ID NO: 2220 and a capsid comprising SEQ ID NO: 4. In some embodiments, the AAV particle comprises a viral genome comprising SEQ ID NO: 2220 and a capsid comprising SEQ ID NO: 11. In some embodiments, the AAV particle comprises a viral genome comprising SEQ ID NO: 2220 and a capsid comprising SEQ ID NO: 2679. In some embodiments, the AAV particle comprises a viral genome comprising SEQ ID NO: 2220 and a capsid comprising SEQ ID NO: 2809. In some embodiments, the AAV particle comprises a viral genome comprising SEQ ID NO: 2220 and a capsid comprising SEQ ID NO: 2871.

[0917] In some embodiments, the AAV particle comprises a viral genome comprising SEQ ID NO: 2221 and a VOY101 capsid. In some embodiments, the AAV particle comprises a viral genome comprising SEQ ID NO: 2221 and a VOY201 capsid. In some embodiments, the AAV particle comprises a viral genome comprising SEQ ID NO: 2221 and an AAV9 capsid. In some embodiments, the AAV particle comprises a viral genome comprising SEQ ID NO: 2221 and an AAV9K449R capsid. In some embodiments, the AAV particle comprises a viral genome comprising SEQ ID NO: 2221 and an AAVPHP.B capsid. In some embodiments, the AAV particle comprises a viral genome comprising SEQ ID NO: 2221 and an AAVPHP.N capsid. In some embodiments, the AAV particle comprises a viral genome comprising SEQ ID NO: 2221 and an AAV2 variant capsid. In some embodiments, the AAV particle comprises a viral genome comprising SEQ ID NO: 2221 and an AAV2/3 variant capsid. In some embodiments, the AAV particle comprises a viral genome comprising SEQ ID NO: 2221 and a capsid comprising SEQ ID NO: 1. In some embodiments, the AAV particle comprises a viral genome comprising SEQ ID NO: 2221 and a capsid encoded by a nucleic acid sequence comprising SEQ ID NO: 2. In some embodiments, the AAV particle comprises a viral genome comprising SEQ ID NO: 2221 and a capsid comprising SEQ ID NO: 4534. In some embodiments, the AAV particle comprises a viral genome comprising SEQ ID NO: 2221 and a capsid encoded by a nucleic acid sequence comprising SEQ ID NO: 3. In some embodiments, the AAV particle comprises a viral genome comprising SEQ ID NO: 2221 and a capsid comprising SEQ ID NO: 138. In some embodiments, the AAV particle comprises a viral genome comprising SEQ ID NO: 2221 and a capsid encoded by a nucleic acid sequence comprising SEQ ID NO: 137. In some embodiments, the AAV particle comprises a viral genome comprising SEQ ID NO: 2221 and a capsid comprising SEQ ID NO: 5. In some embodiments, the AAV particle comprises a viral genome comprising SEQ ID NO: 2221 and a capsid encoded by a nucleic acid sequence comprising SEQ ID NO: 6. In some embodiments, the AAV particle comprises a viral genome comprising SEQ ID NO: 2221 and a capsid comprising SEQ ID NO: 4. In some embodiments, the AAV particle comprises a viral genome comprising SEQ ID NO: 2221 and a capsid comprising SEQ ID NO: 11. In some embodiments, the AAV particle comprises a viral genome comprising SEQ ID NO: 2221 and a capsid comprising SEQ ID NO: 2679. In some embodiments, the AAV particle comprises a viral genome comprising SEQ ID NO: 2221 and a capsid comprising SEQ ID NO: 2809. In some embodiments, the AAV particle comprises a viral genome comprising SEQ ID NO: 2221 and a capsid comprising SEQ ID NO: 2871.

[0918] In some embodiments, the AAV particle comprises a viral genome comprising SEQ ID NO: 2222 and a VOY101 capsid. In some embodiments, the AAV particle comprises a viral genome comprising SEQ ID NO: 2222 and a VOY201 capsid. In some embodiments, the AAV particle comprises a viral genome comprising SEQ ID NO: 2222 and an AAV9 capsid. In some embodiments, the AAV particle comprises a viral genome comprising SEQ ID NO: 2222 and an AAV9K449R capsid. In some embodiments, the AAV particle comprises a viral genome comprising SEQ ID NO: 2222 and an AAVPHP.B capsid. In some embodiments, the AAV particle comprises a viral genome comprising SEQ ID NO: 2222 and an AAVPHP.N capsid. In some embodiments, the AAV particle comprises a viral genome comprising SEQ ID NO: 2222 and an AAV2 variant capsid. In some embodiments, the AAV particle comprises a viral genome comprising SEQ ID NO: 2222 and an AAV2/3 variant capsid. In some embodiments, the AAV particle comprises a viral genome comprising SEQ ID NO: 2222 and a capsid comprising SEQ ID NO: 1. In some embodiments, the AAV particle comprises a viral genome comprising SEQ ID NO: 2222 and a capsid encoded by a nucleic acid sequence comprising SEQ ID NO: 2. In some embodiments, the AAV particle comprises a viral genome comprising SEQ ID NO: 2222 and a capsid comprising SEQ ID NO: 4534. In some embodiments, the AAV particle comprises a viral genome comprising SEQ ID NO: 2222 and a capsid encoded by a nucleic acid sequence comprising SEQ ID NO: 3. In some embodiments, the AAV particle comprises a viral genome comprising SEQ ID NO: 2222 and a capsid comprising SEQ ID NO: 138. In some embodiments, the AAV particle comprises a viral genome comprising SEQ ID NO: 2222 and a capsid encoded by a nucleic acid sequence comprising SEQ ID NO: 137. In some embodiments, the AAV particle comprises a viral genome comprising SEQ ID NO: 2222 and a capsid comprising SEQ ID NO: 5. In some embodiments, the AAV particle comprises a viral genome comprising SEQ ID NO: 2222 and a capsid encoded by a nucleic acid sequence comprising SEQ ID NO: 6. In some embodiments, the AAV particle comprises a viral genome comprising SEQ ID NO: 2222 and a capsid comprising SEQ ID NO: 4. In some embodiments, the AAV particle comprises a viral genome comprising SEQ ID NO: 2222 and a capsid comprising SEQ ID NO: 11. In some embodiments, the AAV particle comprises a viral genome comprising SEQ ID NO: 2222 and a capsid comprising SEQ ID NO: 2679. In some embodiments, the AAV particle comprises a viral genome comprising SEQ ID NO: 2222 and a capsid comprising SEQ ID NO: 2809. In some embodiments, the AAV particle comprises a viral genome comprising SEQ ID NO: 2222 and a capsid comprising SEQ ID NO: 2871.

[0919] In some embodiments, the AAV particle comprises a viral genome comprising SEQ ID NO: 2223 and a VOY101 capsid. In some embodiments, the AAV particle comprises a viral genome comprising SEQ ID NO: 2223 and a VOY201 capsid. In some embodiments, the AAV particle comprises a viral genome comprising SEQ ID NO: 2223 and an AAV9 capsid. In some embodiments, the AAV particle comprises a viral genome comprising SEQ ID NO: 2223 and an AAV9K449R capsid. In some embodiments, the AAV particle comprises a viral genome comprising SEQ ID NO: 2223 and an AAVPHP.B capsid. In some embodiments, the AAV particle comprises a viral genome comprising SEQ ID NO: 2223 and an AAVPHP.N capsid. In some embodiments, the AAV particle comprises a viral genome comprising SEQ ID NO: 2223 and an AAV2 variant capsid. In some embodiments, the AAV particle comprises a viral genome comprising SEQ ID NO: 2223 and an AAV2/3 variant capsid. In some embodiments, the AAV particle comprises a viral genome comprising SEQ ID NO: 2223 and a capsid comprising SEQ ID NO: 1. In some embodiments, the AAV particle comprises a viral genome comprising SEQ ID NO: 2223 and a capsid encoded by a nucleic acid sequence comprising SEQ ID NO: 2. In some embodiments, the AAV particle comprises a viral genome comprising SEQ ID NO: 2223 and a capsid comprising SEQ ID NO: 4534. In some embodiments, the AAV particle comprises a viral genome comprising SEQ ID NO: 2223 and a capsid encoded by a nucleic acid sequence comprising SEQ ID NO: 3. In some embodiments, the AAV particle comprises a viral genome comprising SEQ ID NO: 2223 and a capsid comprising SEQ ID NO: 138. In some embodiments, the AAV particle comprises a viral genome comprising SEQ ID NO: 2223 and a capsid encoded by a nucleic acid sequence comprising SEQ ID NO: 137. In some embodiments, the AAV particle comprises a viral genome comprising SEQ ID NO: 2223 and a capsid comprising SEQ ID NO: 5. In some embodiments, the AAV particle comprises a viral genome comprising SEQ ID NO: 2223 and a capsid encoded by a nucleic acid sequence comprising SEQ ID NO: 6. In some embodiments, the AAV particle comprises a viral genome comprising SEQ ID NO: 2223 and a capsid comprising SEQ ID NO: 4. In some embodiments, the AAV particle comprises a viral genome comprising SEQ ID NO: 2223 and a capsid comprising SEQ ID NO: 11. In some embodiments, the AAV particle comprises a viral genome comprising SEQ ID NO: 2223 and a capsid comprising SEQ ID NO: 2679. In some embodiments, the AAV particle comprises a viral genome comprising SEQ ID NO: 2223 and a capsid comprising SEQ ID NO: 2809. In some embodiments, the AAV particle comprises a viral genome comprising SEQ ID NO: 2223 and a capsid comprising SEQ ID NO: 2871.

[0920] In some embodiments, the AAV particle comprises a viral genome comprising SEQ ID NO: 2224 and a VOY101 capsid. In some embodiments, the AAV particle comprises a viral genome comprising SEQ ID NO: 2224 and a VOY201 capsid. In some embodiments, the AAV particle comprises a viral genome comprising SEQ ID NO: 2224 and an AAV9 capsid. In some embodiments, the AAV particle comprises a viral genome comprising SEQ ID NO: 2224 and an AAV9K449R capsid. In some embodiments, the AAV particle comprises a viral genome comprising SEQ ID NO: 2224 and an AAVPHP.B capsid. In some embodiments, the AAV particle comprises a viral genome comprising SEQ ID NO: 2224 and an AAVPHP.N capsid. In some embodiments, the AAV particle comprises a viral genome comprising SEQ ID NO: 2224 and an AAV2 variant capsid. In some embodiments, the AAV particle comprises a viral genome comprising SEQ ID NO: 2224 and an AAV2/3 variant capsid. In some embodiments, the AAV particle comprises a viral genome comprising SEQ ID NO: 2224 and a capsid comprising SEQ ID NO: 1. In some embodiments, the AAV particle comprises a viral genome comprising SEQ ID NO: 2224 and a capsid encoded by a nucleic acid sequence comprising SEQ ID NO: 2. In some embodiments, the AAV particle comprises a viral genome comprising SEQ ID NO: 2224 and a capsid comprising SEQ ID NO: 4534. In some embodiments, the AAV particle comprises a viral genome comprising SEQ ID NO: 2224 and a capsid encoded by a nucleic acid sequence comprising SEQ ID NO: 3. In some embodiments, the AAV particle comprises a viral genome comprising SEQ ID NO: 2224 and a capsid comprising SEQ ID NO: 138. In some embodiments, the AAV particle comprises a viral genome comprising SEQ ID NO: 2224 and a capsid encoded by a nucleic acid sequence comprising SEQ ID NO: 137. In some embodiments, the AAV particle comprises a viral genome comprising SEQ ID NO: 2224 and a capsid comprising SEQ ID NO: 5. In some embodiments, the AAV particle comprises a viral genome comprising SEQ ID NO: 2224 and a capsid encoded by a nucleic acid sequence comprising SEQ ID NO: 6. In some embodiments, the AAV particle comprises a viral genome comprising SEQ ID NO: 2224 and a capsid comprising SEQ ID NO: 4. In some embodiments, the AAV particle comprises a viral genome comprising SEQ ID NO: 2224 and a capsid comprising SEQ ID NO: 11. In some embodiments, the AAV particle comprises a viral genome comprising SEQ ID NO: 2224 and a capsid comprising SEQ ID NO: 2679. In some embodiments, the AAV particle comprises a viral genome comprising SEQ ID NO: 2224 and a capsid comprising SEQ ID NO: 2809. In some embodiments, the AAV particle comprises a viral genome comprising SEQ ID NO: 2224 and a capsid comprising SEQ ID NO: 2871.

[0921] In some embodiments, the AAV particle comprises a viral genome comprising SEQ ID NO: 2225 and a VOY101 capsid. In some embodiments, the AAV particle comprises a viral genome comprising SEQ ID NO: 2225 and a VOY201 capsid. In some embodiments, the AAV particle comprises a viral genome comprising SEQ ID NO: 2225 and an AAV9 capsid. In some embodiments, the AAV particle comprises a viral genome comprising SEQ ID NO: 2225 and an AAV9K449R capsid. In some embodiments, the AAV particle comprises a viral genome comprising SEQ ID NO: 2225 and an AAVPHP.B capsid. In some embodiments, the AAV particle comprises a viral genome comprising SEQ ID NO: 2225 and an AAVPHP.N capsid. In some embodiments, the AAV particle comprises a viral genome comprising SEQ ID NO: 2225 and an AAV2 variant capsid. In some embodiments, the AAV particle comprises a viral genome comprising SEQ ID NO: 2225 and an AAV2/3 variant capsid. In some embodiments, the AAV particle comprises a viral genome comprising SEQ ID NO: 2225 and a capsid comprising SEQ ID NO: 1. In some embodiments, the AAV particle comprises a viral genome comprising SEQ ID NO: 2225 and a capsid encoded by a nucleic acid sequence comprising SEQ ID NO: 2. In some embodiments, the AAV particle comprises a viral genome comprising SEQ ID NO: 2225 and a capsid comprising SEQ ID NO: 4534. In some embodiments, the AAV particle comprises a viral genome comprising SEQ ID NO: 2225 and a capsid encoded by a nucleic acid sequence comprising SEQ ID NO: 3. In some embodiments, the AAV particle comprises a viral genome comprising SEQ ID NO: 2225 and a capsid comprising SEQ ID NO: 138. In some embodiments, the AAV particle comprises a viral genome comprising SEQ ID NO: 2225 and a capsid encoded by a nucleic acid sequence comprising SEQ ID NO: 137. In some embodiments, the AAV particle comprises a viral genome comprising SEQ ID NO: 2225 and a capsid comprising SEQ ID NO: 5. In some embodiments, the AAV particle comprises a viral genome comprising SEQ ID NO: 2225 and a capsid encoded by a nucleic acid sequence comprising SEQ ID NO: 6. In some embodiments, the AAV particle comprises a viral genome comprising SEQ ID NO: 2225 and a capsid comprising SEQ ID NO: 4. In some embodiments, the AAV particle comprises a viral genome comprising SEQ ID NO: 2225 and a capsid comprising SEQ ID NO: 11. In some embodiments, the AAV particle comprises a viral genome comprising SEQ ID NO: 2225 and a capsid comprising SEQ ID NO: 2679. In some embodiments, the AAV particle comprises a viral genome comprising SEQ ID NO: 2225 and a capsid comprising SEQ ID NO: 2809. In some embodiments, the AAV particle comprises a viral genome comprising SEQ ID NO: 2225 and a capsid comprising SEQ ID NO: 2871.

[0922] In some embodiments, the AAV particle comprises a viral genome comprising SEQ ID NO: 2226 and a VOY101 capsid. In some embodiments, the AAV particle comprises a viral genome comprising SEQ ID NO: 2226 and a VOY201 capsid. In some embodiments, the AAV particle comprises a viral genome comprising SEQ ID NO: 2226 and an AAV9 capsid. In some embodiments, the AAV particle comprises a viral genome comprising SEQ ID NO: 2226 and an AAV9K449R capsid. In some embodiments, the AAV particle comprises a viral genome comprising SEQ ID NO: 2226 and an AAVPHP.B capsid. In some embodiments, the AAV particle comprises a viral genome comprising SEQ ID NO: 2226 and an AAVPHP.N capsid. In some embodiments, the AAV particle comprises a viral genome comprising SEQ ID NO: 2226 and an AAV2 variant capsid. In some embodiments, the AAV particle comprises a viral genome comprising SEQ ID NO: 2226 and an AAV2/3 variant capsid. In some embodiments, the AAV particle comprises a viral genome comprising SEQ ID NO: 2226 and a capsid comprising SEQ ID NO: 1. In some embodiments, the AAV particle comprises a viral genome comprising SEQ ID NO: 2226 and a capsid encoded by a nucleic acid sequence comprising SEQ ID NO: 2. In some embodiments, the AAV particle comprises a viral genome comprising SEQ ID NO: 2226 and a capsid comprising SEQ ID NO: 4534. In some embodiments, the AAV particle comprises a viral genome comprising SEQ ID NO: 2226 and a capsid encoded by a nucleic acid sequence comprising SEQ ID NO: 3. In some embodiments, the AAV particle comprises a viral genome comprising SEQ ID NO: 2226 and a capsid comprising SEQ ID NO: 138. In some embodiments, the AAV particle comprises a viral genome comprising SEQ ID NO: 2226 and a capsid encoded by a nucleic acid sequence comprising SEQ ID NO: 137. In some embodiments, the AAV particle comprises a viral genome comprising SEQ ID NO: 2226 and a capsid comprising SEQ ID NO: 5. In some embodiments, the AAV particle comprises a viral genome comprising SEQ ID NO: 2226 and a capsid encoded by a nucleic acid sequence comprising SEQ ID NO: 6. In some embodiments, the AAV particle comprises a viral genome comprising SEQ ID NO: 2226 and a capsid comprising SEQ ID NO: 4. In some embodiments, the AAV particle comprises a viral genome comprising SEQ ID NO: 2226 and a capsid comprising SEQ ID NO: 11. In some embodiments, the AAV particle comprises a viral genome comprising SEQ ID NO: 2226 and a capsid comprising SEQ ID NO: 2679. In some embodiments, the AAV particle comprises a viral genome comprising SEQ ID NO: 2226 and a capsid comprising SEQ ID NO: 2809. In some embodiments, the AAV particle comprises a viral genome comprising SEQ ID NO: 2226 and a capsid comprising SEQ ID NO: 2871.

[0923] In some embodiments, the AAV particle comprises a viral genome comprising SEQ ID NO: 2227 and a VOY101 capsid. In some embodiments, the AAV particle comprises a viral genome comprising SEQ ID NO: 2227 and a VOY201 capsid. In some embodiments, the AAV particle comprises a viral genome comprising SEQ ID NO: 2227 and an AAV9 capsid. In some embodiments, the AAV particle comprises a viral genome comprising SEQ ID NO: 2227 and an AAV9K449R capsid. In some embodiments, the AAV particle comprises a viral genome comprising SEQ ID NO: 2227 and an AAVPHP.B capsid. In some embodiments, the AAV particle comprises a viral genome comprising SEQ ID NO: 2227 and an AAVPHP.N capsid. In some embodiments, the AAV particle comprises a viral genome comprising SEQ ID NO: 2227 and an AAV2 variant capsid. In some embodiments, the AAV particle comprises a viral genome comprising SEQ ID NO: 2227 and an AAV2/3 variant capsid. In some embodiments, the AAV particle comprises a viral genome comprising SEQ ID NO: 2227 and a capsid comprising SEQ ID NO: 1. In some embodiments, the AAV particle comprises a viral genome comprising SEQ ID NO: 2227 and a capsid encoded by a nucleic acid sequence comprising SEQ ID NO: 2. In some embodiments, the AAV particle comprises a viral genome comprising SEQ ID NO: 2227 and a capsid comprising SEQ ID NO: 4534. In some embodiments, the AAV particle comprises a viral genome comprising SEQ ID NO: 2227 and a capsid encoded by a nucleic acid sequence comprising SEQ ID NO: 3. In some embodiments, the AAV particle comprises a viral genome comprising SEQ ID NO: 2227 and a capsid comprising SEQ ID NO: 138. In some embodiments, the AAV particle comprises a viral genome comprising SEQ ID NO: 2227 and a capsid encoded by a nucleic acid sequence comprising SEQ ID NO: 137. In some embodiments, the AAV particle comprises a viral genome comprising SEQ ID NO: 2227 and a capsid comprising SEQ ID NO: 5. In some embodiments, the AAV particle comprises a viral genome comprising SEQ ID NO: 2227 and a capsid encoded by a nucleic acid sequence comprising SEQ ID NO: 6. In some embodiments, the AAV particle comprises a viral genome comprising SEQ ID NO: 2227 and a capsid comprising SEQ ID NO: 4. In some embodiments, the AAV particle comprises a viral genome comprising SEQ ID NO: 2227 and a capsid comprising SEQ ID NO: 11. In some embodiments, the AAV particle comprises a viral genome comprising SEQ ID NO: 2227 and a capsid comprising SEQ ID NO: 2679. In some embodiments, the AAV particle comprises a viral genome comprising SEQ ID NO: 2227 and a capsid comprising SEQ ID NO: 2809. In some embodiments, the AAV particle comprises a viral genome comprising SEQ ID NO: 2227 and a capsid comprising SEQ ID NO: 2871.

[0924] In some embodiments, the AAV particle comprises a viral genome comprising SEQ ID NO: 2228 and a VOY101 capsid. In some embodiments, the AAV particle comprises a viral genome comprising SEQ ID NO: 2228 and a VOY201 capsid. In some embodiments, the AAV particle comprises a viral genome comprising SEQ ID NO: 2228 and an AAV9 capsid. In some embodiments, the AAV particle comprises a viral genome comprising SEQ ID NO: 2228 and an AAV9K449R capsid. In some embodiments, the AAV particle comprises a viral genome comprising SEQ ID NO: 2228 and an AAVPHP.B capsid. In some embodiments, the AAV particle comprises a viral genome comprising SEQ ID NO: 2228 and an AAVPHP.N capsid. In some embodiments, the AAV particle comprises a viral genome comprising SEQ ID NO: 2228 and an AAV2 variant capsid. In some embodiments, the AAV particle comprises a viral genome comprising SEQ ID NO: 2228 and an AAV2/3 variant capsid. In some embodiments, the AAV particle comprises a viral genome comprising SEQ ID NO: 2228 and a capsid comprising SEQ ID NO: 1. In some embodiments, the AAV particle comprises a viral genome comprising SEQ ID NO: 2228 and a capsid encoded by a nucleic acid sequence comprising SEQ ID NO: 2. In some embodiments, the AAV particle comprises a viral genome comprising SEQ ID NO: 2228 and a capsid comprising SEQ ID NO: 4534. In some embodiments, the AAV particle comprises a viral genome comprising SEQ ID NO: 2228 and a capsid encoded by a nucleic acid sequence comprising SEQ ID NO: 3. In some embodiments, the AAV particle comprises a viral genome comprising SEQ ID NO: 2228 and a capsid comprising SEQ ID NO: 138. In some embodiments, the AAV particle comprises a viral genome comprising SEQ ID NO: 2228 and a capsid encoded by a nucleic acid sequence comprising SEQ ID NO: 137. In some embodiments, the AAV particle comprises a viral genome comprising SEQ ID NO: 2228 and a capsid comprising SEQ ID NO: 5. In some embodiments, the AAV particle comprises a viral genome comprising SEQ ID NO: 2228 and a capsid encoded by a nucleic acid sequence comprising SEQ ID NO: 6. In some embodiments, the AAV particle comprises a viral genome comprising SEQ ID NO: 2228 and a capsid comprising SEQ ID NO: 4. In some embodiments, the AAV particle comprises a viral genome comprising SEQ ID NO: 2228 and a capsid comprising SEQ ID NO: 11. In some embodiments, the AAV particle comprises a viral genome comprising SEQ ID NO: 2228 and a capsid comprising SEQ ID NO: 2679. In some embodiments, the AAV particle comprises a viral genome comprising SEQ ID NO: 2228 and a capsid comprising SEQ ID NO: 2809. In some embodiments, the AAV particle comprises a viral genome comprising SEQ ID NO: 2228 and a capsid comprising SEQ ID NO: 2871.

[0925] In some embodiments, the AAV particle comprises a viral genome comprising SEQ ID NO: 2229 and a VOY101 capsid. In some embodiments, the AAV particle comprises a viral genome comprising SEQ ID NO: 2229 and a VOY201 capsid. In some embodiments, the AAV particle comprises a viral genome comprising SEQ ID NO: 2229 and an AAV9 capsid. In some embodiments, the AAV particle comprises a viral genome comprising SEQ ID NO: 2229 and an AAV9K449R capsid. In some embodiments, the AAV particle comprises a viral genome comprising SEQ ID NO: 2229 and an AAVPHP.B capsid. In some embodiments, the AAV particle comprises a viral genome comprising SEQ ID NO: 2229 and an AAVPHP.N capsid. In some embodiments, the AAV particle comprises a viral genome comprising SEQ ID NO: 2229 and an AAV2 variant capsid. In some embodiments, the AAV particle comprises a viral genome comprising SEQ ID NO: 2229 and an AAV2/3 variant capsid. In some embodiments, the AAV particle comprises a viral genome comprising SEQ ID NO: 2229 and a capsid comprising SEQ ID NO: 1. In some embodiments, the AAV particle comprises a viral genome comprising SEQ ID NO: 2229 and a capsid encoded by a nucleic acid sequence comprising SEQ ID NO: 2. In some embodiments, the AAV particle comprises a viral genome comprising SEQ ID NO: 2229 and a capsid comprising SEQ ID NO: 4534. In some embodiments, the AAV particle comprises a viral genome comprising SEQ ID NO: 2229 and a capsid encoded by a nucleic acid sequence comprising SEQ ID NO: 3. In some embodiments, the AAV particle comprises a viral genome comprising SEQ ID NO: 2229 and a capsid comprising SEQ ID NO: 138. In some embodiments, the AAV particle comprises a viral genome comprising SEQ ID NO: 2229 and a capsid encoded by a nucleic acid sequence comprising SEQ ID NO: 137. In some embodiments, the AAV particle comprises a viral genome comprising SEQ ID NO: 2229 and a capsid comprising SEQ ID NO: 5. In some embodiments, the AAV particle comprises a viral genome comprising SEQ ID NO: 2229 and a capsid encoded by a nucleic acid sequence comprising SEQ ID NO: 6. In some embodiments, the AAV particle comprises a viral genome comprising SEQ ID NO: 2229 and a capsid comprising SEQ ID NO: 4. In some embodiments, the AAV particle comprises a viral genome comprising SEQ ID NO: 2229 and a capsid comprising SEQ ID NO: 11. In some embodiments, the AAV particle comprises a viral genome comprising SEQ ID NO: 2229 and a capsid comprising SEQ ID NO: 2679. In some embodiments, the AAV particle comprises a viral genome comprising SEQ ID NO: 2229 and a capsid comprising SEQ ID NO: 2809. In some embodiments, the AAV particle comprises a viral genome comprising SEQ ID NO: 2229 and a capsid comprising SEQ ID NO: 2871.

[0926] In some embodiments, the AAV particle comprises a viral genome comprising SEQ ID NO: 2230 and a VOY101 capsid. In some embodiments, the AAV particle comprises a viral genome comprising SEQ ID NO: 2230 and a VOY201 capsid. In some embodiments, the AAV particle comprises a viral genome comprising SEQ ID NO: 2230 and an AAV9 capsid. In some embodiments, the AAV particle comprises a viral genome comprising SEQ ID NO: 2230 and an AAV9K449R capsid. In some embodiments, the AAV particle comprises a viral genome comprising SEQ ID NO: 2230 and an AAVPHP.B capsid. In some embodiments, the AAV particle comprises a viral genome comprising SEQ ID NO: 2230 and an AAVPHP.N capsid. In some embodiments, the AAV particle comprises a viral genome comprising SEQ ID NO: 2230 and an AAV2 variant capsid. In some embodiments, the AAV particle comprises a viral genome comprising SEQ ID NO: 2230 and an AAV2/3 variant capsid. In some embodiments, the AAV particle comprises a viral genome comprising SEQ ID NO: 2230 and a capsid comprising SEQ ID NO: 1. In some embodiments, the AAV particle comprises a viral genome comprising SEQ ID NO: 2230 and a capsid encoded by a nucleic acid sequence comprising SEQ ID NO: 2. In some embodiments, the AAV particle comprises a viral genome comprising SEQ ID NO: 2230 and a capsid comprising SEQ ID NO: 4534. In some embodiments, the AAV particle comprises a viral genome comprising SEQ ID NO: 2230 and a capsid encoded by a nucleic acid sequence comprising SEQ ID NO: 3. In some embodiments, the AAV particle comprises a viral genome comprising SEQ ID NO: 2230 and a capsid comprising SEQ ID NO: 138. In some embodiments, the AAV particle comprises a viral genome comprising SEQ ID NO: 2230 and a capsid encoded by a nucleic acid sequence comprising SEQ ID NO: 137. In some embodiments, the AAV particle comprises a viral genome comprising SEQ ID NO: 2230 and a capsid comprising SEQ ID NO: 5. In some embodiments, the AAV particle comprises a viral genome comprising SEQ ID NO: 2230 and a capsid encoded by a nucleic acid sequence comprising SEQ ID NO: 6. In some embodiments, the AAV particle comprises a viral genome comprising SEQ ID NO: 2230 and a capsid comprising SEQ ID NO: 4. In some embodiments, the AAV particle comprises a viral genome comprising SEQ ID NO: 2230 and a capsid comprising SEQ ID NO: 11. In some embodiments, the AAV particle comprises a viral genome comprising SEQ ID NO: 2230 and a capsid comprising SEQ ID NO: 2679. In some embodiments, the AAV particle comprises a viral genome comprising SEQ ID NO: 2230 and a capsid comprising SEQ ID NO: 2809. In some embodiments, the AAV particle comprises a viral genome comprising SEQ ID NO: 2230 and a capsid comprising SEQ ID NO: 2871.

[0927] In some embodiments, the AAV particle comprises a viral genome comprising SEQ ID NO: 2231 and a VOY101 capsid. In some embodiments, the AAV particle comprises a viral genome comprising SEQ ID NO: 2231 and a VOY201 capsid. In some embodiments, the AAV particle comprises a viral genome comprising SEQ ID NO: 2231 and an AAV9 capsid. In some embodiments, the AAV particle comprises a viral genome comprising SEQ ID NO: 2231 and an AAV9K449R capsid. In some embodiments, the AAV particle comprises a viral genome comprising SEQ ID NO: 2231 and an AAVPHP.B capsid. In some embodiments, the AAV particle comprises a viral genome comprising SEQ ID NO: 2231 and an AAVPHP.N capsid. In some embodiments, the AAV particle comprises a viral genome comprising SEQ ID NO: 2231 and an AAV2 variant capsid. In some embodiments, the AAV particle comprises a viral genome comprising SEQ ID NO: 2231 and an AAV2/3 variant capsid. In some embodiments, the AAV particle comprises a viral genome comprising SEQ ID NO: 2231 and a capsid comprising SEQ ID NO: 1. In some embodiments, the AAV particle comprises a viral genome comprising SEQ ID NO: 2231 and a capsid encoded by a nucleic acid sequence comprising SEQ ID NO: 2. In some embodiments, the AAV particle comprises a viral genome comprising SEQ ID NO: 2231 and a capsid comprising SEQ ID NO: 4534. In some embodiments, the AAV particle comprises a viral genome comprising SEQ ID NO: 2231 and a capsid encoded by a nucleic acid sequence comprising SEQ ID NO: 3. In some embodiments, the AAV particle comprises a viral genome comprising SEQ ID NO: 2231 and a capsid comprising SEQ ID NO: 138. In some embodiments, the AAV particle comprises a viral genome comprising SEQ ID NO: 2231 and a capsid encoded by a nucleic acid sequence comprising SEQ ID NO: 137. In some embodiments, the AAV particle comprises a viral genome comprising SEQ ID NO: 2231 and a capsid comprising SEQ ID NO: 5. In some embodiments, the AAV particle comprises a viral genome comprising SEQ ID NO: 2231 and a capsid encoded by a nucleic acid sequence comprising SEQ ID NO: 6. In some embodiments, the AAV particle comprises a viral genome comprising SEQ ID NO: 2231 and a capsid comprising SEQ ID NO: 4. In some embodiments, the AAV particle comprises a viral genome comprising SEQ ID NO: 2231 and a capsid comprising SEQ ID NO: 11. In some embodiments, the AAV particle comprises a viral genome comprising SEQ ID NO: 2231 and a capsid comprising SEQ ID NO: 2679. In some embodiments, the AAV particle comprises a viral genome comprising SEQ ID NO: 2231 and a capsid comprising SEQ ID NO: 2809. In some embodiments, the AAV particle comprises a viral genome comprising SEQ ID NO: 2231 and a capsid comprising SEQ ID NO: 2871.

[0928] In some embodiments, the AAV particle comprises a viral genome comprising SEQ ID NO: 2232 and a VOY101 capsid. In some embodiments, the AAV particle comprises a viral genome comprising SEQ ID NO: 2232 and a VOY201 capsid. In some embodiments, the AAV particle comprises a viral genome comprising SEQ ID NO: 2232 and an AAV9 capsid. In some embodiments, the AAV particle comprises a viral genome comprising SEQ ID NO: 2232 and an AAV9K449R capsid. In some embodiments, the AAV particle comprises a viral genome comprising SEQ ID NO: 2232 and an AAVPHP.B capsid. In some embodiments, the AAV particle comprises a viral genome comprising SEQ ID NO: 2232 and an AAVPHP.N capsid. In some embodiments, the AAV particle comprises a viral genome comprising SEQ ID NO: 2232 and an AAV2 variant capsid. In some embodiments, the AAV particle comprises a viral genome comprising SEQ ID NO: 2232 and an AAV2/3 variant capsid. In some embodiments, the AAV particle comprises a viral genome comprising SEQ ID NO: 2232 and a capsid comprising SEQ ID NO: 1. In some embodiments, the AAV particle comprises a viral genome comprising SEQ ID NO: 2232 and a capsid encoded by a nucleic acid sequence comprising SEQ ID NO: 2. In some embodiments, the AAV particle comprises a viral genome comprising SEQ ID NO: 2232 and a capsid comprising SEQ ID NO: 4534. In some embodiments, the AAV particle comprises a viral genome comprising SEQ ID NO: 2232 and a capsid encoded by a nucleic acid sequence comprising SEQ ID NO: 3. In some embodiments, the AAV particle comprises a viral genome comprising SEQ ID NO: 2232 and a capsid comprising SEQ ID NO: 138. In some embodiments, the AAV particle comprises a viral genome comprising SEQ ID NO: 2232 and a capsid encoded by a nucleic acid sequence comprising SEQ ID NO: 137. In some embodiments, the AAV particle comprises a viral genome comprising SEQ ID NO: 2232 and a capsid comprising SEQ ID NO: 5. In some embodiments, the AAV particle comprises a viral genome comprising SEQ ID NO: 2232 and a capsid encoded by a nucleic acid sequence comprising SEQ ID NO: 6. In some embodiments, the AAV particle comprises a viral genome comprising SEQ ID NO: 2232 and a capsid comprising SEQ ID NO: 4. In some embodiments, the AAV particle comprises a viral genome comprising SEQ ID NO: 2232 and a capsid comprising SEQ ID NO: 11. In some embodiments, the AAV particle comprises a viral genome comprising SEQ ID NO: 2232 and a capsid comprising SEQ ID NO: 2679. In some embodiments, the AAV particle comprises a viral genome comprising SEQ ID NO: 2232 and a capsid comprising SEQ ID NO: 2809. In some embodiments, the AAV particle comprises a viral genome comprising SEQ ID NO: 2232 and a capsid comprising SEQ ID NO: 2871.

[0929] In some embodiments, the AAV particle comprises a viral genome comprising SEQ ID NO: 2233 and a VOY101 capsid. In some embodiments, the AAV particle comprises a viral genome comprising SEQ ID NO: 2233 and a VOY201 capsid. In some embodiments, the AAV particle comprises a viral genome comprising SEQ ID NO: 2233 and an AAV9 capsid. In some embodiments, the AAV particle comprises a viral genome comprising SEQ ID NO: 2233 and an AAV9K449R capsid. In some embodiments, the AAV particle comprises a viral genome comprising SEQ ID NO: 2233 and an AAVPHP.B capsid. In some embodiments, the AAV particle comprises a viral genome comprising SEQ ID NO: 2233 and an AAVPHP.N capsid. In some embodiments, the AAV particle comprises a viral genome comprising SEQ ID NO: 2233 and an AAV2 variant capsid. In some embodiments, the AAV particle comprises a viral genome comprising SEQ ID NO: 2233 and an AAV2/3 variant capsid. In some embodiments, the AAV particle comprises a viral genome comprising SEQ ID NO: 2233 and a capsid comprising SEQ ID NO: 1. In some embodiments, the AAV particle comprises a viral genome comprising SEQ ID NO: 2233 and a capsid encoded by a nucleic acid sequence comprising SEQ ID NO: 2. In some embodiments, the AAV particle comprises a viral genome comprising SEQ ID NO: 2233 and a capsid comprising SEQ ID NO: 4534. In some embodiments, the AAV particle comprises a viral genome comprising SEQ ID NO: 2233 and a capsid encoded by a nucleic acid sequence comprising SEQ ID NO: 3. In some embodiments, the AAV particle comprises a viral genome comprising SEQ ID NO: 2233 and a capsid comprising SEQ ID NO: 138. In some embodiments, the AAV particle comprises a viral genome comprising SEQ ID NO: 2233 and a capsid encoded by a nucleic acid sequence comprising SEQ ID NO: 137. In some embodiments, the AAV particle comprises a viral genome comprising SEQ ID NO: 2233 and a capsid comprising SEQ ID NO: 5. In some embodiments, the AAV particle comprises a viral genome comprising SEQ ID NO: 2233 and a capsid encoded by a nucleic acid sequence comprising SEQ ID NO: 6. In some embodiments, the AAV particle comprises a viral genome comprising SEQ ID NO: 2233 and a capsid comprising SEQ ID NO: 4. In some embodiments, the AAV particle comprises a viral genome comprising SEQ ID NO: 2233 and a capsid comprising SEQ ID NO: 11. In some embodiments, the AAV particle comprises a viral genome comprising SEQ ID NO: 2233 and a capsid comprising SEQ ID NO: 2679. In some embodiments, the AAV particle comprises a viral genome comprising SEQ ID NO: 2233 and a capsid comprising SEQ ID NO: 2809. In some embodiments, the AAV particle comprises a viral genome comprising SEQ ID NO: 2233 and a capsid comprising SEQ ID NO: 2871.

[0930] In some embodiments, the AAV particle comprises a viral genome comprising SEQ ID NO: 2234 and a VOY101 capsid. In some embodiments, the AAV particle comprises a viral genome comprising SEQ ID NO: 2234 and a VOY201 capsid. In some embodiments, the AAV particle comprises a viral genome comprising SEQ ID NO: 2234 and an AAV9 capsid. In some embodiments, the AAV particle comprises a viral genome comprising SEQ ID NO: 2234 and an AAV9K449R capsid. In some embodiments, the AAV particle comprises a viral genome comprising SEQ ID NO: 2234 and an AAVPHP.B capsid. In some embodiments, the AAV particle comprises a viral genome comprising SEQ ID NO: 2234 and an AAVPHP.N capsid. In some embodiments, the AAV particle comprises a viral genome comprising SEQ ID NO: 2234 and an AAV2 variant capsid. In some embodiments, the AAV particle comprises a viral genome comprising SEQ ID NO: 2234 and an AAV2/3 variant capsid. In some embodiments, the AAV particle comprises a viral genome comprising SEQ ID NO: 2234 and a capsid comprising SEQ ID NO: 1. In some embodiments, the AAV particle comprises a viral genome comprising SEQ ID NO: 2234 and a capsid encoded by a nucleic acid sequence comprising SEQ ID NO: 2. In some embodiments, the AAV particle comprises a viral genome comprising SEQ ID NO: 2234 and a capsid comprising SEQ ID NO: 4534. In some embodiments, the AAV particle comprises a viral genome comprising SEQ ID NO: 2234 and a capsid encoded by a nucleic acid sequence comprising SEQ ID NO: 3. In some embodiments, the AAV particle comprises a viral genome comprising SEQ ID NO: 2234 and a capsid comprising SEQ ID NO: 138. In some embodiments, the AAV particle comprises a viral genome comprising SEQ ID NO: 2234 and a capsid encoded by a nucleic acid sequence comprising SEQ ID NO: 137. In some embodiments, the AAV particle comprises a viral genome comprising SEQ ID NO: 2234 and a capsid comprising SEQ ID NO: 5. In some embodiments, the AAV particle comprises a viral genome comprising SEQ ID NO: 2234 and a capsid encoded by a nucleic acid sequence comprising SEQ ID NO: 6. In some embodiments, the AAV particle comprises a viral genome comprising SEQ ID NO: 2234 and a capsid comprising SEQ ID NO: 4. In some embodiments, the AAV particle comprises a viral genome comprising SEQ ID NO: 2234 and a capsid comprising SEQ ID NO: 11. In some embodiments, the AAV particle comprises a viral genome comprising SEQ ID NO: 2234 and a capsid comprising SEQ ID NO: 2679. In some embodiments, the AAV particle comprises a viral genome comprising SEQ ID NO: 2234 and a capsid comprising SEQ ID NO: 2809. In some embodiments, the AAV particle comprises a viral genome comprising SEQ ID NO: 2234 and a capsid comprising SEQ ID NO: 2871.

[0931] In some embodiments, the AAV particle comprises a viral genome comprising SEQ ID NO: 2235 and a VOY101 capsid. In some embodiments, the AAV particle comprises a viral genome comprising SEQ ID NO: 2235 and a VOY201 capsid. In some embodiments, the AAV particle comprises a viral genome comprising SEQ ID NO: 2235 and an AAV9 capsid. In some embodiments, the AAV particle comprises a viral genome comprising SEQ ID NO: 2235 and an AAV9K449R capsid. In some embodiments, the AAV particle comprises a viral genome comprising SEQ ID NO: 2235 and an AAVPHP.B capsid. In some embodiments, the AAV particle comprises a viral genome comprising SEQ ID NO: 2235 and an AAVPHP.N capsid. In some embodiments, the AAV particle comprises a viral genome comprising SEQ ID NO: 2235 and an AAV2 variant capsid. In some embodiments, the AAV particle comprises a viral genome comprising SEQ ID NO: 2235 and an AAV2/3 variant capsid. In some embodiments, the AAV particle comprises a viral genome comprising SEQ ID NO: 2235 and a capsid comprising SEQ ID NO: 1. In some embodiments, the AAV particle comprises a viral genome comprising SEQ ID NO: 2235 and a capsid encoded by a nucleic acid sequence comprising SEQ ID NO: 2. In some embodiments, the AAV particle comprises a viral genome comprising SEQ ID NO: 2235 and a capsid comprising SEQ ID NO: 4534. In some embodiments, the AAV particle comprises a viral genome comprising SEQ ID NO: 2235 and a capsid encoded by a nucleic acid sequence comprising SEQ ID NO: 3. In some embodiments, the AAV particle comprises a viral genome comprising SEQ ID NO: 2235 and a capsid comprising SEQ ID NO: 138. In some embodiments, the AAV particle comprises a viral genome comprising SEQ ID NO: 2235 and a capsid encoded by a nucleic acid sequence comprising SEQ ID NO: 137. In some embodiments, the AAV particle comprises a viral genome comprising SEQ ID NO: 2235 and a capsid comprising SEQ ID NO: 5. In some embodiments, the AAV particle comprises a viral genome comprising SEQ ID NO: 2235 and a capsid encoded by a nucleic acid sequence comprising SEQ ID NO: 6. In some embodiments, the AAV particle comprises a viral genome comprising SEQ ID NO: 2235 and a capsid comprising SEQ ID NO: 4. In some embodiments, the AAV particle comprises a viral genome comprising SEQ ID NO: 2235 and a capsid comprising SEQ ID NO: 11. In some embodiments, the AAV particle comprises a viral genome comprising SEQ ID NO: 2235 and a capsid comprising SEQ ID NO: 2679. In some embodiments, the AAV particle comprises a viral genome comprising SEQ ID NO: 2235 and a capsid comprising SEQ ID NO: 2809. In some embodiments, the AAV particle comprises a viral genome comprising SEQ ID NO: 2235 and a capsid comprising SEQ ID NO: 2871.

[0932] In some embodiments, the AAV particle comprises a viral genome comprising SEQ ID NO: 2236 and a VOY101 capsid. In some embodiments, the AAV particle comprises a viral genome comprising SEQ ID NO: 2236 and a VOY201 capsid. In some embodiments, the AAV particle comprises a viral genome comprising SEQ ID NO: 2236 and an AAV9 capsid. In some embodiments, the AAV particle comprises a viral genome comprising SEQ ID NO: 2236 and an AAV9K449R capsid. In some embodiments, the AAV particle comprises a viral genome comprising SEQ ID NO: 2236 and an AAVPHP.B capsid. In some embodiments, the AAV particle comprises a viral genome comprising SEQ ID NO: 2236 and an AAVPHP.N capsid. In some embodiments, the AAV particle comprises a viral genome comprising SEQ ID NO: 2236 and an AAV2 variant capsid. In some embodiments, the AAV particle comprises a viral genome comprising SEQ ID NO: 2236 and an AAV2/3 variant capsid. In some embodiments, the AAV particle comprises a viral genome comprising SEQ ID NO: 2236 and a capsid comprising SEQ ID NO: 1. In some embodiments, the AAV particle comprises a viral genome comprising SEQ ID NO: 2236 and a capsid encoded by a nucleic acid sequence comprising SEQ ID NO: 2. In some embodiments, the AAV particle comprises a viral genome comprising SEQ ID NO: 2236 and a capsid comprising SEQ ID NO: 4534. In some embodiments, the AAV particle comprises a viral genome comprising SEQ ID NO: 2236 and a capsid encoded by a nucleic acid sequence comprising SEQ ID NO: 3. In some embodiments, the AAV particle comprises a viral genome comprising SEQ ID NO: 2236 and a capsid comprising SEQ ID NO: 138. In some embodiments, the AAV particle comprises a viral genome comprising SEQ ID NO: 2236 and a capsid encoded by a nucleic acid sequence comprising SEQ ID NO: 137. In some embodiments, the AAV particle comprises a viral genome comprising SEQ ID NO: 2236 and a capsid comprising SEQ ID NO: 5. In some embodiments, the AAV particle comprises a viral genome comprising SEQ ID NO: 2236 and a capsid encoded by a nucleic acid sequence comprising SEQ ID NO: 6. In some embodiments, the AAV particle comprises a viral genome comprising SEQ ID NO: 2236 and a capsid comprising SEQ ID NO: 4. In some embodiments, the AAV particle comprises a viral genome comprising SEQ ID NO: 2236 and a capsid comprising SEQ ID NO: 11. In some embodiments, the AAV particle comprises a viral genome comprising SEQ ID NO: 2236 and a capsid comprising SEQ ID NO: 2679. In some embodiments, the AAV particle comprises a viral genome comprising SEQ ID NO: 2236 and a capsid comprising SEQ ID NO: 2809. In some embodiments, the AAV particle comprises a viral genome comprising SEQ ID NO: 2236 and a capsid comprising SEQ ID NO: 2871.

[0933] In some embodiments, the AAV particle comprises a viral genome comprising SEQ ID NO: 2237 and a VOY101 capsid. In some embodiments, the AAV particle comprises a viral genome comprising SEQ ID NO: 2237 and a VOY201 capsid. In some embodiments, the AAV particle comprises a viral genome comprising SEQ ID NO: 2237 and an AAV9 capsid. In some embodiments, the AAV particle comprises a viral genome comprising SEQ ID NO: 2237 and an AAV9K449R capsid. In some embodiments, the AAV particle comprises a viral genome comprising SEQ ID NO: 2237 and an AAVPHP.B capsid. In some embodiments, the AAV particle comprises a viral genome comprising SEQ ID NO: 2237 and an AAVPHP.N capsid. In some embodiments, the AAV particle comprises a viral genome comprising SEQ ID NO: 2237 and an AAV2 variant capsid. In some embodiments, the AAV particle comprises a viral genome comprising SEQ ID NO: 2237 and an AAV2/3 variant capsid. In some embodiments, the AAV particle comprises a viral genome comprising SEQ ID NO: 2237 and a capsid comprising SEQ ID NO: 1. In some embodiments, the AAV particle comprises a viral genome comprising SEQ ID NO: 2237 and a capsid encoded by a nucleic acid sequence comprising SEQ ID NO: 2. In some embodiments, the AAV particle comprises a viral genome comprising SEQ ID NO: 2237 and a capsid comprising SEQ ID NO: 4534. In some embodiments, the AAV particle comprises a viral genome comprising SEQ ID NO: 2237 and a capsid encoded by a nucleic acid sequence comprising SEQ ID NO: 3. In some embodiments, the AAV particle comprises a viral genome comprising SEQ ID NO: 2237 and a capsid comprising SEQ ID NO: 138. In some embodiments, the AAV particle comprises a viral genome comprising SEQ ID NO: 2237 and a capsid encoded by a nucleic acid sequence comprising SEQ ID NO: 137. In some embodiments, the AAV particle comprises a viral genome comprising SEQ ID NO: 2237 and a capsid comprising SEQ ID NO: 5. In some embodiments, the AAV particle comprises a viral genome comprising SEQ ID NO: 2237 and a capsid encoded by a nucleic acid sequence comprising SEQ ID NO: 6. In some embodiments, the AAV particle comprises a viral genome comprising SEQ ID NO: 2237 and a capsid comprising SEQ ID NO: 4. In some embodiments, the AAV particle comprises a viral genome comprising SEQ ID NO: 2237 and a capsid comprising SEQ ID NO: 11. In some embodiments, the AAV particle comprises a viral genome comprising SEQ ID NO: 2237 and a capsid comprising SEQ ID NO: 2679. In some embodiments, the AAV particle comprises a viral genome comprising SEQ ID NO: 2237 and a capsid comprising SEQ ID NO: 2809. In some embodiments, the AAV particle comprises a viral genome comprising SEQ ID NO: 2237 and a capsid comprising SEQ ID NO: 2871.

[0934] In some embodiments, the AAV particle comprises a viral genome comprising SEQ ID NO: 2260 and a VOY101 capsid. In some embodiments, the AAV particle comprises a viral genome comprising SEQ ID NO: 2260 and a VOY201 capsid. In some embodiments, the AAV particle comprises a viral genome comprising SEQ ID NO: 2260 and an AAV9 capsid. In some embodiments, the AAV particle comprises a viral genome comprising SEQ ID NO: 2260 and an AAV9K449R capsid. In some embodiments, the AAV particle comprises a viral genome comprising SEQ ID NO: 2260 and an AAVPHP.B capsid. In some embodiments, the AAV particle comprises a viral genome comprising SEQ ID NO: 2260 and an AAVPHP.N capsid. In some embodiments, the AAV particle comprises a viral genome comprising SEQ ID NO: 2260 and an AAV2 variant capsid. In some embodiments, the AAV particle comprises a viral genome comprising SEQ ID NO: 2260 and an AAV2/3 variant capsid. In some embodiments, the AAV particle comprises a viral genome comprising SEQ ID NO: 2260 and a capsid comprising SEQ ID NO: 1. In some embodiments, the AAV particle comprises a viral genome comprising SEQ ID NO: 2260 and a capsid encoded by a nucleic acid sequence comprising SEQ ID NO: 2. In some embodiments, the AAV particle comprises a viral genome comprising SEQ ID NO: 2260 and a capsid comprising SEQ ID NO: 4534. In some embodiments, the AAV particle comprises a viral genome comprising SEQ ID NO: 2260 and a capsid encoded by a nucleic acid sequence comprising SEQ ID NO: 3. In some embodiments, the AAV particle comprises a viral genome comprising SEQ ID NO: 2260 and a capsid comprising SEQ ID NO: 138. In some embodiments, the AAV particle comprises a viral genome comprising SEQ ID NO: 2260 and a capsid encoded by a nucleic acid sequence comprising SEQ ID NO: 137. In some embodiments, the AAV particle comprises a viral genome comprising SEQ ID NO: 2260 and a capsid comprising SEQ ID NO: 5. In some embodiments, the AAV particle comprises a viral genome comprising SEQ ID NO: 2260 and a capsid encoded by a nucleic acid sequence comprising SEQ ID NO: 6. In some embodiments, the AAV particle comprises a viral genome comprising SEQ ID NO: 2260 and a capsid comprising SEQ ID NO: 4. In some embodiments, the AAV particle comprises a viral genome comprising SEQ ID NO: 2260 and a capsid comprising SEQ ID NO: 11. In some embodiments, the AAV particle comprises a viral genome comprising SEQ ID NO: 2260 and a capsid comprising SEQ ID NO: 2679. In some embodiments, the AAV particle comprises a viral genome comprising SEQ ID NO: 2260 and a capsid comprising SEQ ID NO: 2809. In some embodiments, the AAV particle comprises a viral genome comprising SEQ ID NO: 2260 and a capsid comprising SEQ ID NO: 2871.

[0935] In some embodiments, the AAV particle comprises a viral genome comprising SEQ ID NO: 2261 and a VOY101 capsid. In some embodiments, the AAV particle comprises a viral genome comprising SEQ ID NO: 2261 and a VOY201 capsid. In some embodiments, the AAV particle comprises a viral genome comprising SEQ ID NO: 2261 and an AAV9 capsid. In some embodiments, the AAV particle comprises a viral genome comprising SEQ ID NO: 2261 and an AAV9K449R capsid. In some embodiments, the AAV particle comprises a viral genome comprising SEQ ID NO: 2261 and an AAVPHP.B capsid. In some embodiments, the AAV particle comprises a viral genome comprising SEQ ID NO: 2261 and an AAVPHP.N capsid. In some embodiments, the AAV particle comprises a viral genome comprising SEQ ID NO: 2261 and an AAV2 variant capsid. In some embodiments, the AAV particle comprises a viral genome comprising SEQ ID NO: 2261 and an AAV2/3 variant capsid. In some embodiments, the AAV particle comprises a viral genome comprising SEQ ID NO: 2261 and a capsid comprising SEQ ID NO: 1. In some embodiments, the AAV particle comprises a viral genome comprising SEQ ID NO: 2261 and a capsid encoded by a nucleic acid sequence comprising SEQ ID NO: 2. In some embodiments, the AAV particle comprises a viral genome comprising SEQ ID NO: 2261 and a capsid comprising SEQ ID NO: 4534. In some embodiments, the AAV particle comprises a viral genome comprising SEQ ID NO: 2261 and a capsid encoded by a nucleic acid sequence comprising SEQ ID NO: 3. In some embodiments, the AAV particle comprises a viral genome comprising SEQ ID NO: 2261 and a capsid comprising SEQ ID NO: 138. In some embodiments, the AAV particle comprises a viral genome comprising SEQ ID NO: 2261 and a capsid encoded by a nucleic acid sequence comprising SEQ ID NO: 137. In some embodiments, the AAV particle comprises a viral genome comprising SEQ ID NO: 2261 and a capsid comprising SEQ ID NO: 5. In some embodiments, the AAV particle comprises a viral genome comprising SEQ ID NO: 2261 and a capsid encoded by a nucleic acid sequence comprising SEQ ID NO: 6. In some embodiments, the AAV particle comprises a viral genome comprising SEQ ID NO: 2261 and a capsid comprising SEQ ID NO: 4. In some embodiments, the AAV particle comprises a viral genome comprising SEQ ID NO: 2261 and a capsid comprising SEQ ID NO: 11. In some embodiments, the AAV particle comprises a viral genome comprising SEQ ID NO: 2261 and a capsid comprising SEQ ID NO: 2679. In some embodiments, the AAV particle comprises a viral genome comprising SEQ ID NO: 2261 and a capsid comprising SEQ ID NO: 2809. In some embodiments, the AAV particle comprises a viral genome comprising SEQ ID NO: 2261 and a capsid comprising SEQ ID NO: 2871.

[0936] In some embodiments, the AAV particle comprises a viral genome comprising SEQ ID NO: 2262 and a VOY101 capsid. In some embodiments, the AAV particle comprises a viral genome comprising SEQ ID NO: 2262 and a VOY201 capsid. In some embodiments, the AAV particle comprises a viral genome comprising SEQ ID NO: 2262 and an AAV9 capsid. In some embodiments, the AAV particle comprises a viral genome comprising SEQ ID NO: 2262 and an AAV9K449R capsid. In some embodiments, the AAV particle comprises a viral genome comprising SEQ ID NO: 2262 and an AAVPHP.B capsid. In some embodiments, the AAV particle comprises a viral genome comprising SEQ ID NO: 2262 and an AAVPHP.N capsid. In some embodiments, the AAV particle comprises a viral genome comprising SEQ ID NO: 2262 and an AAV2 variant capsid. In some embodiments, the AAV particle comprises a viral genome comprising SEQ ID NO: 2262 and an AAV2/3 variant capsid. In some embodiments, the AAV particle comprises a viral genome comprising SEQ ID NO: 2262 and a capsid comprising SEQ ID NO: 1. In some embodiments, the AAV particle comprises a viral genome comprising SEQ ID NO: 2262 and a capsid encoded by a nucleic acid sequence comprising SEQ ID NO: 2. In some embodiments, the AAV particle comprises a viral genome comprising SEQ ID NO: 2262 and a capsid comprising SEQ ID NO: 4534. In some embodiments, the AAV particle comprises a viral genome comprising SEQ ID NO: 2262 and a capsid encoded by a nucleic acid sequence comprising SEQ ID NO: 3. In some embodiments, the AAV particle comprises a viral genome comprising SEQ ID NO: 2262 and a capsid comprising SEQ ID NO: 138. In some embodiments, the AAV particle comprises a viral genome comprising SEQ ID NO: 2262 and a capsid encoded by a nucleic acid sequence comprising SEQ ID NO: 137. In some embodiments, the AAV particle comprises a viral genome comprising SEQ ID NO: 2262 and a capsid comprising SEQ ID NO: 5. In some embodiments, the AAV particle comprises a viral genome comprising SEQ ID NO: 2262 and a capsid encoded by a nucleic acid sequence comprising SEQ ID NO: 6. In some embodiments, the AAV particle comprises a viral genome comprising SEQ ID NO: 2262 and a capsid comprising SEQ ID NO: 4. In some embodiments, the AAV particle comprises a viral genome comprising SEQ ID NO: 2262 and a capsid comprising SEQ ID NO: 11. In some embodiments, the AAV particle comprises a viral genome comprising SEQ ID NO: 2262 and a capsid comprising SEQ ID NO: 2679. In some embodiments, the AAV particle comprises a viral genome comprising SEQ ID NO: 2262 and a capsid comprising SEQ ID NO: 2809. In some embodiments, the AAV particle comprises a viral genome comprising SEQ ID NO: 2262 and a capsid comprising SEQ ID NO: 2871.

[0937] In some embodiments, the AAV particle comprises a viral genome comprising SEQ ID NO: 2263 and a VOY101 capsid. In some embodiments, the AAV particle comprises a viral genome comprising SEQ ID NO: 2263 and a VOY201 capsid. In some embodiments, the AAV particle comprises a viral genome comprising SEQ ID NO: 2263 and an AAV9 capsid. In some embodiments, the AAV particle comprises a viral genome comprising SEQ ID NO: 2263 and an AAV9K449R capsid. In some embodiments, the AAV particle comprises a viral genome comprising SEQ ID NO: 2263 and an AAVPHP.B capsid. In some embodiments, the AAV particle comprises a viral genome comprising SEQ ID NO: 2263 and an AAVPHP.N capsid. In some embodiments, the AAV particle comprises a viral genome comprising SEQ ID NO: 2263 and an AAV2 variant capsid. In some embodiments, the AAV particle comprises a viral genome comprising SEQ ID NO: 2263 and an AAV2/3 variant capsid. In some embodiments, the AAV particle comprises a viral genome comprising SEQ ID NO: 2263 and a capsid comprising SEQ ID NO: 1. In some embodiments, the AAV particle comprises a viral genome comprising SEQ ID NO: 2263 and a capsid encoded by a nucleic acid sequence comprising SEQ ID NO: 2. In some embodiments, the AAV particle comprises a viral genome comprising SEQ ID NO: 2263 and a capsid comprising SEQ ID NO: 4534. In some embodiments, the AAV particle comprises a viral genome comprising SEQ ID NO: 2263 and a capsid encoded by a nucleic acid sequence comprising SEQ ID NO: 3. In some embodiments, the AAV particle comprises a viral genome comprising SEQ ID NO: 2263 and a capsid comprising SEQ ID NO: 138. In some embodiments, the AAV particle comprises a viral genome comprising SEQ ID NO: 2263 and a capsid encoded by a nucleic acid sequence comprising SEQ ID NO: 137. In some embodiments, the AAV particle comprises a viral genome comprising SEQ ID NO: 2263 and a capsid comprising SEQ ID NO: 5. In some embodiments, the AAV particle comprises a viral genome comprising SEQ ID NO: 2263 and a capsid encoded by a nucleic acid sequence comprising SEQ ID NO: 6. In some embodiments, the AAV particle comprises a viral genome comprising SEQ ID NO: 2263 and a capsid comprising SEQ ID NO: 4. In some embodiments, the AAV particle comprises a viral genome comprising SEQ ID NO: 2263 and a capsid comprising SEQ ID NO: 11. In some embodiments, the AAV particle comprises a viral genome comprising SEQ ID NO: 2263 and a capsid comprising SEQ ID NO: 2679. In some embodiments, the AAV particle comprises a viral genome comprising SEQ ID NO: 2263 and a capsid comprising SEQ ID NO: 2809. In some embodiments, the AAV particle comprises a viral genome comprising SEQ ID NO: 2263 and a capsid comprising SEQ ID NO: 2871.

[0938] In some embodiments, the AAV particle comprises a viral genome comprising SEQ ID NO: 2264 and a VOY101 capsid. In some embodiments, the AAV particle comprises a viral genome comprising SEQ ID NO: 2264 and a VOY201 capsid. In some embodiments, the AAV particle comprises a viral genome comprising SEQ ID NO: 2264 and an AAV9 capsid. In some embodiments, the AAV particle comprises a viral genome comprising SEQ ID NO: 2264 and an AAV9K449R capsid. In some embodiments, the AAV particle comprises a viral genome comprising SEQ ID NO: 2264 and an AAVPHP.B capsid. In some embodiments, the AAV particle comprises a viral genome comprising SEQ ID NO: 2264 and an AAVPHP.N capsid. In some embodiments, the AAV particle comprises a viral genome comprising SEQ ID NO: 2264 and an AAV2 variant capsid. In some embodiments, the AAV particle comprises a viral genome comprising SEQ ID NO: 2264 and an AAV2/3 variant capsid. In some embodiments, the AAV particle comprises a viral genome comprising SEQ ID NO: 2264 and a capsid comprising SEQ ID NO: 1. In some embodiments, the AAV particle comprises a viral genome comprising SEQ ID NO: 2264 and a capsid encoded by a nucleic acid sequence comprising SEQ ID NO: 2. In some embodiments, the AAV particle comprises a viral genome comprising SEQ ID NO: 2264 and a capsid comprising SEQ ID NO: 4534. In some embodiments, the AAV particle comprises a viral genome comprising SEQ ID NO: 2264 and a capsid encoded by a nucleic acid sequence comprising SEQ ID NO: 3. In some embodiments, the AAV particle comprises a viral genome comprising SEQ ID NO: 2264 and a capsid comprising SEQ ID NO: 138. In some embodiments, the AAV particle comprises a viral genome comprising SEQ ID NO: 2264 and a capsid encoded by a nucleic acid sequence comprising SEQ ID NO: 137. In some embodiments, the AAV particle comprises a viral genome comprising SEQ ID NO: 2264 and a capsid comprising SEQ ID NO: 5. In some embodiments, the AAV particle comprises a viral genome comprising SEQ ID NO: 2264 and a capsid encoded by a nucleic acid sequence comprising SEQ ID NO: 6. In some embodiments, the AAV particle comprises a viral genome comprising SEQ ID NO: 2264 and a capsid comprising SEQ ID NO: 4. In some embodiments, the AAV particle comprises a viral genome comprising SEQ ID NO: 2264 and a capsid comprising SEQ ID NO: 11. In some embodiments, the AAV particle comprises a viral genome comprising SEQ ID NO: 2264 and a capsid comprising SEQ ID NO: 2679. In some embodiments, the AAV particle comprises a viral genome comprising SEQ ID NO: 2264 and a capsid comprising SEQ ID NO: 2809. In some embodiments, the AAV particle comprises a viral genome comprising SEQ ID NO: 2264 and a capsid comprising SEQ ID NO: 2871.

[0939] In some embodiments, the AAV particle comprises a viral genome comprising SEQ ID NO: 2265 and a VOY101 capsid. In some embodiments, the AAV particle comprises a viral genome comprising SEQ ID NO: 2265 and a VOY201 capsid. In some embodiments, the AAV particle comprises a viral genome comprising SEQ ID NO: 2265 and an AAV9 capsid. In some embodiments, the AAV particle comprises a viral genome comprising SEQ ID NO: 2265 and an AAV9K449R capsid. In some embodiments, the AAV particle comprises a viral genome comprising SEQ ID NO: 2265 and an AAVPHP.B capsid. In some embodiments, the AAV particle comprises a viral genome comprising SEQ ID NO: 2265 and an AAVPHP.N capsid. In some embodiments, the AAV particle comprises a viral genome comprising SEQ ID NO: 2265 and an AAV2 variant capsid. In some embodiments, the AAV particle comprises a viral genome comprising SEQ ID NO: 2265 and an AAV2/3 variant capsid. In some embodiments, the AAV particle comprises a viral genome comprising SEQ ID NO: 2265 and a capsid comprising SEQ ID NO: 1. In some embodiments, the AAV particle comprises a viral genome comprising SEQ ID NO: 2265 and a capsid encoded by a nucleic acid sequence comprising SEQ ID NO: 2. In some embodiments, the AAV particle comprises a viral genome comprising SEQ ID NO: 2265 and a capsid comprising SEQ ID NO: 4534. In some embodiments, the AAV particle comprises a viral genome comprising SEQ ID NO: 2265 and a capsid encoded by a nucleic acid sequence comprising SEQ ID NO: 3. In some embodiments, the AAV particle comprises a viral genome comprising SEQ ID NO: 2265 and a capsid comprising SEQ ID NO: 138. In some embodiments, the AAV particle comprises a viral genome comprising SEQ ID NO: 2265 and a capsid encoded by a nucleic acid sequence comprising SEQ ID NO: 137. In some embodiments, the AAV particle comprises a viral genome comprising SEQ ID NO: 2265 and a capsid comprising SEQ ID NO: 5. In some embodiments, the AAV particle comprises a viral genome comprising SEQ ID NO: 2265 and a capsid encoded by a nucleic acid sequence comprising SEQ ID NO: 6. In some embodiments, the AAV particle comprises a viral genome comprising SEQ ID NO: 2265 and a capsid comprising SEQ ID NO: 4. In some embodiments, the AAV particle comprises a viral genome comprising SEQ ID NO: 2265 and a capsid comprising SEQ ID NO: 11. In some embodiments, the AAV particle comprises a viral genome comprising SEQ ID NO: 2265 and a capsid comprising SEQ ID NO: 2679. In some embodiments, the AAV particle comprises a viral genome comprising SEQ ID NO: 2265 and a capsid comprising SEQ ID NO: 2809. In some embodiments, the AAV particle comprises a viral genome comprising SEQ ID NO: 2265 and a capsid comprising SEQ ID NO: 2871.

[0940] In some embodiments, the AAV particle comprises a viral genome comprising SEQ ID NO: 2266 and a VOY101 capsid. In some embodiments, the AAV particle comprises a viral genome comprising SEQ ID NO: 2266 and a VOY201 capsid. In some embodiments, the AAV particle comprises a viral genome comprising SEQ ID NO: 2266 and an AAV9 capsid. In some embodiments, the AAV particle comprises a viral genome comprising SEQ ID NO: 2266 and an AAV9K449R capsid. In some embodiments, the AAV particle comprises a viral genome comprising SEQ ID NO: 2266 and an AAVPHP.B capsid. In some embodiments, the AAV particle comprises a viral genome comprising SEQ ID NO: 2266 and an AAVPHP.N capsid. In some embodiments, the AAV particle comprises a viral genome comprising SEQ ID NO: 2266 and an AAV2 variant capsid. In some embodiments, the AAV particle comprises a viral genome comprising SEQ ID NO: 2266 and an AAV2/3 variant capsid. In some embodiments, the AAV particle comprises a viral genome comprising SEQ ID NO: 2266 and a capsid comprising SEQ ID NO: 1. In some embodiments, the AAV particle comprises a viral genome comprising SEQ ID NO: 2266 and a capsid encoded by a nucleic acid sequence comprising SEQ ID NO: 2. In some embodiments, the AAV particle comprises a viral genome comprising SEQ ID NO: 2266 and a capsid comprising SEQ ID NO: 4534. In some embodiments, the AAV particle comprises a viral genome comprising SEQ ID NO: 2266 and a capsid encoded by a nucleic acid sequence comprising SEQ ID NO: 3. In some embodiments, the AAV particle comprises a viral genome comprising SEQ ID NO: 2266 and a capsid comprising SEQ ID NO: 138. In some embodiments, the AAV particle comprises a viral genome comprising SEQ ID NO: 2266 and a capsid encoded by a nucleic acid sequence comprising SEQ ID NO: 137. In some embodiments, the AAV particle comprises a viral genome comprising SEQ ID NO: 2266 and a capsid comprising SEQ ID NO: 5. In some embodiments, the AAV particle comprises a viral genome comprising SEQ ID NO: 2266 and a capsid encoded by a nucleic acid sequence comprising SEQ ID NO: 6. In some embodiments, the AAV particle comprises a viral genome comprising SEQ ID NO: 2266 and a capsid comprising SEQ ID NO: 4. In some embodiments, the AAV particle comprises a viral genome comprising SEQ ID NO: 2266 and a capsid comprising SEQ ID NO: 11. In some embodiments, the AAV particle comprises a viral genome comprising SEQ ID NO: 2266 and a capsid comprising SEQ ID NO: 2679. In some embodiments, the AAV particle comprises a viral genome comprising SEQ ID NO: 2266 and a capsid comprising SEQ ID NO: 2809. In some embodiments, the AAV particle comprises a viral genome comprising SEQ ID NO: 2266 and a capsid comprising SEQ ID NO: 2871.

[0941] In some embodiments, the AAV particle comprises a viral genome comprising SEQ ID NO: 2267 and a VOY101 capsid. In some embodiments, the AAV particle comprises a viral genome comprising SEQ ID NO: 2267 and a VOY201 capsid. In some embodiments, the AAV particle comprises a viral genome comprising SEQ ID NO: 2267 and an AAV9 capsid. In some embodiments, the AAV particle comprises a viral genome comprising SEQ ID NO: 2267 and an AAV9K449R capsid. In some embodiments, the AAV particle comprises a viral genome comprising SEQ ID NO: 2267 and an AAVPHP.B capsid. In some embodiments, the AAV particle comprises a viral genome comprising SEQ ID NO: 2267 and an AAVPHP.N capsid. In some embodiments, the AAV particle comprises a viral genome comprising SEQ ID NO: 2267 and an AAV2 variant capsid. In some embodiments, the AAV particle comprises a viral genome comprising SEQ ID NO: 2267 and an AAV2/3 variant capsid. In some embodiments, the AAV particle comprises a viral genome comprising SEQ ID NO: 2267 and a capsid comprising SEQ ID NO: 1. In some embodiments, the AAV particle comprises a viral genome comprising SEQ ID NO: 2267 and a capsid encoded by a nucleic acid sequence comprising SEQ ID NO: 2. In some embodiments, the AAV particle comprises a viral genome comprising SEQ ID NO: 2267 and a capsid comprising SEQ ID NO: 4534. In some embodiments, the AAV particle comprises a viral genome comprising SEQ ID NO: 2267 and a capsid encoded by a nucleic acid sequence comprising SEQ ID NO: 3. In some embodiments, the AAV particle comprises a viral genome comprising SEQ ID NO: 2267 and a capsid comprising SEQ ID NO: 138. In some embodiments, the AAV particle comprises a viral genome comprising SEQ ID NO: 2267 and a capsid encoded by a nucleic acid sequence comprising SEQ ID NO: 137. In some embodiments, the AAV particle comprises a viral genome comprising SEQ ID NO: 2267 and a capsid comprising SEQ ID NO: 5. In some embodiments, the AAV particle comprises a viral genome comprising SEQ ID NO: 2267 and a capsid encoded by a nucleic acid sequence comprising SEQ ID NO: 6. In some embodiments, the AAV particle comprises a viral genome comprising SEQ ID NO: 2267 and a capsid comprising SEQ ID NO: 4. In some embodiments, the AAV particle comprises a viral genome comprising SEQ ID NO: 2267 and a capsid comprising SEQ ID NO: 11. In some embodiments, the AAV particle comprises a viral genome comprising SEQ ID NO: 2267 and a capsid comprising SEQ ID NO: 2679. In some embodiments, the AAV particle comprises a viral genome comprising SEQ ID NO: 2267 and a capsid comprising SEQ ID NO: 2809. In some embodiments, the AAV particle comprises a viral genome comprising SEQ ID NO: 2267 and a capsid comprising SEQ ID NO: 2871.

[0942] In some embodiments, the AAV particle comprises a viral genome comprising SEQ ID NO: 2268 and a VOY101 capsid. In some embodiments, the AAV particle comprises a viral genome comprising SEQ ID NO: 2268 and a VOY201 capsid. In some embodiments, the AAV particle comprises a viral genome comprising SEQ ID NO: 2268 and an AAV9 capsid. In some embodiments, the AAV particle comprises a viral genome comprising SEQ ID NO: 2268 and an AAV9K449R capsid. In some embodiments, the AAV particle comprises a viral genome comprising SEQ ID NO: 2268 and an AAVPHP.B capsid. In some embodiments, the AAV particle comprises a viral genome comprising SEQ ID NO: 2268 and an AAVPHP.N capsid. In some embodiments, the AAV particle comprises a viral genome comprising SEQ ID NO: 2268 and an AAV2 variant capsid. In some embodiments, the AAV particle comprises a viral genome comprising SEQ ID NO: 2268 and an AAV2/3 variant capsid. In some embodiments, the AAV particle comprises a viral genome comprising SEQ ID NO: 2268 and a capsid comprising SEQ ID NO: 1. In some embodiments, the AAV particle comprises a viral genome comprising SEQ ID NO: 2268 and a capsid encoded by a nucleic acid sequence comprising SEQ ID NO: 2. In some embodiments, the AAV particle comprises a viral genome comprising SEQ ID NO: 2268 and a capsid comprising SEQ ID NO: 4534. In some embodiments, the AAV particle comprises a viral genome comprising SEQ ID NO: 2268 and a capsid encoded by a nucleic acid sequence comprising SEQ ID NO: 3. In some embodiments, the AAV particle comprises a viral genome comprising SEQ ID NO: 2268 and a capsid comprising SEQ ID NO: 138. In some embodiments, the AAV particle comprises a viral genome comprising SEQ ID NO: 2268 and a capsid encoded by a nucleic acid sequence comprising SEQ ID NO: 137. In some embodiments, the AAV particle comprises a viral genome comprising SEQ ID NO: 2268 and a capsid comprising SEQ ID NO: 5. In some embodiments, the AAV particle comprises a viral genome comprising SEQ ID NO: 2268 and a capsid encoded by a nucleic acid sequence comprising SEQ ID NO: 6. In some embodiments, the AAV particle comprises a viral genome comprising SEQ ID NO: 2268 and a capsid comprising SEQ ID NO: 4. In some embodiments, the AAV particle comprises a viral genome comprising SEQ ID NO: 2268 and a capsid comprising SEQ ID NO: 11. In some embodiments, the AAV particle comprises a viral genome comprising SEQ ID NO: 2268 and a capsid comprising SEQ ID NO: 2679. In some embodiments, the AAV particle comprises a viral genome comprising SEQ ID NO: 2268 and a capsid comprising SEQ ID NO: 2809. In some embodiments, the AAV particle comprises a viral genome comprising SEQ ID NO: 2268 and a capsid comprising SEQ ID NO: 2871.

[0943] In some embodiments, the AAV particle comprises a viral genome comprising SEQ ID NO: 2269 and a VOY101 capsid. In some embodiments, the AAV particle comprises a viral genome comprising SEQ ID NO: 2269 and a VOY201 capsid. In some embodiments, the AAV particle comprises a viral genome comprising SEQ ID NO: 2269 and an AAV9 capsid. In some embodiments, the AAV particle comprises a viral genome comprising SEQ ID NO: 2269 and an AAV9K449R capsid. In some embodiments, the AAV particle comprises a viral genome comprising SEQ ID NO: 2269 and an AAVPHP.B capsid. In some embodiments, the AAV particle comprises a viral genome comprising SEQ ID NO: 2269 and an AAVPHP.N capsid. In some embodiments, the AAV particle comprises a viral genome comprising SEQ ID NO: 2269 and an AAV2 variant capsid. In some embodiments, the AAV particle comprises a viral genome comprising SEQ ID NO: 2269 and an AAV2/3 variant capsid. In some embodiments, the AAV particle comprises a viral genome comprising SEQ ID NO: 2269 and a capsid comprising SEQ ID NO: 1. In some embodiments, the AAV particle comprises a viral genome comprising SEQ ID NO: 2269 and a capsid encoded by a nucleic acid sequence comprising SEQ ID NO: 2. In some embodiments, the AAV particle comprises a viral genome comprising SEQ ID NO: 2269 and a capsid comprising SEQ ID NO: 4534. In some embodiments, the AAV particle comprises a viral genome comprising SEQ ID NO: 2269 and a capsid encoded by a nucleic acid sequence comprising SEQ ID NO: 3. In some embodiments, the AAV particle comprises a viral genome comprising SEQ ID NO: 2269 and a capsid comprising SEQ ID NO: 138. In some embodiments, the AAV particle comprises a viral genome comprising SEQ ID NO: 2269 and a capsid encoded by a nucleic acid sequence comprising SEQ ID NO: 137. In some embodiments, the AAV particle comprises a viral genome comprising SEQ ID NO: 2269 and a capsid comprising SEQ ID NO: 5. In some embodiments, the AAV particle comprises a viral genome comprising SEQ ID NO: 2269 and a capsid encoded by a nucleic acid sequence comprising SEQ ID NO: 6. In some embodiments, the AAV particle comprises a viral genome comprising SEQ ID NO: 2269 and a capsid comprising SEQ ID NO: 4. In some embodiments, the AAV particle comprises a viral genome comprising SEQ ID NO: 2269 and a capsid comprising SEQ ID NO: 11. In some embodiments, the AAV particle comprises a viral genome comprising SEQ ID NO: 2269 and a capsid comprising SEQ ID NO: 2679. In some embodiments, the AAV particle comprises a viral genome comprising SEQ ID NO: 2269 and a capsid comprising SEQ ID NO: 2809. In some embodiments, the AAV particle comprises a viral genome comprising SEQ ID NO: 2269 and a capsid comprising SEQ ID NO: 2871.

[0944] In some embodiments, the AAV particle comprises a viral genome comprising SEQ ID NO: 2270 and a VOY101 capsid. In some embodiments, the AAV particle comprises a viral genome comprising SEQ ID NO: 2270 and a VOY201 capsid. In some embodiments, the AAV particle comprises a viral genome comprising SEQ ID NO: 2270 and an AAV9 capsid. In some embodiments, the AAV particle comprises a viral genome comprising SEQ ID NO: 2270 and an AAV9K449R capsid. In some embodiments, the AAV particle comprises a viral genome comprising SEQ ID NO: 2270 and an AAVPHP.B capsid. In some embodiments, the AAV particle comprises a viral genome comprising SEQ ID NO: 2270 and an AAVPHP.N capsid. In some embodiments, the AAV particle comprises a viral genome comprising SEQ ID NO: 2270 and an AAV2 variant capsid. In some embodiments, the AAV particle comprises a viral genome comprising SEQ ID NO: 2270 and an AAV2/3 variant capsid. In some embodiments, the AAV particle comprises a viral genome comprising SEQ ID NO: 2270 and a capsid comprising SEQ ID NO: 1. In some embodiments, the AAV particle comprises a viral genome comprising SEQ ID NO: 2270 and a capsid encoded by a nucleic acid sequence comprising SEQ ID NO: 2. In some embodiments, the AAV particle comprises a viral genome comprising SEQ ID NO: 2270 and a capsid comprising SEQ ID NO: 4534. In some embodiments, the AAV particle comprises a viral genome comprising SEQ ID NO: 2270 and a capsid encoded by a nucleic acid sequence comprising SEQ ID NO: 3. In some embodiments, the AAV particle comprises a viral genome comprising SEQ ID NO: 2270 and a capsid comprising SEQ ID NO: 138. In some embodiments, the AAV particle comprises a viral genome comprising SEQ ID NO: 2270 and a capsid encoded by a nucleic acid sequence comprising SEQ ID NO: 137. In some embodiments, the AAV particle comprises a viral genome comprising SEQ ID NO: 2270 and a capsid comprising SEQ ID NO: 5. In some embodiments, the AAV particle comprises a viral genome comprising SEQ ID NO: 2270 and a capsid encoded by a nucleic acid sequence comprising SEQ ID NO: 6. In some embodiments, the AAV particle comprises a viral genome comprising SEQ ID NO: 2270 and a capsid comprising SEQ ID NO: 4. In some embodiments, the AAV particle comprises a viral genome comprising SEQ ID NO: 2270 and a capsid comprising SEQ ID NO: 11. In some embodiments, the AAV particle comprises a viral genome comprising SEQ ID NO: 2270 and a capsid comprising SEQ ID NO: 2679. In some embodiments, the AAV particle comprises a viral genome comprising SEQ ID NO: 2270 and a capsid comprising SEQ ID NO: 2809. In some embodiments, the AAV particle comprises a viral genome comprising SEQ ID NO: 2270 and a capsid comprising SEQ ID NO: 2871.

[0945] In some embodiments, the AAV particle comprises a viral genome comprising SEQ ID NO: 2271 and a VOY101 capsid. In some embodiments, the AAV particle comprises a viral genome comprising SEQ ID NO: 2271 and a VOY201 capsid. In some embodiments, the AAV particle comprises a viral genome comprising SEQ ID NO: 2271 and an AAV9 capsid. In some embodiments, the AAV particle comprises a viral genome comprising SEQ ID NO: 2271 and an AAV9K449R capsid. In some embodiments, the AAV particle comprises a viral genome comprising SEQ ID NO: 2271 and an AAVPHP.B capsid. In some embodiments, the AAV particle comprises a viral genome comprising SEQ ID NO: 2271 and an AAVPHP.N capsid. In some embodiments, the AAV particle comprises a viral genome comprising SEQ ID NO: 2271 and an AAV2 variant capsid. In some embodiments, the AAV particle comprises a viral genome comprising SEQ ID NO: 2271 and an AAV2/3 variant capsid. In some embodiments, the AAV particle comprises a viral genome comprising SEQ ID NO: 2271 and a capsid comprising SEQ ID NO: 1. In some embodiments, the AAV particle comprises a viral genome comprising SEQ ID NO: 2271 and a capsid encoded by a nucleic acid sequence comprising SEQ ID NO: 2. In some embodiments, the AAV particle comprises a viral genome comprising SEQ ID NO: 2271 and a capsid comprising SEQ ID NO: 4534. In some embodiments, the AAV particle comprises a viral genome comprising SEQ ID NO: 2271 and a capsid encoded by a nucleic acid sequence comprising SEQ ID NO: 3. In some embodiments, the AAV particle comprises a viral genome comprising SEQ ID NO: 2271 and a capsid comprising SEQ ID NO: 138. In some embodiments, the AAV particle comprises a viral genome comprising SEQ ID NO: 2271 and a capsid encoded by a nucleic acid sequence comprising SEQ ID NO: 137. In some embodiments, the AAV particle comprises a viral genome comprising SEQ ID NO: 2271 and a capsid comprising SEQ ID NO: 5. In some embodiments, the AAV particle comprises a viral genome comprising SEQ ID NO: 2271 and a capsid encoded by a nucleic acid sequence comprising SEQ ID NO: 6. In some embodiments, the AAV particle comprises a viral genome comprising SEQ ID NO: 2271 and a capsid comprising SEQ ID NO: 4. In some embodiments, the AAV particle comprises a viral genome comprising SEQ ID NO: 2271 and a capsid comprising SEQ ID NO: 11. In some embodiments, the AAV particle comprises a viral genome comprising SEQ ID NO: 2271 and a capsid comprising SEQ ID NO: 2679. In some embodiments, the AAV particle comprises a viral genome comprising SEQ ID NO: 2271 and a capsid comprising SEQ ID NO: 2809. In some embodiments, the AAV particle comprises a viral genome comprising SEQ ID NO: 2271 and a capsid comprising SEQ ID NO: 2871.

[0946] In some embodiments, the AAV particle comprises a viral genome comprising SEQ ID NO: 2272 and a VOY101 capsid. In some embodiments, the AAV particle comprises a viral genome comprising SEQ ID NO: 2272 and a VOY201 capsid. In some embodiments, the AAV particle comprises a viral genome comprising SEQ ID NO: 2272 and an AAV9 capsid. In some embodiments, the AAV particle comprises a viral genome comprising SEQ ID NO: 2272 and an AAV9K449R capsid. In some embodiments, the AAV particle comprises a viral genome comprising SEQ ID NO: 2272 and an AAVPHP.B capsid. In some embodiments, the AAV particle comprises a viral genome comprising SEQ ID NO: 2272 and an AAVPHP.N capsid. In some embodiments, the AAV particle comprises a viral genome comprising SEQ ID NO: 2272 and an AAV2 variant capsid. In some embodiments, the AAV particle comprises a viral genome comprising SEQ ID NO: 2272 and an AAV2/3 variant capsid. In some embodiments, the AAV particle comprises a viral genome comprising SEQ ID NO: 2272 and a capsid comprising SEQ ID NO: 1. In some embodiments, the AAV particle comprises a viral genome comprising SEQ ID NO: 2272 and a capsid encoded by a nucleic acid sequence comprising SEQ ID NO: 2. In some embodiments, the AAV particle comprises a viral genome comprising SEQ ID NO: 2272 and a capsid comprising SEQ ID NO: 4534. In some embodiments, the AAV particle comprises a viral genome comprising SEQ ID NO: 2272 and a capsid encoded by a nucleic acid sequence comprising SEQ ID NO: 3. In some embodiments, the AAV particle comprises a viral genome comprising SEQ ID NO: 2272 and a capsid comprising SEQ ID NO: 138. In some embodiments, the AAV particle comprises a viral genome comprising SEQ ID NO: 2272 and a capsid encoded by a nucleic acid sequence comprising SEQ ID NO: 137. In some embodiments, the AAV particle comprises a viral genome comprising SEQ ID NO: 2272 and a capsid comprising SEQ ID NO: 5. In some embodiments, the AAV particle comprises a viral genome comprising SEQ ID NO: 2272 and a capsid encoded by a nucleic acid sequence comprising SEQ ID NO: 6. In some embodiments, the AAV particle comprises a viral genome comprising SEQ ID NO: 2272 and a capsid comprising SEQ ID NO: 4. In some embodiments, the AAV particle comprises a viral genome comprising SEQ ID NO: 2272 and a capsid comprising SEQ ID NO: 11. In some embodiments, the AAV particle comprises a viral genome comprising SEQ ID NO: 2272 and a capsid comprising SEQ ID NO: 2679. In some embodiments, the AAV particle comprises a viral genome comprising SEQ ID NO: 2272 and a capsid comprising SEQ ID NO: 2809. In some embodiments, the AAV particle comprises a viral genome comprising SEQ ID NO: 2272 and a capsid comprising SEQ ID NO: 2871.

[0947] In some embodiments, the AAV particle comprises a viral genome comprising SEQ ID NO: 2273 and a VOY101 capsid. In some embodiments, the AAV particle comprises a viral genome comprising SEQ ID NO: 2273 and a VOY201 capsid. In some embodiments, the AAV particle comprises a viral genome comprising SEQ ID NO: 2273 and an AAV9 capsid. In some embodiments, the AAV particle comprises a viral genome comprising SEQ ID NO: 2273 and an AAV9K449R capsid. In some embodiments, the AAV particle comprises a viral genome comprising SEQ ID NO: 2273 and an AAVPHP.B capsid. In some embodiments, the AAV particle comprises a viral genome comprising SEQ ID NO: 2273 and an AAVPHP.N capsid. In some embodiments, the AAV particle comprises a viral genome comprising SEQ ID NO: 2273 and an AAV2 variant capsid. In some embodiments, the AAV particle comprises a viral genome comprising SEQ ID NO: 2273 and an AAV2/3 variant capsid. In some embodiments, the AAV particle comprises a viral genome comprising SEQ ID NO: 2273 and a capsid comprising SEQ ID NO: 1. In some embodiments, the AAV particle comprises a viral genome comprising SEQ ID NO: 2273 and a capsid encoded by a nucleic acid sequence comprising SEQ ID NO: 2. In some embodiments, the AAV particle comprises a viral genome comprising SEQ ID NO: 2273 and a capsid comprising SEQ ID NO: 4534. In some embodiments, the AAV particle comprises a viral genome comprising SEQ ID NO: 2273 and a capsid encoded by a nucleic acid sequence comprising SEQ ID NO: 3. In some embodiments, the AAV particle comprises a viral genome comprising SEQ ID NO: 2273 and a capsid comprising SEQ ID NO: 138. In some embodiments, the AAV particle comprises a viral genome comprising SEQ ID NO: 2273 and a capsid encoded by a nucleic acid sequence comprising SEQ ID NO: 137. In some embodiments, the AAV particle comprises a viral genome comprising SEQ ID NO: 2273 and a capsid comprising SEQ ID NO: 5. In some embodiments, the AAV particle comprises a viral genome comprising SEQ ID NO: 2273 and a capsid encoded by a nucleic acid sequence comprising SEQ ID NO: 6. In some embodiments, the AAV particle comprises a viral genome comprising SEQ ID NO: 2273 and a capsid comprising SEQ ID NO: 4. In some embodiments, the AAV particle comprises a viral genome comprising SEQ ID NO: 2273 and a capsid comprising SEQ ID NO: 11. In some embodiments, the AAV particle comprises a viral genome comprising SEQ ID NO: 2273 and a capsid comprising SEQ ID NO: 2679. In some embodiments, the AAV particle comprises a viral genome comprising SEQ ID NO: 2273 and a capsid comprising SEQ ID NO: 2809. In some embodiments, the AAV particle comprises a viral genome comprising SEQ ID NO: 2273 and a capsid comprising SEQ ID NO: 2871.

[0948] In some embodiments, the AAV particle comprises a viral genome comprising SEQ ID NO: 2274 and a VOY101 capsid. In some embodiments, the AAV particle comprises a viral genome comprising SEQ ID NO: 2274 and a VOY201 capsid. In some embodiments, the AAV particle comprises a viral genome comprising SEQ ID NO: 2274 and an AAV9 capsid. In some embodiments, the AAV particle comprises a viral genome comprising SEQ ID NO: 2274 and an AAV9K449R capsid. In some embodiments, the AAV particle comprises a viral genome comprising SEQ ID NO: 2274 and an AAVPHP.B capsid. In some embodiments, the AAV particle comprises a viral genome comprising SEQ ID NO: 2274 and an AAVPHP.N capsid. In some embodiments, the AAV particle comprises a viral genome comprising SEQ ID NO: 2274 and an AAV2 variant capsid. In some embodiments, the AAV particle comprises a viral genome comprising SEQ ID NO: 2274 and an AAV2/3 variant capsid. In some embodiments, the AAV particle comprises a viral genome comprising SEQ ID NO: 2274 and a capsid comprising SEQ ID NO: 1. In some embodiments, the AAV particle comprises a viral genome comprising SEQ ID NO: 2274 and a capsid encoded by a nucleic acid sequence comprising SEQ ID NO: 2. In some embodiments, the AAV particle comprises a viral genome comprising SEQ ID NO: 2274 and a capsid comprising SEQ ID NO: 4534. In some embodiments, the AAV particle comprises a viral genome comprising SEQ ID NO: 2274 and a capsid encoded by a nucleic acid sequence comprising SEQ ID NO: 3. In some embodiments, the AAV particle comprises a viral genome comprising SEQ ID NO: 2274 and a capsid comprising SEQ ID NO: 138. In some embodiments, the AAV particle comprises a viral genome comprising SEQ ID NO: 2274 and a capsid encoded by a nucleic acid sequence comprising SEQ ID NO: 137. In some embodiments, the AAV particle comprises a viral genome comprising SEQ ID NO: 2274 and a capsid comprising SEQ ID NO: 5. In some embodiments, the AAV particle comprises a viral genome comprising SEQ ID NO: 2274 and a capsid encoded by a nucleic acid sequence comprising SEQ ID NO: 6. In some embodiments, the AAV particle comprises a viral genome comprising SEQ ID NO: 2274 and a capsid comprising SEQ ID NO: 4. In some embodiments, the AAV particle comprises a viral genome comprising SEQ ID NO: 2274 and a capsid comprising SEQ ID NO: 11. In some embodiments, the AAV particle comprises a viral genome comprising SEQ ID NO: 2274 and a capsid comprising SEQ ID NO: 2679. In some embodiments, the AAV particle comprises a viral genome comprising SEQ ID NO: 2274 and a capsid comprising SEQ ID NO: 2809. In some embodiments, the AAV particle comprises a viral genome comprising SEQ ID NO: 2274 and a capsid comprising SEQ ID NO: 2871.

[0949] In some embodiments, the AAV particle comprises a viral genome comprising SEQ ID NO: 2275 and a VOY101 capsid. In some embodiments, the AAV particle comprises a viral genome comprising SEQ ID NO: 2275 and a VOY201 capsid. In some embodiments, the AAV particle comprises a viral genome comprising SEQ ID NO: 2275 and an AAV9 capsid. In some embodiments, the AAV particle comprises a viral genome comprising SEQ ID NO: 2275 and an AAV9K449R capsid. In some embodiments, the AAV particle comprises a viral genome comprising SEQ ID NO: 2275 and an AAVPHP.B capsid. In some embodiments, the AAV particle comprises a viral genome comprising SEQ ID NO: 2275 and an AAVPHP.N capsid. In some embodiments, the AAV particle comprises a viral genome comprising SEQ ID NO: 2275 and an AAV2 variant capsid. In some embodiments, the AAV particle comprises a viral genome comprising SEQ ID NO: 2275 and an AAV2/3 variant capsid. In some embodiments, the AAV particle comprises a viral genome comprising SEQ ID NO: 2275 and a capsid comprising SEQ ID NO: 1. In some embodiments, the AAV particle comprises a viral genome comprising SEQ ID NO: 2275 and a capsid encoded by a nucleic acid sequence comprising SEQ ID NO: 2. In some embodiments, the AAV particle comprises a viral genome comprising SEQ ID NO: 2275 and a capsid comprising SEQ ID NO: 4534. In some embodiments, the AAV particle comprises a viral genome comprising SEQ ID NO: 2275 and a capsid encoded by a nucleic acid sequence comprising SEQ ID NO: 3. In some embodiments, the AAV particle comprises a viral genome comprising SEQ ID NO: 2275 and a capsid comprising SEQ ID NO: 138. In some embodiments, the AAV particle comprises a viral genome comprising SEQ ID NO: 2275 and a capsid encoded by a nucleic acid sequence comprising SEQ ID NO: 137. In some embodiments, the AAV particle comprises a viral genome comprising SEQ ID NO: 2275 and a capsid comprising SEQ ID NO: 5. In some embodiments, the AAV particle comprises a viral genome comprising SEQ ID NO: 2275 and a capsid encoded by a nucleic acid sequence comprising SEQ ID NO: 6. In some embodiments, the AAV particle comprises a viral genome comprising SEQ ID NO: 2275 and a capsid comprising SEQ ID NO: 4. In some embodiments, the AAV particle comprises a viral genome comprising SEQ ID NO: 2275 and a capsid comprising SEQ ID NO: 11. In some embodiments, the AAV particle comprises a viral genome comprising SEQ ID NO: 2275 and a capsid comprising SEQ ID NO: 2679. In some embodiments, the AAV particle comprises a viral genome comprising SEQ ID NO: 2275 and a capsid comprising SEQ ID NO: 2809. In some embodiments, the AAV particle comprises a viral genome comprising SEQ ID NO: 2275 and a capsid comprising SEQ ID NO: 2871.

[0950] In some embodiments, the AAV particle comprises a viral genome comprising SEQ ID NO: 2276 and a VOY101 capsid. In some embodiments, the AAV particle comprises a viral genome comprising SEQ ID NO: 2276 and a VOY201 capsid. In some embodiments, the AAV particle comprises a viral genome comprising SEQ ID NO: 2276 and an AAV9 capsid. In some embodiments, the AAV particle comprises a viral genome comprising SEQ ID NO: 2276 and an AAV9K449R capsid. In some embodiments, the AAV particle comprises a viral genome comprising SEQ ID NO: 2276 and an AAVPHP.B capsid. In some embodiments, the AAV particle comprises a viral genome comprising SEQ ID NO: 2276 and an AAVPHP.N capsid. In some embodiments, the AAV particle comprises a viral genome comprising SEQ ID NO: 2276 and an AAV2 variant capsid. In some embodiments, the AAV particle comprises a viral genome comprising SEQ ID NO: 2276 and an AAV2/3 variant capsid. In some embodiments, the AAV particle comprises a viral genome comprising SEQ ID NO: 2276 and a capsid comprising SEQ ID NO: 1. In some embodiments, the AAV particle comprises a viral genome comprising SEQ ID NO: 2276 and a capsid encoded by a nucleic acid sequence comprising SEQ ID NO: 2. In some embodiments, the AAV particle comprises a viral genome comprising SEQ ID NO: 2276 and a capsid comprising SEQ ID NO: 4534. In some embodiments, the AAV particle comprises a viral genome comprising SEQ ID NO: 2276 and a capsid encoded by a nucleic acid sequence comprising SEQ ID NO: 3. In some embodiments, the AAV particle comprises a viral genome comprising SEQ ID NO: 2276 and a capsid comprising SEQ ID NO: 138. In some embodiments, the AAV particle comprises a viral genome comprising SEQ ID NO: 2276 and a capsid encoded by a nucleic acid sequence comprising SEQ ID NO: 137. In some embodiments, the AAV particle comprises a viral genome comprising SEQ ID NO: 2276 and a capsid comprising SEQ ID NO: 5. In some embodiments, the AAV particle comprises a viral genome comprising SEQ ID NO: 2276 and a capsid encoded by a nucleic acid sequence comprising SEQ ID NO: 6. In some embodiments, the AAV particle comprises a viral genome comprising SEQ ID NO: 2276 and a capsid comprising SEQ ID NO: 4. In some embodiments, the AAV particle comprises a viral genome comprising SEQ ID NO: 2276 and a capsid comprising SEQ ID NO: 11. In some embodiments, the AAV particle comprises a viral genome comprising SEQ ID NO: 2276 and a capsid comprising SEQ ID NO: 2679. In some embodiments, the AAV particle comprises a viral genome comprising SEQ ID NO: 2276 and a capsid comprising SEQ ID NO: 2809. In some embodiments, the AAV particle comprises a viral genome comprising SEQ ID NO: 2276 and a capsid comprising SEQ ID NO: 2871.

[0951] In some embodiments, the AAV particle comprises a viral genome comprising SEQ ID NO: 2277 and a VOY101 capsid. In some embodiments, the AAV particle comprises a viral genome comprising SEQ ID NO: 2277 and a VOY201 capsid. In some embodiments, the AAV particle comprises a viral genome comprising SEQ ID NO: 2277 and an AAV9 capsid. In some embodiments, the AAV particle comprises a viral genome comprising SEQ ID NO: 2277 and an AAV9K449R capsid. In some embodiments, the AAV particle comprises a viral genome comprising SEQ ID NO: 2277 and an AAVPHP.B capsid. In some embodiments, the AAV particle comprises a viral genome comprising SEQ ID NO: 2277 and an AAVPHP.N capsid. In some embodiments, the AAV particle comprises a viral genome comprising SEQ ID NO: 2277 and an AAV2 variant capsid. In some embodiments, the AAV particle comprises a viral genome comprising SEQ ID NO: 2277 and an AAV2/3 variant capsid. In some embodiments, the AAV particle comprises a viral genome comprising SEQ ID NO: 2277 and a capsid comprising SEQ ID NO: 1. In some embodiments, the AAV particle comprises a viral genome comprising SEQ ID NO: 2277 and a capsid encoded by a nucleic acid sequence comprising SEQ ID NO: 2. In some embodiments, the AAV particle comprises a viral genome comprising SEQ ID NO: 2277 and a capsid comprising SEQ ID NO: 4534. In some embodiments, the AAV particle comprises a viral genome comprising SEQ ID NO: 2277 and a capsid encoded by a nucleic acid sequence comprising SEQ ID NO: 3. In some embodiments, the AAV particle comprises a viral genome comprising SEQ ID NO: 2277 and a capsid comprising SEQ ID NO: 138. In some embodiments, the AAV particle comprises a viral genome comprising SEQ ID NO: 2277 and a capsid encoded by a nucleic acid sequence comprising SEQ ID NO: 137. In some embodiments, the AAV particle comprises a viral genome comprising SEQ ID NO: 2277 and a capsid comprising SEQ ID NO: 5. In some embodiments, the AAV particle comprises a viral genome comprising SEQ ID NO: 2277 and a capsid encoded by a nucleic acid sequence comprising SEQ ID NO: 6. In some embodiments, the AAV particle comprises a viral genome comprising SEQ ID NO: 2277 and a capsid comprising SEQ ID NO: 4. In some embodiments, the AAV particle comprises a viral genome comprising SEQ ID NO: 2277 and a capsid comprising SEQ ID NO: 11. In some embodiments, the AAV particle comprises a viral genome comprising SEQ ID NO: 2277 and a capsid comprising SEQ ID NO: 2679. In some embodiments, the AAV particle comprises a viral genome comprising SEQ ID NO: 2277 and a capsid comprising SEQ ID NO: 2809. In some embodiments, the AAV particle comprises a viral genome comprising SEQ ID NO: 2277 and a capsid comprising SEQ ID NO: 2871.

[0952] In some embodiments, the AAV particle comprises a viral genome comprising SEQ ID NO: 2278 and a VOY101 capsid. In some embodiments, the AAV particle comprises a viral genome comprising SEQ ID NO: 2278 and a VOY201 capsid. In some embodiments, the AAV particle comprises a viral genome comprising SEQ ID NO: 2278 and an AAV9 capsid. In some embodiments, the AAV particle comprises a viral genome comprising SEQ ID NO: 2278 and an AAV9K449R capsid. In some embodiments, the AAV particle comprises a viral genome comprising SEQ ID NO: 2278 and an AAVPHP.B capsid. In some embodiments, the AAV particle comprises a viral genome comprising SEQ ID NO: 2278 and an AAVPHP.N capsid. In some embodiments, the AAV particle comprises a viral genome comprising SEQ ID NO: 2278 and an AAV2 variant capsid. In some embodiments, the AAV particle comprises a viral genome comprising SEQ ID NO: 2278 and an AAV2/3 variant capsid. In some embodiments, the AAV particle comprises a viral genome comprising SEQ ID NO: 2278 and a capsid comprising SEQ ID NO: 1. In some embodiments, the AAV particle comprises a viral genome comprising SEQ ID NO: 2278 and a capsid encoded by a nucleic acid sequence comprising SEQ ID NO: 2. In some embodiments, the AAV particle comprises a viral genome comprising SEQ ID NO: 2278 and a capsid comprising SEQ ID NO: 4534. In some embodiments, the AAV particle comprises a viral genome comprising SEQ ID NO: 2278 and a capsid encoded by a nucleic acid sequence comprising SEQ ID NO: 3. In some embodiments, the AAV particle comprises a viral genome comprising SEQ ID NO: 2278 and a capsid comprising SEQ ID NO: 138. In some embodiments, the AAV particle comprises a viral genome comprising SEQ ID NO: 2278 and a capsid encoded by a nucleic acid sequence comprising SEQ ID NO: 137. In some embodiments, the AAV particle comprises a viral genome comprising SEQ ID NO: 2278 and a capsid comprising SEQ ID NO: 5. In some embodiments, the AAV particle comprises a viral genome comprising SEQ ID NO: 2278 and a capsid encoded by a nucleic acid sequence comprising SEQ ID NO: 6. In some embodiments, the AAV particle comprises a viral genome comprising SEQ ID NO: 2278 and a capsid comprising SEQ ID NO: 4. In some embodiments, the AAV particle comprises a viral genome comprising SEQ ID NO: 2278 and a capsid comprising SEQ ID NO: 11. In some embodiments, the AAV particle comprises a viral genome comprising SEQ ID NO: 2278 and a capsid comprising SEQ ID NO: 2679. In some embodiments, the AAV particle comprises a viral genome comprising SEQ ID NO: 2278 and a capsid comprising SEQ ID NO: 2809. In some embodiments, the AAV particle comprises a viral genome comprising SEQ ID NO: 2278 and a capsid comprising SEQ ID NO: 2871.

[0953] In some embodiments, the AAV particle comprises a viral genome comprising SEQ ID NO: 2279 and a VOY101 capsid. In some embodiments, the AAV particle comprises a viral genome comprising SEQ ID NO: 2279 and a VOY201 capsid. In some embodiments, the AAV particle comprises a viral genome comprising SEQ ID NO: 2279 and an AAV9 capsid. In some embodiments, the AAV particle comprises a viral genome comprising SEQ ID NO: 2279 and an AAV9K449R capsid. In some embodiments, the AAV particle comprises a viral genome comprising SEQ ID NO: 2279 and an AAVPHP.B capsid. In some embodiments, the AAV particle comprises a viral genome comprising SEQ ID NO: 2279 and an AAVPHP.N capsid. In some embodiments, the AAV particle comprises a viral genome comprising SEQ ID NO: 2279 and an AAV2 variant capsid. In some embodiments, the AAV particle comprises a viral genome comprising SEQ ID NO: 2279 and an AAV2/3 variant capsid. In some embodiments, the AAV particle comprises a viral genome comprising SEQ ID NO: 2279 and a capsid comprising SEQ ID NO: 1. In some embodiments, the AAV particle comprises a viral genome comprising SEQ ID NO: 2279 and a capsid encoded by a nucleic acid sequence comprising SEQ ID NO: 2. In some embodiments, the AAV particle comprises a viral genome comprising SEQ ID NO: 2279 and a capsid comprising SEQ ID NO: 4534. In some embodiments, the AAV particle comprises a viral genome comprising SEQ ID NO: 2279 and a capsid encoded by a nucleic acid sequence comprising SEQ ID NO: 3. In some embodiments, the AAV particle comprises a viral genome comprising SEQ ID NO: 2279 and a capsid comprising SEQ ID NO: 138. In some embodiments, the AAV particle comprises a viral genome comprising SEQ ID NO: 2279 and a capsid encoded by a nucleic acid sequence comprising SEQ ID NO: 137. In some embodiments, the AAV particle comprises a viral genome comprising SEQ ID NO: 2279 and a capsid comprising SEQ ID NO: 5. In some embodiments, the AAV particle comprises a viral genome comprising SEQ ID NO: 2279 and a capsid encoded by a nucleic acid sequence comprising SEQ ID NO: 6. In some embodiments, the AAV particle comprises a viral genome comprising SEQ ID NO: 2279 and a capsid comprising SEQ ID NO: 4. In some embodiments, the AAV particle comprises a viral genome comprising SEQ ID NO: 2279 and a capsid comprising SEQ ID NO: 11. In some embodiments, the AAV particle comprises a viral genome comprising SEQ ID NO: 2279 and a capsid comprising SEQ ID NO: 2679. In some embodiments, the AAV particle comprises a viral genome comprising SEQ ID NO: 2279 and a capsid comprising SEQ ID NO: 2809. In some embodiments, the AAV particle comprises a viral genome comprising SEQ ID NO: 2279 and a capsid comprising SEQ ID NO: 2871.

[0954] In some embodiments, the AAV particle comprises a viral genome comprising SEQ ID NO: 2280 and a VOY101 capsid. In some embodiments, the AAV particle comprises a viral genome comprising SEQ ID NO: 2280 and a VOY201 capsid. In some embodiments, the AAV particle comprises a viral genome comprising SEQ ID NO: 2280 and an AAV9 capsid. In some embodiments, the AAV particle comprises a viral genome comprising SEQ ID NO: 2280 and an AAV9K449R capsid. In some embodiments, the AAV particle comprises a viral genome comprising SEQ ID NO: 2280 and an AAVPHP.B capsid. In some embodiments, the AAV particle comprises a viral genome comprising SEQ ID NO: 2280 and an AAVPHP.N capsid. In some embodiments, the AAV particle comprises a viral genome comprising SEQ ID NO: 2280 and an AAV2 variant capsid. In some embodiments, the AAV particle comprises a viral genome comprising SEQ ID NO: 2280 and an AAV2/3 variant capsid. In some embodiments, the AAV particle comprises a viral genome comprising SEQ ID NO: 2280 and a capsid comprising SEQ ID NO: 1. In some embodiments, the AAV particle comprises a viral genome comprising SEQ ID NO: 2280 and a capsid encoded by a nucleic acid sequence comprising SEQ ID NO: 2. In some embodiments, the AAV particle comprises a viral genome comprising SEQ ID NO: 2280 and a capsid comprising SEQ ID NO: 4534. In some embodiments, the AAV particle comprises a viral genome comprising SEQ ID NO: 2280 and a capsid encoded by a nucleic acid sequence comprising SEQ ID NO: 3. In some embodiments, the AAV particle comprises a viral genome comprising SEQ ID NO: 2280 and a capsid comprising SEQ ID NO: 138. In some embodiments, the AAV particle comprises a viral genome comprising SEQ ID NO: 2280 and a capsid encoded by a nucleic acid sequence comprising SEQ ID NO: 137. In some embodiments, the AAV particle comprises a viral genome comprising SEQ ID NO: 2280 and a capsid comprising SEQ ID NO: 5. In some embodiments, the AAV particle comprises a viral genome comprising SEQ ID NO: 2280 and a capsid encoded by a nucleic acid sequence comprising SEQ ID NO: 6. In some embodiments, the AAV particle comprises a viral genome comprising SEQ ID NO: 2280 and a capsid comprising SEQ ID NO: 4. In some embodiments, the AAV particle comprises a viral genome comprising SEQ ID NO: 2280 and a capsid comprising SEQ ID NO: 11. In some embodiments, the AAV particle comprises a viral genome comprising SEQ ID NO: 2280 and a capsid comprising SEQ ID NO: 2679. In some embodiments, the AAV particle comprises a viral genome comprising SEQ ID NO: 2280 and a capsid comprising SEQ ID NO: 2809. In some embodiments, the AAV particle comprises a viral genome comprising SEQ ID NO: 2280 and a capsid comprising SEQ ID NO: 2871.

[0955] In some embodiments, the AAV particle comprises a viral genome comprising SEQ ID NO: 2281 and a VOY101 capsid. In some embodiments, the AAV particle comprises a viral genome comprising SEQ ID NO: 2281 and a VOY201 capsid. In some embodiments, the AAV particle comprises a viral genome comprising SEQ ID NO: 2281 and an AAV9 capsid. In some embodiments, the AAV particle comprises a viral genome comprising SEQ ID NO: 2281 and an AAV9K449R capsid. In some embodiments, the AAV particle comprises a viral genome comprising SEQ ID NO: 2281 and an AAVPHP.B capsid. In some embodiments, the AAV particle comprises a viral genome comprising SEQ ID NO: 2281 and an AAVPHP.N capsid. In some embodiments, the AAV particle comprises a viral genome comprising SEQ ID NO: 2281 and an AAV2 variant capsid. In some embodiments, the AAV particle comprises a viral genome comprising SEQ ID NO: 2281 and an AAV2/3 variant capsid. In some embodiments, the AAV particle comprises a viral genome comprising SEQ ID NO: 2281 and a capsid comprising SEQ ID NO: 1. In some embodiments, the AAV particle comprises a viral genome comprising SEQ ID NO: 2281 and a capsid encoded by a nucleic acid sequence comprising SEQ ID NO: 2. In some embodiments, the AAV particle comprises a viral genome comprising SEQ ID NO: 2281 and a capsid comprising SEQ ID NO: 4534. In some embodiments, the AAV particle comprises a viral genome comprising SEQ ID NO: 2281 and a capsid encoded by a nucleic acid sequence comprising SEQ ID NO: 3. In some embodiments, the AAV particle comprises a viral genome comprising SEQ ID NO: 2281 and a capsid comprising SEQ ID NO: 138. In some embodiments, the AAV particle comprises a viral genome comprising SEQ ID NO: 2281 and a capsid encoded by a nucleic acid sequence comprising SEQ ID NO: 137. In some embodiments, the AAV particle comprises a viral genome comprising SEQ ID NO: 2281 and a capsid comprising SEQ ID NO: 5. In some embodiments, the AAV particle comprises a viral genome comprising SEQ ID NO: 2281 and a capsid encoded by a nucleic acid sequence comprising SEQ ID NO: 6. In some embodiments, the AAV particle comprises a viral genome comprising SEQ ID NO: 2281 and a capsid comprising SEQ ID NO: 4. In some embodiments, the AAV particle comprises a viral genome comprising SEQ ID NO: 2281 and a capsid comprising SEQ ID NO: 11. In some embodiments, the AAV particle comprises a viral genome comprising SEQ ID NO: 2281 and a capsid comprising SEQ ID NO: 2679. In some embodiments, the AAV particle comprises a viral genome comprising SEQ ID NO: 2281 and a capsid comprising SEQ ID NO: 2809. In some embodiments, the AAV particle comprises a viral genome comprising SEQ ID NO: 2281 and a capsid comprising SEQ ID NO: 2871.

[0956] In some embodiments, the AAV particle comprises a viral genome comprising SEQ ID NO: 2282 and a VOY101 capsid. In some embodiments, the AAV particle comprises a viral genome comprising SEQ ID NO: 2282 and a VOY201 capsid. In some embodiments, the AAV particle comprises a viral genome comprising SEQ ID NO: 2282 and an AAV9 capsid. In some embodiments, the AAV particle comprises a viral genome comprising SEQ ID NO: 2282 and an AAV9K449R capsid. In some embodiments, the AAV particle comprises a viral genome comprising SEQ ID NO: 2282 and an AAVPHP.B capsid. In some embodiments, the AAV particle comprises a viral genome comprising SEQ ID NO: 2282 and an AAVPHP.N capsid. In some embodiments, the AAV particle comprises a viral genome comprising SEQ ID NO: 2282 and an AAV2 variant capsid. In some embodiments, the AAV particle comprises a viral genome comprising SEQ ID NO: 2282 and an AAV2/3 variant capsid. In some embodiments, the AAV particle comprises a viral genome comprising SEQ ID NO: 2282 and a capsid comprising SEQ ID NO: 1. In some embodiments, the AAV particle comprises a viral genome comprising SEQ ID NO: 2282 and a capsid encoded by a nucleic acid sequence comprising SEQ ID NO: 2. In some embodiments, the AAV particle comprises a viral genome comprising SEQ ID NO: 2282 and a capsid comprising SEQ ID NO: 4534. In some embodiments, the AAV particle comprises a viral genome comprising SEQ ID NO: 2282 and a capsid encoded by a nucleic acid sequence comprising SEQ ID NO: 3. In some embodiments, the AAV particle comprises a viral genome comprising SEQ ID NO: 2282 and a capsid comprising SEQ ID NO: 138. In some embodiments, the AAV particle comprises a viral genome comprising SEQ ID NO: 2282 and a capsid encoded by a nucleic acid sequence comprising SEQ ID NO: 137. In some embodiments, the AAV particle comprises a viral genome comprising SEQ ID NO: 2282 and a capsid comprising SEQ ID NO: 5. In some embodiments, the AAV particle comprises a viral genome comprising SEQ ID NO: 2282 and a capsid encoded by a nucleic acid sequence comprising SEQ ID NO: 6. In some embodiments, the AAV particle comprises a viral genome comprising SEQ ID NO: 2282 and a capsid comprising SEQ ID NO: 4. In some embodiments, the AAV particle comprises a viral genome comprising SEQ ID NO: 2282 and a capsid comprising SEQ ID NO: 11. In some embodiments, the AAV particle comprises a viral genome comprising SEQ ID NO: 2282 and a capsid comprising SEQ ID NO: 2679. In some embodiments, the AAV particle comprises a viral genome comprising SEQ ID NO: 2282 and a capsid comprising SEQ ID NO: 2809. In some embodiments, the AAV particle comprises a viral genome comprising SEQ ID NO: 2282 and a capsid comprising SEQ ID NO: 2871.

[0957] In some embodiments, the AAV particle comprises a viral genome comprising SEQ ID NO: 2283 and a VOY101 capsid. In some embodiments, the AAV particle comprises a viral genome comprising SEQ ID NO: 2283 and a VOY201 capsid. In some embodiments, the AAV particle comprises a viral genome comprising SEQ ID NO: 2283 and an AAV9 capsid. In some embodiments, the AAV particle comprises a viral genome comprising SEQ ID NO: 2283 and an AAV9K449R capsid. In some embodiments, the AAV particle comprises a viral genome comprising SEQ ID NO: 2283 and an AAVPHP.B capsid. In some embodiments, the AAV particle comprises a viral genome comprising SEQ ID NO: 2283 and an AAVPHP.N capsid. In some embodiments, the AAV particle comprises a viral genome comprising SEQ ID NO: 2283 and an AAV2 variant capsid. In some embodiments, the AAV particle comprises a viral genome comprising SEQ ID NO: 2283 and an AAV2/3 variant capsid. In some embodiments, the AAV particle comprises a viral genome comprising SEQ ID NO: 2283 and a capsid comprising SEQ ID NO: 1. In some embodiments, the AAV particle comprises a viral genome comprising SEQ ID NO: 2283 and a capsid encoded by a nucleic acid sequence comprising SEQ ID NO: 2. In some embodiments, the AAV particle comprises a viral genome comprising SEQ ID NO: 2283 and a capsid comprising SEQ ID NO: 4534. In some embodiments, the AAV particle comprises a viral genome comprising SEQ ID NO: 2283 and a capsid encoded by a nucleic acid sequence comprising SEQ ID NO: 3. In some embodiments, the AAV particle comprises a viral genome comprising SEQ ID NO: 2283 and a capsid comprising SEQ ID NO: 138. In some embodiments, the AAV particle comprises a viral genome comprising SEQ ID NO: 2283 and a capsid encoded by a nucleic acid sequence comprising SEQ ID NO: 137. In some embodiments, the AAV particle comprises a viral genome comprising SEQ ID NO: 2283 and a capsid comprising SEQ ID NO: 5. In some embodiments, the AAV particle comprises a viral genome comprising SEQ ID NO: 2283 and a capsid encoded by a nucleic acid sequence comprising SEQ ID NO: 6. In some embodiments, the AAV particle comprises a viral genome comprising SEQ ID NO: 2283 and a capsid comprising SEQ ID NO: 4. In some embodiments, the AAV particle comprises a viral genome comprising SEQ ID NO: 2283 and a capsid comprising SEQ ID NO: 11. In some embodiments, the AAV particle comprises a viral genome comprising SEQ ID NO: 2283 and a capsid comprising SEQ ID NO: 2679. In some embodiments, the AAV particle comprises a viral genome comprising SEQ ID NO: 2283 and a capsid comprising SEQ ID NO: 2809. In some embodiments, the AAV particle comprises a viral genome comprising SEQ ID NO: 2283 and a capsid comprising SEQ ID NO: 2871.

[0958] In some embodiments, the AAV particle comprises a viral genome comprising SEQ ID NO: 2284 and a VOY101 capsid. In some embodiments, the AAV particle comprises a viral genome comprising SEQ ID NO: 2284 and a VOY201 capsid. In some embodiments, the AAV particle comprises a viral genome comprising SEQ ID NO: 2284 and an AAV9 capsid. In some embodiments, the AAV particle comprises a viral genome comprising SEQ ID NO: 2284 and an AAV9K449R capsid. In some embodiments, the AAV particle comprises a viral genome comprising SEQ ID NO: 2284 and an AAVPHP.B capsid. In some embodiments, the AAV particle comprises a viral genome comprising SEQ ID NO: 2284 and an AAVPHP.N capsid. In some embodiments, the AAV particle comprises a viral genome comprising SEQ ID NO: 2284 and an AAV2 variant capsid. In some embodiments, the AAV particle comprises a viral genome comprising SEQ ID NO: 2284 and an AAV2/3 variant capsid. In some embodiments, the AAV particle comprises a viral genome comprising SEQ ID NO: 2284 and a capsid comprising SEQ ID NO: 1. In some embodiments, the AAV particle comprises a viral genome comprising SEQ ID NO: 2284 and a capsid encoded by a nucleic acid sequence comprising SEQ ID NO: 2. In some embodiments, the AAV particle comprises a viral genome comprising SEQ ID NO: 2284 and a capsid comprising SEQ ID NO: 4534. In some embodiments, the AAV particle comprises a viral genome comprising SEQ ID NO: 2284 and a capsid encoded by a nucleic acid sequence comprising SEQ ID NO: 3. In some embodiments, the AAV particle comprises a viral genome comprising SEQ ID NO: 2284 and a capsid comprising SEQ ID NO: 138. In some embodiments, the AAV particle comprises a viral genome comprising SEQ ID NO: 2284 and a capsid encoded by a nucleic acid sequence comprising SEQ ID NO: 137. In some embodiments, the AAV particle comprises a viral genome comprising SEQ ID NO: 2284 and a capsid comprising SEQ ID NO: 5. In some embodiments, the AAV particle comprises a viral genome comprising SEQ ID NO: 2284 and a capsid encoded by a nucleic acid sequence comprising SEQ ID NO: 6. In some embodiments, the AAV particle comprises a viral genome comprising SEQ ID NO: 2284 and a capsid comprising SEQ ID NO: 4. In some embodiments, the AAV particle comprises a viral genome comprising SEQ ID NO: 2284 and a capsid comprising SEQ ID NO: 11. In some embodiments, the AAV particle comprises a viral genome comprising SEQ ID NO: 2284 and a capsid comprising SEQ ID NO: 2679. In some embodiments, the AAV particle comprises a viral genome comprising SEQ ID NO: 2284 and a capsid comprising SEQ ID NO: 2809. In some embodiments, the AAV particle comprises a viral genome comprising SEQ ID NO: 2284 and a capsid comprising SEQ ID NO: 2871.

[0959] In some embodiments, the AAV particle comprises a viral genome comprising SEQ ID NO: 2285 and a VOY101 capsid. In some embodiments, the AAV particle comprises a viral genome comprising SEQ ID NO: 2285 and a VOY201 capsid. In some embodiments, the AAV particle comprises a viral genome comprising SEQ ID NO: 2285 and an AAV9 capsid. In some embodiments, the AAV particle comprises a viral genome comprising SEQ ID NO: 2285 and an AAV9K449R capsid. In some embodiments, the AAV particle comprises a viral genome comprising SEQ ID NO: 2285 and an AAVPHP.B capsid. In some embodiments, the AAV particle comprises a viral genome comprising SEQ ID NO: 2285 and an AAVPHP.N capsid. In some embodiments, the AAV particle comprises a viral genome comprising SEQ ID NO: 2285 and an AAV2 variant capsid. In some embodiments, the AAV particle comprises a viral genome comprising SEQ ID NO: 2285 and an AAV2/3 variant capsid. In some embodiments, the AAV particle comprises a viral genome comprising SEQ ID NO: 2285 and a capsid comprising SEQ ID NO: 1. In some embodiments, the AAV particle comprises a viral genome comprising SEQ ID NO: 2285 and a capsid encoded by a nucleic acid sequence comprising SEQ ID NO: 2. In some embodiments, the AAV particle comprises a viral genome comprising SEQ ID NO: 2285 and a capsid comprising SEQ ID NO: 4534. In some embodiments, the AAV particle comprises a viral genome comprising SEQ ID NO: 2285 and a capsid encoded by a nucleic acid sequence comprising SEQ ID NO: 3. In some embodiments, the AAV particle comprises a viral genome comprising SEQ ID NO: 2285 and a capsid comprising SEQ ID NO: 138. In some embodiments, the AAV particle comprises a viral genome comprising SEQ ID NO: 2285 and a capsid encoded by a nucleic acid sequence comprising SEQ ID NO: 137. In some embodiments, the AAV particle comprises a viral genome comprising SEQ ID NO: 2285 and a capsid comprising SEQ ID NO: 5. In some embodiments, the AAV particle comprises a viral genome comprising SEQ ID NO: 2285 and a capsid encoded by a nucleic acid sequence comprising SEQ ID NO: 6. In some embodiments, the AAV particle comprises a viral genome comprising SEQ ID NO: 2285 and a capsid comprising SEQ ID NO: 4. In some embodiments, the AAV particle comprises a viral genome comprising SEQ ID NO: 2285 and a capsid comprising SEQ ID NO: 11. In some embodiments, the AAV particle comprises a viral genome comprising SEQ ID NO: 2285 and a capsid comprising SEQ ID NO: 2679. In some embodiments, the AAV particle comprises a viral genome comprising SEQ ID NO: 2285 and a capsid comprising SEQ ID NO: 2809. In some embodiments, the AAV particle comprises a viral genome comprising SEQ ID NO: 2285 and a capsid comprising SEQ ID NO: 2871.

[0960] In some embodiments, the AAV particle comprises a viral genome comprising SEQ ID NO: 2286 and a VOY101 capsid. In some embodiments, the AAV particle comprises a viral genome comprising SEQ ID NO: 2286 and a VOY201 capsid. In some embodiments, the AAV particle comprises a viral genome comprising SEQ ID NO: 2286 and an AAV9 capsid. In some embodiments, the AAV particle comprises a viral genome comprising SEQ ID NO: 2286 and an AAV9K449R capsid. In some embodiments, the AAV particle comprises a viral genome comprising SEQ ID NO: 2286 and an AAVPHP.B capsid. In some embodiments, the AAV particle comprises a viral genome comprising SEQ ID NO: 2286 and an AAVPHP.N capsid. In some embodiments, the AAV particle comprises a viral genome comprising SEQ ID NO: 2286 and an AAV2 variant capsid. In some embodiments, the AAV particle comprises a viral genome comprising SEQ ID NO: 2286 and an AAV2/3 variant capsid. In some embodiments, the AAV particle comprises a viral genome comprising SEQ ID NO: 2286 and a capsid comprising SEQ ID NO: 1. In some embodiments, the AAV particle comprises a viral genome comprising SEQ ID NO: 2286 and a capsid encoded by a nucleic acid sequence comprising SEQ ID NO: 2. In some embodiments, the AAV particle comprises a viral genome comprising SEQ ID NO: 2286 and a capsid comprising SEQ ID NO: 4534. In some embodiments, the AAV particle comprises a viral genome comprising SEQ ID NO: 2286 and a capsid encoded by a nucleic acid sequence comprising SEQ ID NO: 3. In some embodiments, the AAV particle comprises a viral genome comprising SEQ ID NO: 2286 and a capsid comprising SEQ ID NO: 138. In some embodiments, the AAV particle comprises a viral genome comprising SEQ ID NO: 2286 and a capsid encoded by a nucleic acid sequence comprising SEQ ID NO: 137. In some embodiments, the AAV particle comprises a viral genome comprising SEQ ID NO: 2286 and a capsid comprising SEQ ID NO: 5. In some embodiments, the AAV particle comprises a viral genome comprising SEQ ID NO: 2286 and a capsid encoded by a nucleic acid sequence comprising SEQ ID NO: 6. In some embodiments, the AAV particle comprises a viral genome comprising SEQ ID NO: 2286 and a capsid comprising SEQ ID NO: 4. In some embodiments, the AAV particle comprises a viral genome comprising SEQ ID NO: 2286 and a capsid comprising SEQ ID NO: 11. In some embodiments, the AAV particle comprises a viral genome comprising SEQ ID NO: 2286 and a capsid comprising SEQ ID NO: 2679. In some embodiments, the AAV particle comprises a viral genome comprising SEQ ID NO: 2286 and a capsid comprising SEQ ID NO: 2809. In some embodiments, the AAV particle comprises a viral genome comprising SEQ ID NO: 2286 and a capsid comprising SEQ ID NO: 2871.

[0961] In some embodiments, the AAV particle comprises a viral genome comprising SEQ ID NO: 2287 and a VOY101 capsid. In some embodiments, the AAV particle comprises a viral genome comprising SEQ ID NO: 2287 and a VOY201 capsid. In some embodiments, the AAV particle comprises a viral genome comprising SEQ ID NO: 2287 and an AAV9 capsid. In some embodiments, the AAV particle comprises a viral genome comprising SEQ ID NO: 2287 and an AAV9K449R capsid. In some embodiments, the AAV particle comprises a viral genome comprising SEQ ID NO: 2287 and an AAVPHP.B capsid. In some embodiments, the AAV particle comprises a viral genome comprising SEQ ID NO: 2287 and an AAVPHP.N capsid. In some embodiments, the AAV particle comprises a viral genome comprising SEQ ID NO: 2287 and an AAV2 variant capsid. In some embodiments, the AAV particle comprises a viral genome comprising SEQ ID NO: 2287 and an AAV2/3 variant capsid. In some embodiments, the AAV particle comprises a viral genome comprising SEQ ID NO: 2287 and a capsid comprising SEQ ID NO: 1. In some embodiments, the AAV particle comprises a viral genome comprising SEQ ID NO: 2287 and a capsid encoded by a nucleic acid sequence comprising SEQ ID NO: 2. In some embodiments, the AAV particle comprises a viral genome comprising SEQ ID NO: 2287 and a capsid comprising SEQ ID NO: 4534. In some embodiments, the AAV particle comprises a viral genome comprising SEQ ID NO: 2287 and a capsid encoded by a nucleic acid sequence comprising SEQ ID NO: 3. In some embodiments, the AAV particle comprises a viral genome comprising SEQ ID NO: 2287 and a capsid comprising SEQ ID NO: 138. In some embodiments, the AAV particle comprises a viral genome comprising SEQ ID NO: 2287 and a capsid encoded by a nucleic acid sequence comprising SEQ ID NO: 137. In some embodiments, the AAV particle comprises a viral genome comprising SEQ ID NO: 2287 and a capsid comprising SEQ ID NO: 5. In some embodiments, the AAV particle comprises a viral genome comprising SEQ ID NO: 2287 and a capsid encoded by a nucleic acid sequence comprising SEQ ID NO: 6. In some embodiments, the AAV particle comprises a viral genome comprising SEQ ID NO: 2287 and a capsid comprising SEQ ID NO: 4. In some embodiments, the AAV particle comprises a viral genome comprising SEQ ID NO: 2287 and a capsid comprising SEQ ID NO: 11. In some embodiments, the AAV particle comprises a viral genome comprising SEQ ID NO: 2287 and a capsid comprising SEQ ID NO: 2679. In some embodiments, the AAV particle comprises a viral genome comprising SEQ ID NO: 2287 and a capsid comprising SEQ ID NO: 2809. In some embodiments, the AAV particle comprises a viral genome comprising SEQ ID NO: 2287 and a capsid comprising SEQ ID NO: 2871.

[0962] In some embodiments, the AAV particle comprises a viral genome comprising SEQ ID NO: 2288 and a VOY101 capsid. In some embodiments, the AAV particle comprises a viral genome comprising SEQ ID NO: 2288 and a VOY201 capsid. In some embodiments, the AAV particle comprises a viral genome comprising SEQ ID NO: 2288 and an AAV9 capsid. In some embodiments, the AAV particle comprises a viral genome comprising SEQ ID NO: 2288 and an AAV9K449R capsid. In some embodiments, the AAV particle comprises a viral genome comprising SEQ ID NO: 2288 and an AAVPHP.B capsid. In some embodiments, the AAV particle comprises a viral genome comprising SEQ ID NO: 2288 and an AAVPHP.N capsid. In some embodiments, the AAV particle comprises a viral genome comprising SEQ ID NO: 2288 and an AAV2 variant capsid. In some embodiments, the AAV particle comprises a viral genome comprising SEQ ID NO: 2288 and an AAV2/3 variant capsid. In some embodiments, the AAV particle comprises a viral genome comprising SEQ ID NO: 2288 and a capsid comprising SEQ ID NO: 1. In some embodiments, the AAV particle comprises a viral genome comprising SEQ ID NO: 2288 and a capsid encoded by a nucleic acid sequence comprising SEQ ID NO: 2. In some embodiments, the AAV particle comprises a viral genome comprising SEQ ID NO: 2288 and a capsid comprising SEQ ID NO: 4534. In some embodiments, the AAV particle comprises a viral genome comprising SEQ ID NO: 2288 and a capsid encoded by a nucleic acid sequence comprising SEQ ID NO: 3. In some embodiments, the AAV particle comprises a viral genome comprising SEQ ID NO: 2288 and a capsid comprising SEQ ID NO: 138. In some embodiments, the AAV particle comprises a viral genome comprising SEQ ID NO: 2288 and a capsid encoded by a nucleic acid sequence comprising SEQ ID NO: 137. In some embodiments, the AAV particle comprises a viral genome comprising SEQ ID NO: 2288 and a capsid comprising SEQ ID NO: 5. In some embodiments, the AAV particle comprises a viral genome comprising SEQ ID NO: 2288 and a capsid encoded by a nucleic acid sequence comprising SEQ ID NO: 6. In some embodiments, the AAV particle comprises a viral genome comprising SEQ ID NO: 2288 and a capsid comprising SEQ ID NO: 4. In some embodiments, the AAV particle comprises a viral genome comprising SEQ ID NO: 2288 and a capsid comprising SEQ ID NO: 11. In some embodiments, the AAV particle comprises a viral genome comprising SEQ ID NO: 2288 and a capsid comprising SEQ ID NO: 2679. In some embodiments, the AAV particle comprises a viral genome comprising SEQ ID NO: 2288 and a capsid comprising SEQ ID NO: 2809. In some embodiments, the AAV particle comprises a viral genome comprising SEQ ID NO: 2288 and a capsid comprising SEQ ID NO: 2871.

[0963] In some embodiments, the AAV particle comprises a viral genome comprising SEQ ID NO: 2289 and a VOY101 capsid. In some embodiments, the AAV particle comprises a viral genome comprising SEQ ID NO: 2289 and a VOY201 capsid. In some embodiments, the AAV particle comprises a viral genome comprising SEQ ID NO: 2289 and an AAV9 capsid. In some embodiments, the AAV particle comprises a viral genome comprising SEQ ID NO: 2289 and an AAV9K449R capsid. In some embodiments, the AAV particle comprises a viral genome comprising SEQ ID NO: 2289 and an AAVPHP.B capsid. In some embodiments, the AAV particle comprises a viral genome comprising SEQ ID NO: 2289 and an AAVPHP.N capsid. In some embodiments, the AAV particle comprises a viral genome comprising SEQ ID NO: 2289 and an AAV2 variant capsid. In some embodiments, the AAV particle comprises a viral genome comprising SEQ ID NO: 2289 and an AAV2/3 variant capsid. In some embodiments, the AAV particle comprises a viral genome comprising SEQ ID NO: 2289 and a capsid comprising SEQ ID NO: 1. In some embodiments, the AAV particle comprises a viral genome comprising SEQ ID NO: 2289 and a capsid encoded by a nucleic acid sequence comprising SEQ ID NO: 2. In some embodiments, the AAV particle comprises a viral genome comprising SEQ ID NO: 2289 and a capsid comprising SEQ ID NO: 4534. In some embodiments, the AAV particle comprises a viral genome comprising SEQ ID NO: 2289 and a capsid encoded by a nucleic acid sequence comprising SEQ ID NO: 3. In some embodiments, the AAV particle comprises a viral genome comprising SEQ ID NO: 2289 and a capsid comprising SEQ ID NO: 138. In some embodiments, the AAV particle comprises a viral genome comprising SEQ ID NO: 2289 and a capsid encoded by a nucleic acid sequence comprising SEQ ID NO: 137. In some embodiments, the AAV particle comprises a viral genome comprising SEQ ID NO: 2289 and a capsid comprising SEQ ID NO: 5. In some embodiments, the AAV particle comprises a viral genome comprising SEQ ID NO: 2289 and a capsid encoded by a nucleic acid sequence comprising SEQ ID NO: 6. In some embodiments, the AAV particle comprises a viral genome comprising SEQ ID NO: 2289 and a capsid comprising SEQ ID NO: 4. In some embodiments, the AAV particle comprises a viral genome comprising SEQ ID NO: 2289 and a capsid comprising SEQ ID NO: 11. In some embodiments, the AAV particle comprises a viral genome comprising SEQ ID NO: 2289 and a capsid comprising SEQ ID NO: 2679. In some embodiments, the AAV particle comprises a viral genome comprising SEQ ID NO: 2289 and a capsid comprising SEQ ID NO: 2809. In some embodiments, the AAV particle comprises a viral genome comprising SEQ ID NO: 2289 and a capsid comprising SEQ ID NO: 2871.

[0964] In some embodiments, the AAV particle comprises a viral genome comprising SEQ ID NO: 2290 and a VOY101 capsid. In some embodiments, the AAV particle comprises a viral genome comprising SEQ ID NO: 2290 and a VOY201 capsid. In some embodiments, the AAV particle comprises a viral genome comprising SEQ ID NO: 2290 and an AAV9 capsid. In some embodiments, the AAV particle comprises a viral genome comprising SEQ ID NO: 2290 and an AAV9K449R capsid. In some embodiments, the AAV particle comprises a viral genome comprising SEQ ID NO: 2290 and an AAVPHP.B capsid. In some embodiments, the AAV particle comprises a viral genome comprising SEQ ID NO: 2290 and an AAVPHP.N capsid. In some embodiments, the AAV particle comprises a viral genome comprising SEQ ID NO: 2290 and an AAV2 variant capsid. In some embodiments, the AAV particle comprises a viral genome comprising SEQ ID NO: 2290 and an AAV2/3 variant capsid. In some embodiments, the AAV particle comprises a viral genome comprising SEQ ID NO: 2290 and a capsid comprising SEQ ID NO: 1. In some embodiments, the AAV particle comprises a viral genome comprising SEQ ID NO: 2290 and a capsid encoded by a nucleic acid sequence comprising SEQ ID NO: 2. In some embodiments, the AAV particle comprises a viral genome comprising SEQ ID NO: 2290 and a capsid comprising SEQ ID NO: 4534. In some embodiments, the AAV particle comprises a viral genome comprising SEQ ID NO: 2290 and a capsid encoded by a nucleic acid sequence comprising SEQ ID NO: 3. In some embodiments, the AAV particle comprises a viral genome comprising SEQ ID NO: 2290 and a capsid comprising SEQ ID NO: 138. In some embodiments, the AAV particle comprises a viral genome comprising SEQ ID NO: 2290 and a capsid encoded by a nucleic acid sequence comprising SEQ ID NO: 137. In some embodiments, the AAV particle comprises a viral genome comprising SEQ ID NO: 2290 and a capsid comprising SEQ ID NO: 5. In some embodiments, the AAV particle comprises a viral genome comprising SEQ ID NO: 2290 and a capsid encoded by a nucleic acid sequence comprising SEQ ID NO: 6. In some embodiments, the AAV particle comprises a viral genome comprising SEQ ID NO: 2290 and a capsid comprising SEQ ID NO: 4. In some embodiments, the AAV particle comprises a viral genome comprising SEQ ID NO: 2290 and a capsid comprising SEQ ID NO: 11. In some embodiments, the AAV particle comprises a viral genome comprising SEQ ID NO: 2290 and a capsid comprising SEQ ID NO: 2679. In some embodiments, the AAV particle comprises a viral genome comprising SEQ ID NO: 2290 and a capsid comprising SEQ ID NO: 2809. In some embodiments, the AAV particle comprises a viral genome comprising SEQ ID NO: 2290 and a capsid comprising SEQ ID NO: 2871.

[0965] In some embodiments, the AAV particle comprises a viral genome comprising SEQ ID NO: 2291 and a VOY101 capsid. In some embodiments, the AAV particle comprises a viral genome comprising SEQ ID NO: 2291 and a VOY201 capsid. In some embodiments, the AAV particle comprises a viral genome comprising SEQ ID NO: 2291 and an AAV9 capsid. In some embodiments, the AAV particle comprises a viral genome comprising SEQ ID NO: 2291 and an AAV9K449R capsid. In some embodiments, the AAV particle comprises a viral genome comprising SEQ ID NO: 2291 and an AAVPHP.B capsid. In some embodiments, the AAV particle comprises a viral genome comprising SEQ ID NO: 2291 and an AAVPHP.N capsid. In some embodiments, the AAV particle comprises a viral genome comprising SEQ ID NO: 2291 and an AAV2 variant capsid. In some embodiments, the AAV particle comprises a viral genome comprising SEQ ID NO: 2291 and an AAV2/3 variant capsid. In some embodiments, the AAV particle comprises a viral genome comprising SEQ ID NO: 2291 and a capsid comprising SEQ ID NO: 1. In some embodiments, the AAV particle comprises a viral genome comprising SEQ ID NO: 2291 and a capsid encoded by a nucleic acid sequence comprising SEQ ID NO: 2. In some embodiments, the AAV particle comprises a viral genome comprising SEQ ID NO: 2291 and a capsid comprising SEQ ID NO: 4534. In some embodiments, the AAV particle comprises a viral genome comprising SEQ ID NO: 2291 and a capsid encoded by a nucleic acid sequence comprising SEQ ID NO: 3. In some embodiments, the AAV particle comprises a viral genome comprising SEQ ID NO: 2291 and a capsid comprising SEQ ID NO: 138. In some embodiments, the AAV particle comprises a viral genome comprising SEQ ID NO: 2291 and a capsid encoded by a nucleic acid sequence comprising SEQ ID NO: 137. In some embodiments, the AAV particle comprises a viral genome comprising SEQ ID NO: 2291 and a capsid comprising SEQ ID NO: 5. In some embodiments, the AAV particle comprises a viral genome comprising SEQ ID NO: 2291 and a capsid encoded by a nucleic acid sequence comprising SEQ ID NO: 6. In some embodiments, the AAV particle comprises a viral genome comprising SEQ ID NO: 2291 and a capsid comprising SEQ ID NO: 4. In some embodiments, the AAV particle comprises a viral genome comprising SEQ ID NO: 2291 and a capsid comprising SEQ ID NO: 11. In some embodiments, the AAV particle comprises a viral genome comprising SEQ ID NO: 2291 and a capsid comprising SEQ ID NO: 2679. In some embodiments, the AAV particle comprises a viral genome comprising SEQ ID NO: 2291 and a capsid comprising SEQ ID NO: 2809. In some embodiments, the AAV particle comprises a viral genome comprising SEQ ID NO: 2291 and a capsid comprising SEQ ID NO: 2871.

[0966] In some embodiments, the AAV particle comprises a viral genome comprising SEQ ID NO: 2292 and a VOY101 capsid. In some embodiments, the AAV particle comprises a viral genome comprising SEQ ID NO: 2292 and a VOY201 capsid. In some embodiments, the AAV particle comprises a viral genome comprising SEQ ID NO: 2292 and an AAV9 capsid. In some embodiments, the AAV particle comprises a viral genome comprising SEQ ID NO: 2292 and an AAV9K449R capsid. In some embodiments, the AAV particle comprises a viral genome comprising SEQ ID NO: 2292 and an AAVPHP.B capsid. In some embodiments, the AAV particle comprises a viral genome comprising SEQ ID NO: 2292 and an AAVPHP.N capsid. In some embodiments, the AAV particle comprises a viral genome comprising SEQ ID NO: 2292 and an AAV2 variant capsid. In some embodiments, the AAV particle comprises a viral genome comprising SEQ ID NO: 2292 and an AAV2/3 variant capsid. In some embodiments, the AAV particle comprises a viral genome comprising SEQ ID NO: 2292 and a capsid comprising SEQ ID NO: 1. In some embodiments, the AAV particle comprises a viral genome comprising SEQ ID NO: 2292 and a capsid encoded by a nucleic acid sequence comprising SEQ ID NO: 2. In some embodiments, the AAV particle comprises a viral genome comprising SEQ ID NO: 2292 and a capsid comprising SEQ ID NO: 4534. In some embodiments, the AAV particle comprises a viral genome comprising SEQ ID NO: 2292 and a capsid encoded by a nucleic acid sequence comprising SEQ ID NO: 3. In some embodiments, the AAV particle comprises a viral genome comprising SEQ ID NO: 2292 and a capsid comprising SEQ ID NO: 138. In some embodiments, the AAV particle comprises a viral genome comprising SEQ ID NO: 2292 and a capsid encoded by a nucleic acid sequence comprising SEQ ID NO: 137. In some embodiments, the AAV particle comprises a viral genome comprising SEQ ID NO: 2292 and a capsid comprising SEQ ID NO: 5. In some embodiments, the AAV particle comprises a viral genome comprising SEQ ID NO: 2292 and a capsid encoded by a nucleic acid sequence comprising SEQ ID NO: 6. In some embodiments, the AAV particle comprises a viral genome comprising SEQ ID NO: 2292 and a capsid comprising SEQ ID NO: 4. In some embodiments, the AAV particle comprises a viral genome comprising SEQ ID NO: 2292 and a capsid comprising SEQ ID NO: 11. In some embodiments, the AAV particle comprises a viral genome comprising SEQ ID NO: 2292 and a capsid comprising SEQ ID NO: 2679. In some embodiments, the AAV particle comprises a viral genome comprising SEQ ID NO: 2292 and a capsid comprising SEQ ID NO: 2809. In some embodiments, the AAV particle comprises a viral genome comprising SEQ ID NO: 2292 and a capsid comprising SEQ ID NO: 2871.

[0967] In some embodiments, the AAV particle comprises a viral genome comprising SEQ ID NO: 2293 and a VOY101 capsid. In some embodiments, the AAV particle comprises a viral genome comprising SEQ ID NO: 2293 and a VOY201 capsid. In some embodiments, the AAV particle comprises a viral genome comprising SEQ ID NO: 2293 and an AAV9 capsid. In some embodiments, the AAV particle comprises a viral genome comprising SEQ ID NO: 2293 and an AAV9K449R capsid. In some embodiments, the AAV particle comprises a viral genome comprising SEQ ID NO: 2293 and an AAVPHP.B capsid. In some embodiments, the AAV particle comprises a viral genome comprising SEQ ID NO: 2293 and an AAVPHP.N capsid. In some embodiments, the AAV particle comprises a viral genome comprising SEQ ID NO: 2293 and an AAV2 variant capsid. In some embodiments, the AAV particle comprises a viral genome comprising SEQ ID NO: 2293 and an AAV2/3 variant capsid. In some embodiments, the AAV particle comprises a viral genome comprising SEQ ID NO: 2293 and a capsid comprising SEQ ID NO: 1. In some embodiments, the AAV particle comprises a viral genome comprising SEQ ID NO: 2293 and a capsid encoded by a nucleic acid sequence comprising SEQ ID NO: 2. In some embodiments, the AAV particle comprises a viral genome comprising SEQ ID NO: 2293 and a capsid comprising SEQ ID NO: 4534. In some embodiments, the AAV particle comprises a viral genome comprising SEQ ID NO: 2293 and a capsid encoded by a nucleic acid sequence comprising SEQ ID NO: 3. In some embodiments, the AAV particle comprises a viral genome comprising SEQ ID NO: 2293 and a capsid comprising SEQ ID NO: 138. In some embodiments, the AAV particle comprises a viral genome comprising SEQ ID NO: 2293 and a capsid encoded by a nucleic acid sequence comprising SEQ ID NO: 137. In some embodiments, the AAV particle comprises a viral genome comprising SEQ ID NO: 2293 and a capsid comprising SEQ ID NO: 5. In some embodiments, the AAV particle comprises a viral genome comprising SEQ ID NO: 2293 and a capsid encoded by a nucleic acid sequence comprising SEQ ID NO: 6. In some embodiments, the AAV particle comprises a viral genome comprising SEQ ID NO: 2293 and a capsid comprising SEQ ID NO: 4. In some embodiments, the AAV particle comprises a viral genome comprising SEQ ID NO: 2293 and a capsid comprising SEQ ID NO: 11. In some embodiments, the AAV particle comprises a viral genome comprising SEQ ID NO: 2293 and a capsid comprising SEQ ID NO: 2679. In some embodiments, the AAV particle comprises a viral genome comprising SEQ ID NO: 2293 and a capsid comprising SEQ ID NO: 2809. In some embodiments, the AAV particle comprises a viral genome comprising SEQ ID NO: 2293 and a capsid comprising SEQ ID NO: 2871.

[0968] In some embodiments, the AAV particle comprises a viral genome comprising SEQ ID NO: 2294 and a VOY101 capsid. In some embodiments, the AAV particle comprises a viral genome comprising SEQ ID NO: 2294 and a VOY201 capsid. In some embodiments, the AAV particle comprises a viral genome comprising SEQ ID NO: 2294 and an AAV9 capsid. In some embodiments, the AAV particle comprises a viral genome comprising SEQ ID NO: 2294 and an AAV9K449R capsid. In some embodiments, the AAV particle comprises a viral genome comprising SEQ ID NO: 2294 and an AAVPHP.B capsid. In some embodiments, the AAV particle comprises a viral genome comprising SEQ ID NO: 2294 and an AAVPHP.N capsid. In some embodiments, the AAV particle comprises a viral genome comprising SEQ ID NO: 2294 and an AAV2 variant capsid. In some embodiments, the AAV particle comprises a viral genome comprising SEQ ID NO: 2294 and an AAV2/3 variant capsid. In some embodiments, the AAV particle comprises a viral genome comprising SEQ ID NO: 2294 and a capsid comprising SEQ ID NO: 1. In some embodiments, the AAV particle comprises a viral genome comprising SEQ ID NO: 2294 and a capsid encoded by a nucleic acid sequence comprising SEQ ID NO: 2. In some embodiments, the AAV particle comprises a viral genome comprising SEQ ID NO: 2294 and a capsid comprising SEQ ID NO: 4534. In some embodiments, the AAV particle comprises a viral genome comprising SEQ ID NO: 2294 and a capsid encoded by a nucleic acid sequence comprising SEQ ID NO: 3. In some embodiments, the AAV particle comprises a viral genome comprising SEQ ID NO: 2294 and a capsid comprising SEQ ID NO: 138. In some embodiments, the AAV particle comprises a viral genome comprising SEQ ID NO: 2294 and a capsid encoded by a nucleic acid sequence comprising SEQ ID NO: 137. In some embodiments, the AAV particle comprises a viral genome comprising SEQ ID NO: 2294 and a capsid comprising SEQ ID NO: 5. In some embodiments, the AAV particle comprises a viral genome comprising SEQ ID NO: 2294 and a capsid encoded by a nucleic acid sequence comprising SEQ ID NO: 6. In some embodiments, the AAV particle comprises a viral genome comprising SEQ ID NO: 2294 and a capsid comprising SEQ ID NO: 4. In some embodiments, the AAV particle comprises a viral genome comprising SEQ ID NO: 2294 and a capsid comprising SEQ ID NO: 11. In some embodiments, the AAV particle comprises a viral genome comprising SEQ ID NO: 2294 and a capsid comprising SEQ ID NO: 2679. In some embodiments, the AAV particle comprises a viral genome comprising SEQ ID NO: 2294 and a capsid comprising SEQ ID NO: 2809. In some embodiments, the AAV particle comprises a viral genome comprising SEQ ID NO: 2294 and a capsid comprising SEQ ID NO: 2871.

[0969] In some embodiments, the AAV particle comprises a viral genome comprising SEQ ID NO: 2295 and a VOY101 capsid. In some embodiments, the AAV particle comprises a viral genome comprising SEQ ID NO: 2295 and a VOY201 capsid. In some embodiments, the AAV particle comprises a viral genome comprising SEQ ID NO: 2295 and an AAV9 capsid. In some embodiments, the AAV particle comprises a viral genome comprising SEQ ID NO: 2295 and an AAV9K449R capsid. In some embodiments, the AAV particle comprises a viral genome comprising SEQ ID NO: 2295 and an AAVPHP.B capsid. In some embodiments, the AAV particle comprises a viral genome comprising SEQ ID NO: 2295 and an AAVPHP.N capsid. In some embodiments, the AAV particle comprises a viral genome comprising SEQ ID NO: 2295 and an AAV2 variant capsid. In some embodiments, the AAV particle comprises a viral genome comprising SEQ ID NO: 2295 and an AAV2/3 variant capsid. In some embodiments, the AAV particle comprises a viral genome comprising SEQ ID NO: 2295 and a capsid comprising SEQ ID NO: 1. In some embodiments, the AAV particle comprises a viral genome comprising SEQ ID NO: 2295 and a capsid encoded by a nucleic acid sequence comprising SEQ ID NO: 2. In some embodiments, the AAV particle comprises a viral genome comprising SEQ ID NO: 2295 and a capsid comprising SEQ ID NO: 4534. In some embodiments, the AAV particle comprises a viral genome comprising SEQ ID NO: 2295 and a capsid encoded by a nucleic acid sequence comprising SEQ ID NO: 3. In some embodiments, the AAV particle comprises a viral genome comprising SEQ ID NO: 2295 and a capsid comprising SEQ ID NO: 138. In some embodiments, the AAV particle comprises a viral genome comprising SEQ ID NO: 2295 and a capsid encoded by a nucleic acid sequence comprising SEQ ID NO: 137. In some embodiments, the AAV particle comprises a viral genome comprising SEQ ID NO: 2295 and a capsid comprising SEQ ID NO: 5. In some embodiments, the AAV particle comprises a viral genome comprising SEQ ID NO: 2295 and a capsid encoded by a nucleic acid sequence comprising SEQ ID NO: 6. In some embodiments, the AAV particle comprises a viral genome comprising SEQ ID NO: 2295 and a capsid comprising SEQ ID NO: 4. In some embodiments, the AAV particle comprises a viral genome comprising SEQ ID NO: 2295 and a capsid comprising SEQ ID NO: 11. In some embodiments, the AAV particle comprises a viral genome comprising SEQ ID NO: 2295 and a capsid comprising SEQ ID NO: 2679. In some embodiments, the AAV particle comprises a viral genome comprising SEQ ID NO: 2295 and a capsid comprising SEQ ID NO: 2809. In some embodiments, the AAV particle comprises a viral genome comprising SEQ ID NO: 2295 and a capsid comprising SEQ ID NO: 2871.

[0970] In some embodiments, the AAV particle comprises a viral genome comprising SEQ ID NO: 2296 and a VOY101 capsid. In some embodiments, the AAV particle comprises a viral genome comprising SEQ ID NO: 2296 and a VOY201 capsid. In some embodiments, the AAV particle comprises a viral genome comprising SEQ ID NO: 2296 and an AAV9 capsid. In some embodiments, the AAV particle comprises a viral genome comprising SEQ ID NO: 2296 and an AAV9K449R capsid. In some embodiments, the AAV particle comprises a viral genome comprising SEQ ID NO: 2296 and an AAVPHP.B capsid. In some embodiments, the AAV particle comprises a viral genome comprising SEQ ID NO: 2296 and an AAVPHP.N capsid. In some embodiments, the AAV particle comprises a viral genome comprising SEQ ID NO: 2296 and an AAV2 variant capsid. In some embodiments, the AAV particle comprises a viral genome comprising SEQ ID NO: 2296 and an AAV2/3 variant capsid. In some embodiments, the AAV particle comprises a viral genome comprising SEQ ID NO: 2296 and a capsid comprising SEQ ID NO: 1. In some embodiments, the AAV particle comprises a viral genome comprising SEQ ID NO: 2296 and a capsid encoded by a nucleic acid sequence comprising SEQ ID NO: 2. In some embodiments, the AAV particle comprises a viral genome comprising SEQ ID NO: 2296 and a capsid comprising SEQ ID NO: 4534. In some embodiments, the AAV particle comprises a viral genome comprising SEQ ID NO: 2296 and a capsid encoded by a nucleic acid sequence comprising SEQ ID NO: 3. In some embodiments, the AAV particle comprises a viral genome comprising SEQ ID NO: 2296 and a capsid comprising SEQ ID NO: 138. In some embodiments, the AAV particle comprises a viral genome comprising SEQ ID NO: 2296 and a capsid encoded by a nucleic acid sequence comprising SEQ ID NO: 137. In some embodiments, the AAV particle comprises a viral genome comprising SEQ ID NO: 2296 and a capsid comprising SEQ ID NO: 5. In some embodiments, the AAV particle comprises a viral genome comprising SEQ ID NO: 2296 and a capsid encoded by a nucleic acid sequence comprising SEQ ID NO: 6. In some embodiments, the AAV particle comprises a viral genome comprising SEQ ID NO: 2296 and a capsid comprising SEQ ID NO: 4. In some embodiments, the AAV particle comprises a viral genome comprising SEQ ID NO: 2296 and a capsid comprising SEQ ID NO: 11. In some embodiments, the AAV particle comprises a viral genome comprising SEQ ID NO: 2296 and a capsid comprising SEQ ID NO: 2679. In some embodiments, the AAV particle comprises a viral genome comprising SEQ ID NO: 2296 and a capsid comprising SEQ ID NO: 2809. In some embodiments, the AAV particle comprises a viral genome comprising SEQ ID NO: 2296 and a capsid comprising SEQ ID NO: 2871.

[0971] In some embodiments, the AAV particle comprises a viral genome comprising SEQ ID NO: 2297 and a VOY101 capsid. In some embodiments, the AAV particle comprises a viral genome comprising SEQ ID NO: 2297 and a VOY201 capsid. In some embodiments, the AAV particle comprises a viral genome comprising SEQ ID NO: 2297 and an AAV9 capsid. In some embodiments, the AAV particle comprises a viral genome comprising SEQ ID NO: 2297 and an AAV9K449R capsid. In some embodiments, the AAV particle comprises a viral genome comprising SEQ ID NO: 2297 and an AAVPHP.B capsid. In some embodiments, the AAV particle comprises a viral genome comprising SEQ ID NO: 2297 and an AAVPHP.N capsid. In some embodiments, the AAV particle comprises a viral genome comprising SEQ ID NO: 2297 and an AAV2 variant capsid. In some embodiments, the AAV particle comprises a viral genome comprising SEQ ID NO: 2297 and an AAV2/3 variant capsid. In some embodiments, the AAV particle comprises a viral genome comprising SEQ ID NO: 2297 and a capsid comprising SEQ ID NO: 1. In some embodiments, the AAV particle comprises a viral genome comprising SEQ ID NO: 2297 and a capsid encoded by a nucleic acid sequence comprising SEQ ID NO: 2. In some embodiments, the AAV particle comprises a viral genome comprising SEQ ID NO: 2297 and a capsid comprising SEQ ID NO: 4534. In some embodiments, the AAV particle comprises a viral genome comprising SEQ ID NO: 2297 and a capsid encoded by a nucleic acid sequence comprising SEQ ID NO: 3. In some embodiments, the AAV particle comprises a viral genome comprising SEQ ID NO: 2297 and a capsid comprising SEQ ID NO: 138. In some embodiments, the AAV particle comprises a viral genome comprising SEQ ID NO: 2297 and a capsid encoded by a nucleic acid sequence comprising SEQ ID NO: 137. In some embodiments, the AAV particle comprises a viral genome comprising SEQ ID NO: 2297 and a capsid comprising SEQ ID NO: 5. In some embodiments, the AAV particle comprises a viral genome comprising SEQ ID NO: 2297 and a capsid encoded by a nucleic acid sequence comprising SEQ ID NO: 6. In some embodiments, the AAV particle comprises a viral genome comprising SEQ ID NO: 2297 and a capsid comprising SEQ ID NO: 4. In some embodiments, the AAV particle comprises a viral genome comprising SEQ ID NO: 2297 and a capsid comprising SEQ ID NO: 11. In some embodiments, the AAV particle comprises a viral genome comprising SEQ ID NO: 2297 and a capsid comprising SEQ ID NO: 2679. In some embodiments, the AAV particle comprises a viral genome comprising SEQ ID NO: 2297 and a capsid comprising SEQ ID NO: 2809. In some embodiments, the AAV particle comprises a viral genome comprising SEQ ID NO: 2297 and a capsid comprising SEQ ID NO: 2871.

[0972] In some embodiments, the AAV particle comprises a viral genome comprising SEQ ID NO: 2298 and a VOY101 capsid. In some embodiments, the AAV particle comprises a viral genome comprising SEQ ID NO: 2298 and a VOY201 capsid. In some embodiments, the AAV particle comprises a viral genome comprising SEQ ID NO: 2298 and an AAV9 capsid. In some embodiments, the AAV particle comprises a viral genome comprising SEQ ID NO: 2298 and an AAV9K449R capsid. In some embodiments, the AAV particle comprises a viral genome comprising SEQ ID NO: 2298 and an AAVPHP.B capsid. In some embodiments, the AAV particle comprises a viral genome comprising SEQ ID NO: 2298 and an AAVPHP.N capsid. In some embodiments, the AAV particle comprises a viral genome comprising SEQ ID NO: 2298 and an AAV2 variant capsid. In some embodiments, the AAV particle comprises a viral genome comprising SEQ ID NO: 2298 and an AAV2/3 variant capsid. In some embodiments, the AAV particle comprises a viral genome comprising SEQ ID NO: 2298 and a capsid comprising SEQ ID NO: 1. In some embodiments, the AAV particle comprises a viral genome comprising SEQ ID NO: 2298 and a capsid encoded by a nucleic acid sequence comprising SEQ ID NO: 2. In some embodiments, the AAV particle comprises a viral genome comprising SEQ ID NO: 2298 and a capsid comprising SEQ ID NO: 4534. In some embodiments, the AAV particle comprises a viral genome comprising SEQ ID NO: 2298 and a capsid encoded by a nucleic acid sequence comprising SEQ ID NO: 3. In some embodiments, the AAV particle comprises a viral genome comprising SEQ ID NO: 2298 and a capsid comprising SEQ ID NO: 138. In some embodiments, the AAV particle comprises a viral genome comprising SEQ ID NO: 2298 and a capsid encoded by a nucleic acid sequence comprising SEQ ID NO: 137. In some embodiments, the AAV particle comprises a viral genome comprising SEQ ID NO: 2298 and a capsid comprising SEQ ID NO: 5. In some embodiments, the AAV particle comprises a viral genome comprising SEQ ID NO: 2298 and a capsid encoded by a nucleic acid sequence comprising SEQ ID NO: 6. In some embodiments, the AAV particle comprises a viral genome comprising SEQ ID NO: 2298 and a capsid comprising SEQ ID NO: 4. In some embodiments, the AAV particle comprises a viral genome comprising SEQ ID NO: 2298 and a capsid comprising SEQ ID NO: 11. In some embodiments, the AAV particle comprises a viral genome comprising SEQ ID NO: 2298 and a capsid comprising SEQ ID NO: 2679. In some embodiments, the AAV particle comprises a viral genome comprising SEQ ID NO: 2298 and a capsid comprising SEQ ID NO: 2809. In some embodiments, the AAV particle comprises a viral genome comprising SEQ ID NO: 2298 and a capsid comprising SEQ ID NO: 2871.

[0973] In some embodiments, the AAV particle comprises a viral genome comprising SEQ ID NO: 2299 and a VOY101 capsid. In some embodiments, the AAV particle comprises a viral genome comprising SEQ ID NO: 2299 and a VOY201 capsid. In some embodiments, the AAV particle comprises a viral genome comprising SEQ ID NO: 2299 and an AAV9 capsid. In some embodiments, the AAV particle comprises a viral genome comprising SEQ ID NO: 2299 and an AAV9K449R capsid. In some embodiments, the AAV particle comprises a viral genome comprising SEQ ID NO: 2299 and an AAVPHP.B capsid. In some embodiments, the AAV particle comprises a viral genome comprising SEQ ID NO: 2299 and an AAVPHP.N capsid. In some embodiments, the AAV particle comprises a viral genome comprising SEQ ID NO: 2299 and an AAV2 variant capsid. In some embodiments, the AAV particle comprises a viral genome comprising SEQ ID NO: 2299 and an AAV2/3 variant capsid. In some embodiments, the AAV particle comprises a viral genome comprising SEQ ID NO: 2299 and a capsid comprising SEQ ID NO: 1. In some embodiments, the AAV particle comprises a viral genome comprising SEQ ID NO: 2299 and a capsid encoded by a nucleic acid sequence comprising SEQ ID NO: 2. In some embodiments, the AAV particle comprises a viral genome comprising SEQ ID NO: 2299 and a capsid comprising SEQ ID NO: 4534. In some embodiments, the AAV particle comprises a viral genome comprising SEQ ID NO: 2299 and a capsid encoded by a nucleic acid sequence comprising SEQ ID NO: 3. In some embodiments, the AAV particle comprises a viral genome comprising SEQ ID NO: 2299 and a capsid comprising SEQ ID NO: 138. In some embodiments, the AAV particle comprises a viral genome comprising SEQ ID NO: 2299 and a capsid encoded by a nucleic acid sequence comprising SEQ ID NO: 137. In some embodiments, the AAV particle comprises a viral genome comprising SEQ ID NO: 2299 and a capsid comprising SEQ ID NO: 5. In some embodiments, the AAV particle comprises a viral genome comprising SEQ ID NO: 2299 and a capsid encoded by a nucleic acid sequence comprising SEQ ID NO: 6. In some embodiments, the AAV particle comprises a viral genome comprising SEQ ID NO: 2299 and a capsid comprising SEQ ID NO: 4. In some embodiments, the AAV particle comprises a viral genome comprising SEQ ID NO: 2299 and a capsid comprising SEQ ID NO: 11. In some embodiments, the AAV particle comprises a viral genome comprising SEQ ID NO: 2299 and a capsid comprising SEQ ID NO: 2679. In some embodiments, the AAV particle comprises a viral genome comprising SEQ ID NO: 2299 and a capsid comprising SEQ ID NO: 2809. In some embodiments, the AAV particle comprises a viral genome comprising SEQ ID NO: 2299 and a capsid comprising SEQ ID NO: 2871.

[0974] In some embodiments, the AAV particle comprises a viral genome comprising SEQ ID NO: 2300 and a VOY101 capsid. In some embodiments, the AAV particle comprises a viral genome comprising SEQ ID NO: 2300 and a VOY201 capsid. In some embodiments, the AAV particle comprises a viral genome comprising SEQ ID NO: 2300 and an AAV9 capsid. In some embodiments, the AAV particle comprises a viral genome comprising SEQ ID NO: 2300 and an AAV9K449R capsid. In some embodiments, the AAV particle comprises a viral genome comprising SEQ ID NO: 2300 and an AAVPHP.B capsid. In some embodiments, the AAV particle comprises a viral genome comprising SEQ ID NO: 2300 and an AAVPHP.N capsid. In some embodiments, the AAV particle comprises a viral genome comprising SEQ ID NO: 2300 and an AAV2 variant capsid. In some embodiments, the AAV particle comprises a viral genome comprising SEQ ID NO: 2300 and an AAV2/3 variant capsid. In some embodiments, the AAV particle comprises a viral genome comprising SEQ ID NO: 2300 and a capsid comprising SEQ ID NO: 1. In some embodiments, the AAV particle comprises a viral genome comprising SEQ ID NO: 2300 and a capsid encoded by a nucleic acid sequence comprising SEQ ID NO: 2. In some embodiments, the AAV particle comprises a viral genome comprising SEQ ID NO: 2300 and a capsid comprising SEQ ID NO: 4534. In some embodiments, the AAV particle comprises a viral genome comprising SEQ ID NO: 2300 and a capsid encoded by a nucleic acid sequence comprising SEQ ID NO: 3. In some embodiments, the AAV particle comprises a viral genome comprising SEQ ID NO: 2300 and a capsid comprising SEQ ID NO: 138. In some embodiments, the AAV particle comprises a viral genome comprising SEQ ID NO: 2300 and a capsid encoded by a nucleic acid sequence comprising SEQ ID NO: 137. In some embodiments, the AAV particle comprises a viral genome comprising SEQ ID NO: 2300 and a capsid comprising SEQ ID NO: 5. In some embodiments, the AAV particle comprises a viral genome comprising SEQ ID NO: 2300 and a capsid encoded by a nucleic acid sequence comprising SEQ ID NO: 6. In some embodiments, the AAV particle comprises a viral genome comprising SEQ ID NO: 2300 and a capsid comprising SEQ ID NO: 4. In some embodiments, the AAV particle comprises a viral genome comprising SEQ ID NO: 2300 and a capsid comprising SEQ ID NO: 11. In some embodiments, the AAV particle comprises a viral genome comprising SEQ ID NO: 2300 and a capsid comprising SEQ ID NO: 2679. In some embodiments, the AAV particle comprises a viral genome comprising SEQ ID NO: 2300 and a capsid comprising SEQ ID NO: 2809. In some embodiments, the AAV particle comprises a viral genome comprising SEQ ID NO: 2300 and a capsid comprising SEQ ID NO: 2871.

[0975] In some embodiments, the AAV particle comprises a viral genome comprising SEQ ID NO: 2301 and a VOY101 capsid. In some embodiments, the AAV particle comprises a viral genome comprising SEQ ID NO: 2301 and a VOY201 capsid. In some embodiments, the AAV particle comprises a viral genome comprising SEQ ID NO: 2301 and an AAV9 capsid. In some embodiments, the AAV particle comprises a viral genome comprising SEQ ID NO: 2301 and an AAV9K449R capsid. In some embodiments, the AAV particle comprises a viral genome comprising SEQ ID NO: 2301 and an AAVPHP.B capsid. In some embodiments, the AAV particle comprises a viral genome comprising SEQ ID NO: 2301 and an AAVPHP.N capsid. In some embodiments, the AAV particle comprises a viral genome comprising SEQ ID NO: 2301 and an AAV2 variant capsid. In some embodiments, the AAV particle comprises a viral genome comprising SEQ ID NO: 2301 and an AAV2/3 variant capsid. In some embodiments, the AAV particle comprises a viral genome comprising SEQ ID NO: 2301 and a capsid comprising SEQ ID NO: 1. In some embodiments, the AAV particle comprises a viral genome comprising SEQ ID NO: 2301 and a capsid encoded by a nucleic acid sequence comprising SEQ ID NO: 2. In some embodiments, the AAV particle comprises a viral genome comprising SEQ ID NO: 2301 and a capsid comprising SEQ ID NO: 4534. In some embodiments, the AAV particle comprises a viral genome comprising SEQ ID NO: 2301 and a capsid encoded by a nucleic acid sequence comprising SEQ ID NO: 3. In some embodiments, the AAV particle comprises a viral genome comprising SEQ ID NO: 2301 and a capsid comprising SEQ ID NO: 138. In some embodiments, the AAV particle comprises a viral genome comprising SEQ ID NO: 2301 and a capsid encoded by a nucleic acid sequence comprising SEQ ID NO: 137. In some embodiments, the AAV particle comprises a viral genome comprising SEQ ID NO: 2301 and a capsid comprising SEQ ID NO: 5. In some embodiments, the AAV particle comprises a viral genome comprising SEQ ID NO: 2301 and a capsid encoded by a nucleic acid sequence comprising SEQ ID NO: 6. In some embodiments, the AAV particle comprises a viral genome comprising SEQ ID NO: 2301 and a capsid comprising SEQ ID NO: 4. In some embodiments, the AAV particle comprises a viral genome comprising SEQ ID NO: 2301 and a capsid comprising SEQ ID NO: 11. In some embodiments, the AAV particle comprises a viral genome comprising SEQ ID NO: 2301 and a capsid comprising SEQ ID NO: 2679. In some embodiments, the AAV particle comprises a viral genome comprising SEQ ID NO: 2301 and a capsid comprising SEQ ID NO: 2809. In some embodiments, the AAV particle comprises a viral genome comprising SEQ ID NO: 2301 and a capsid comprising SEQ ID NO: 2871.

[0976] In some embodiments, the AAV particle comprises a viral genome comprising SEQ ID NO: 2302 and a VOY101 capsid. In some embodiments, the AAV particle comprises a viral genome comprising SEQ ID NO: 2302 and a VOY201 capsid. In some embodiments, the AAV particle comprises a viral genome comprising SEQ ID NO: 2302 and an AAV9 capsid. In some embodiments, the AAV particle comprises a viral genome comprising SEQ ID NO: 2302 and an AAV9K449R capsid. In some embodiments, the AAV particle comprises a viral genome comprising SEQ ID NO: 2302 and an AAVPHP.B capsid. In some embodiments, the AAV particle comprises a viral genome comprising SEQ ID NO: 2302 and an AAVPHP.N capsid. In some embodiments, the AAV particle comprises a viral genome comprising SEQ ID NO: 2302 and an AAV2 variant capsid. In some embodiments, the AAV particle comprises a viral genome comprising SEQ ID NO: 2302 and an AAV2/3 variant capsid. In some embodiments, the AAV particle comprises a viral genome comprising SEQ ID NO: 2302 and a capsid comprising SEQ ID NO: 1. In some embodiments, the AAV particle comprises a viral genome comprising SEQ ID NO: 2302 and a capsid encoded by a nucleic acid sequence comprising SEQ ID NO: 2. In some embodiments, the AAV particle comprises a viral genome comprising SEQ ID NO: 2302 and a capsid comprising SEQ ID NO: 4534. In some embodiments, the AAV particle comprises a viral genome comprising SEQ ID NO: 2302 and a capsid encoded by a nucleic acid sequence comprising SEQ ID NO: 3. In some embodiments, the AAV particle comprises a viral genome comprising SEQ ID NO: 2302 and a capsid comprising SEQ ID NO: 138. In some embodiments, the AAV particle comprises a viral genome comprising SEQ ID NO: 2302 and a capsid encoded by a nucleic acid sequence comprising SEQ ID NO: 137. In some embodiments, the AAV particle comprises a viral genome comprising SEQ ID NO: 2302 and a capsid comprising SEQ ID NO: 5. In some embodiments, the AAV particle comprises a viral genome comprising SEQ ID NO: 2302 and a capsid encoded by a nucleic acid sequence comprising SEQ ID NO: 6. In some embodiments, the AAV particle comprises a viral genome comprising SEQ ID NO: 2302 and a capsid comprising SEQ ID NO: 4. In some embodiments, the AAV particle comprises a viral genome comprising SEQ ID NO: 2302 and a capsid comprising SEQ ID NO: 11. In some embodiments, the AAV particle comprises a viral genome comprising SEQ ID NO: 2302 and a capsid comprising SEQ ID NO: 2679. In some embodiments, the AAV particle comprises a viral genome comprising SEQ ID NO: 2302 and a capsid comprising SEQ ID NO: 2809. In some embodiments, the AAV particle comprises a viral genome comprising SEQ ID NO: 2302 and a capsid comprising SEQ ID NO: 2871.

[0977] In some embodiments, the AAV particle comprises a viral genome comprising SEQ ID NO: 2303 and a VOY101 capsid. In some embodiments, the AAV particle comprises a viral genome comprising SEQ ID NO: 2303 and a VOY201 capsid. In some embodiments, the AAV particle comprises a viral genome comprising SEQ ID NO: 2303 and an AAV9 capsid. In some embodiments, the AAV particle comprises a viral genome comprising SEQ ID NO: 2303 and an AAV9K449R capsid. In some embodiments, the AAV particle comprises a viral genome comprising SEQ ID NO: 2303 and an AAVPHP.B capsid. In some embodiments, the AAV particle comprises a viral genome comprising SEQ ID NO: 2303 and an AAVPHP.N capsid. In some embodiments, the AAV particle comprises a viral genome comprising SEQ ID NO: 2303 and an AAV2 variant capsid. In some embodiments, the AAV particle comprises a viral genome comprising SEQ ID NO: 2303 and an AAV2/3 variant capsid. In some embodiments, the AAV particle comprises a viral genome comprising SEQ ID NO: 2303 and a capsid comprising SEQ ID NO: 1. In some embodiments, the AAV particle comprises a viral genome comprising SEQ ID NO: 2303 and a capsid encoded by a nucleic acid sequence comprising SEQ ID NO: 2. In some embodiments, the AAV particle comprises a viral genome comprising SEQ ID NO: 2303 and a capsid comprising SEQ ID NO: 4534. In some embodiments, the AAV particle comprises a viral genome comprising SEQ ID NO: 2303 and a capsid encoded by a nucleic acid sequence comprising SEQ ID NO: 3. In some embodiments, the AAV particle comprises a viral genome comprising SEQ ID NO: 2303 and a capsid comprising SEQ ID NO: 138. In some embodiments, the AAV particle comprises a viral genome comprising SEQ ID NO: 2303 and a capsid encoded by a nucleic acid sequence comprising SEQ ID NO: 137. In some embodiments, the AAV particle comprises a viral genome comprising SEQ ID NO: 2303 and a capsid comprising SEQ ID NO: 5. In some embodiments, the AAV particle comprises a viral genome comprising SEQ ID NO: 2303 and a capsid encoded by a nucleic acid sequence comprising SEQ ID NO: 6. In some embodiments, the AAV particle comprises a viral genome comprising SEQ ID NO: 2303 and a capsid comprising SEQ ID NO: 4. In some embodiments, the AAV particle comprises a viral genome comprising SEQ ID NO: 2303 and a capsid comprising SEQ ID NO: 11. In some embodiments, the AAV particle comprises a viral genome comprising SEQ ID NO: 2303 and a capsid comprising SEQ ID NO: 2679. In some embodiments, the AAV particle comprises a viral genome comprising SEQ ID NO: 2303 and a capsid comprising SEQ ID NO: 2809. In some embodiments, the AAV particle comprises a viral genome comprising SEQ ID NO: 2303 and a capsid comprising SEQ ID NO: 2871.

[0978] In some embodiments, the AAV particle comprises a viral genome comprising SEQ ID NO: 2304 and a VOY101 capsid. In some embodiments, the AAV particle comprises a viral genome comprising SEQ ID NO: 2304 and a VOY201 capsid. In some embodiments, the AAV particle comprises a viral genome comprising SEQ ID NO: 2304 and an AAV9 capsid. In some embodiments, the AAV particle comprises a viral genome comprising SEQ ID NO: 2304 and an AAV9K449R capsid. In some embodiments, the AAV particle comprises a viral genome comprising SEQ ID NO: 2304 and an AAVPHP.B capsid. In some embodiments, the AAV particle comprises a viral genome comprising SEQ ID NO: 2304 and an AAVPHP.N capsid. In some embodiments, the AAV particle comprises a viral genome comprising SEQ ID NO: 2304 and an AAV2 variant capsid. In some embodiments, the AAV particle comprises a viral genome comprising SEQ ID NO: 2304 and an AAV2/3 variant capsid. In some embodiments, the AAV particle comprises a viral genome comprising SEQ ID NO: 2304 and a capsid comprising SEQ ID NO: 1. In some embodiments, the AAV particle comprises a viral genome comprising SEQ ID NO: 2304 and a capsid encoded by a nucleic acid sequence comprising SEQ ID NO: 2. In some embodiments, the AAV particle comprises a viral genome comprising SEQ ID NO: 2304 and a capsid comprising SEQ ID NO: 4534. In some embodiments, the AAV particle comprises a viral genome comprising SEQ ID NO: 2304 and a capsid encoded by a nucleic acid sequence comprising SEQ ID NO: 3. In some embodiments, the AAV particle comprises a viral genome comprising SEQ ID NO: 2304 and a capsid comprising SEQ ID NO: 138. In some embodiments, the AAV particle comprises a viral genome comprising SEQ ID NO: 2304 and a capsid encoded by a nucleic acid sequence comprising SEQ ID NO: 137. In some embodiments, the AAV particle comprises a viral genome comprising SEQ ID NO: 2304 and a capsid comprising SEQ ID NO: 5. In some embodiments, the AAV particle comprises a viral genome comprising SEQ ID NO: 2304 and a capsid encoded by a nucleic acid sequence comprising SEQ ID NO: 6. In some embodiments, the AAV particle comprises a viral genome comprising SEQ ID NO: 2304 and a capsid comprising SEQ ID NO: 4. In some embodiments, the AAV particle comprises a viral genome comprising SEQ ID NO: 2304 and a capsid comprising SEQ ID NO: 11. In some embodiments, the AAV particle comprises a viral genome comprising SEQ ID NO: 2304 and a capsid comprising SEQ ID NO: 2679. In some embodiments, the AAV particle comprises a viral genome comprising SEQ ID NO: 2304 and a capsid comprising SEQ ID NO: 2809. In some embodiments, the AAV particle comprises a viral genome comprising SEQ ID NO: 2304 and a capsid comprising SEQ ID NO: 2871.

[0979] In some embodiments, the AAV particle comprises a viral genome comprising SEQ ID NO: 2305 and a VOY101 capsid. In some embodiments, the AAV particle comprises a viral genome comprising SEQ ID NO: 2305 and a VOY201 capsid. In some embodiments, the AAV particle comprises a viral genome comprising SEQ ID NO: 2305 and an AAV9 capsid. In some embodiments, the AAV particle comprises a viral genome comprising SEQ ID NO: 2305 and an AAV9K449R capsid. In some embodiments, the AAV particle comprises a viral genome comprising SEQ ID NO: 2305 and an AAVPHP.B capsid. In some embodiments, the AAV particle comprises a viral genome comprising SEQ ID NO: 2305 and an AAVPHP.N capsid. In some embodiments, the AAV particle comprises a viral genome comprising SEQ ID NO: 2305 and an AAV2 variant capsid. In some embodiments, the AAV particle comprises a viral genome comprising SEQ ID NO: 2305 and an AAV2/3 variant capsid. In some embodiments, the AAV particle comprises a viral genome comprising SEQ ID NO: 2305 and a capsid comprising SEQ ID NO: 1. In some embodiments, the AAV particle comprises a viral genome comprising SEQ ID NO: 2305 and a capsid encoded by a nucleic acid sequence comprising SEQ ID NO: 2. In some embodiments, the AAV particle comprises a viral genome comprising SEQ ID NO: 2305 and a capsid comprising SEQ ID NO: 4534. In some embodiments, the AAV particle comprises a viral genome comprising SEQ ID NO: 2305 and a capsid encoded by a nucleic acid sequence comprising SEQ ID NO: 3. In some embodiments, the AAV particle comprises a viral genome comprising SEQ ID NO: 2305 and a capsid comprising SEQ ID NO: 138. In some embodiments, the AAV particle comprises a viral genome comprising SEQ ID NO: 2305 and a capsid encoded by a nucleic acid sequence comprising SEQ ID NO: 137. In some embodiments, the AAV particle comprises a viral genome comprising SEQ ID NO: 2305 and a capsid comprising SEQ ID NO: 5. In some embodiments, the AAV particle comprises a viral genome comprising SEQ ID NO: 2305 and a capsid encoded by a nucleic acid sequence comprising SEQ ID NO: 6. In some embodiments, the AAV particle comprises a viral genome comprising SEQ ID NO: 2305 and a capsid comprising SEQ ID NO: 4. In some embodiments, the AAV particle comprises a viral genome comprising SEQ ID NO: 2305 and a capsid comprising SEQ ID NO: 11. In some embodiments, the AAV particle comprises a viral genome comprising SEQ ID NO: 2305 and a capsid comprising SEQ ID NO: 2679. In some embodiments, the AAV particle comprises a viral genome comprising SEQ ID NO: 2305 and a capsid comprising SEQ ID NO: 2809. In some embodiments, the AAV particle comprises a viral genome comprising SEQ ID NO: 2305 and a capsid comprising SEQ ID NO: 2871.

[0980] In some embodiments, the AAV particle comprises a viral genome comprising SEQ ID NO: 2306 and a VOY101 capsid. In some embodiments, the AAV particle comprises a viral genome comprising SEQ ID NO: 2306 and a VOY201 capsid. In some embodiments, the AAV particle comprises a viral genome comprising SEQ ID NO: 2306 and an AAV9 capsid. In some embodiments, the AAV particle comprises a viral genome comprising SEQ ID NO: 2306 and an AAV9K449R capsid. In some embodiments, the AAV particle comprises a viral genome comprising SEQ ID NO: 2306 and an AAVPHP.B capsid. In some embodiments, the AAV particle comprises a viral genome comprising SEQ ID NO: 2306 and an AAVPHP.N capsid. In some embodiments, the AAV particle comprises a viral genome comprising SEQ ID NO: 2306 and an AAV2 variant capsid. In some embodiments, the AAV particle comprises a viral genome comprising SEQ ID NO: 2306 and an AAV2/3 variant capsid. In some embodiments, the AAV particle comprises a viral genome comprising SEQ ID NO: 2306 and a capsid comprising SEQ ID NO: 1. In some embodiments, the AAV particle comprises a viral genome comprising SEQ ID NO: 2306 and a capsid encoded by a nucleic acid sequence comprising SEQ ID NO: 2. In some embodiments, the AAV particle comprises a viral genome comprising SEQ ID NO: 2306 and a capsid comprising SEQ ID NO: 4534. In some embodiments, the AAV particle comprises a viral genome comprising SEQ ID NO: 2306 and a capsid encoded by a nucleic acid sequence comprising SEQ ID NO: 3. In some embodiments, the AAV particle comprises a viral genome comprising SEQ ID NO: 2306 and a capsid comprising SEQ ID NO: 138. In some embodiments, the AAV particle comprises a viral genome comprising SEQ ID NO: 2306 and a capsid encoded by a nucleic acid sequence comprising SEQ ID NO: 137. In some embodiments, the AAV particle comprises a viral genome comprising SEQ ID NO: 2306 and a capsid comprising SEQ ID NO: 5. In some embodiments, the AAV particle comprises a viral genome comprising SEQ ID NO: 2306 and a capsid encoded by a nucleic acid sequence comprising SEQ ID NO: 6. In some embodiments, the AAV particle comprises a viral genome comprising SEQ ID NO: 2306 and a capsid comprising SEQ ID NO: 4. In some embodiments, the AAV particle comprises a viral genome comprising SEQ ID NO: 2306 and a capsid comprising SEQ ID NO: 11. In some embodiments, the AAV particle comprises a viral genome comprising SEQ ID NO: 2306 and a capsid comprising SEQ ID NO: 2679. In some embodiments, the AAV particle comprises a viral genome comprising SEQ ID NO: 2306 and a capsid comprising SEQ ID NO: 2809. In some embodiments, the AAV particle comprises a viral genome comprising SEQ ID NO: 2306 and a capsid comprising SEQ ID NO: 2871.

[0981] In some embodiments, the AAV particle comprises a viral genome comprising SEQ ID NO: 2307 and a VOY101 capsid. In some embodiments, the AAV particle comprises a viral genome comprising SEQ ID NO: 2307 and a VOY201 capsid. In some embodiments, the AAV particle comprises a viral genome comprising SEQ ID NO: 2307 and an AAV9 capsid. In some embodiments, the AAV particle comprises a viral genome comprising SEQ ID NO: 2307 and an AAV9K449R capsid. In some embodiments, the AAV particle comprises a viral genome comprising SEQ ID NO: 2307 and an AAVPHP.B capsid. In some embodiments, the AAV particle comprises a viral genome comprising SEQ ID NO: 2307 and an AAVPHP.N capsid. In some embodiments, the AAV particle comprises a viral genome comprising SEQ ID NO: 2307 and an AAV2 variant capsid. In some embodiments, the AAV particle comprises a viral genome comprising SEQ ID NO: 2307 and an AAV2/3 variant capsid. In some embodiments, the AAV particle comprises a viral genome comprising SEQ ID NO: 2307 and a capsid comprising SEQ ID NO: 1. In some embodiments, the AAV particle comprises a viral genome comprising SEQ ID NO: 2307 and a capsid encoded by a nucleic acid sequence comprising SEQ ID NO: 2. In some embodiments, the AAV particle comprises a viral genome comprising SEQ ID NO: 2307 and a capsid comprising SEQ ID NO: 4534. In some embodiments, the AAV particle comprises a viral genome comprising SEQ ID NO: 2307 and a capsid encoded by a nucleic acid sequence comprising SEQ ID NO: 3. In some embodiments, the AAV particle comprises a viral genome comprising SEQ ID NO: 2307 and a capsid comprising SEQ ID NO: 138. In some embodiments, the AAV particle comprises a viral genome comprising SEQ ID NO: 2307 and a capsid encoded by a nucleic acid sequence comprising SEQ ID NO: 137. In some embodiments, the AAV particle comprises a viral genome comprising SEQ ID NO: 2307 and a capsid comprising SEQ ID NO: 5. In some embodiments, the AAV particle comprises a viral genome comprising SEQ ID NO: 2307 and a capsid encoded by a nucleic acid sequence comprising SEQ ID NO: 6. In some embodiments, the AAV particle comprises a viral genome comprising SEQ ID NO: 2307 and a capsid comprising SEQ ID NO: 4. In some embodiments, the AAV particle comprises a viral genome comprising SEQ ID NO: 2307 and a capsid comprising SEQ ID NO: 11. In some embodiments, the AAV particle comprises a viral genome comprising SEQ ID NO: 2307 and a capsid comprising SEQ ID NO: 2679. In some embodiments, the AAV particle comprises a viral genome comprising SEQ ID NO: 2307 and a capsid comprising SEQ ID NO: 2809. In some embodiments, the AAV particle comprises a viral genome comprising SEQ ID NO: 2307 and a capsid comprising SEQ ID NO: 2871.

[0982] In some embodiments, the AAV particle comprises a viral genome comprising SEQ ID NO: 2308 and a VOY101 capsid. In some embodiments, the AAV particle comprises a viral genome comprising SEQ ID NO: 2308 and a VOY201 capsid. In some embodiments, the AAV particle comprises a viral genome comprising SEQ ID NO: 2308 and an AAV9 capsid. In some embodiments, the AAV particle comprises a viral genome comprising SEQ ID NO: 2308 and an AAV9K449R capsid. In some embodiments, the AAV particle comprises a viral genome comprising SEQ ID NO: 2308 and an AAVPHP.B capsid. In some embodiments, the AAV particle comprises a viral genome comprising SEQ ID NO: 2308 and an AAVPHP.N capsid. In some embodiments, the AAV particle comprises a viral genome comprising SEQ ID NO: 2308 and an AAV2 variant capsid. In some embodiments, the AAV particle comprises a viral genome comprising SEQ ID NO: 2308 and an AAV2/3 variant capsid. In some embodiments, the AAV particle comprises a viral genome comprising SEQ ID NO: 2308 and a capsid comprising SEQ ID NO: 1. In some embodiments, the AAV particle comprises a viral genome comprising SEQ ID NO: 2308 and a capsid encoded by a nucleic acid sequence comprising SEQ ID NO: 2. In some embodiments, the AAV particle comprises a viral genome comprising SEQ ID NO: 2308 and a capsid comprising SEQ ID NO: 4534. In some embodiments, the AAV particle comprises a viral genome comprising SEQ ID NO: 2308 and a capsid encoded by a nucleic acid sequence comprising SEQ ID NO: 3. In some embodiments, the AAV particle comprises a viral genome comprising SEQ ID NO: 2308 and a capsid comprising SEQ ID NO: 138. In some embodiments, the AAV particle comprises a viral genome comprising SEQ ID NO: 2308 and a capsid encoded by a nucleic acid sequence comprising SEQ ID NO: 137. In some embodiments, the AAV particle comprises a viral genome comprising SEQ ID NO: 2308 and a capsid comprising SEQ ID NO: 5. In some embodiments, the AAV particle comprises a viral genome comprising SEQ ID NO: 2308 and a capsid encoded by a nucleic acid sequence comprising SEQ ID NO: 6. In some embodiments, the AAV particle comprises a viral genome comprising SEQ ID NO: 2308 and a capsid comprising SEQ ID NO: 4. In some embodiments, the AAV particle comprises a viral genome comprising SEQ ID NO: 2308 and a capsid comprising SEQ ID NO: 11. In some embodiments, the AAV particle comprises a viral genome comprising SEQ ID NO: 2308 and a capsid comprising SEQ ID NO: 2679. In some embodiments, the AAV particle comprises a viral genome comprising SEQ ID NO: 2308 and a capsid comprising SEQ ID NO: 2809. In some embodiments, the AAV particle comprises a viral genome comprising SEQ ID NO: 2308 and a capsid comprising SEQ ID NO: 2871.

[0983] In some embodiments, the AAV particle comprises a viral genome comprising SEQ ID NO: 2309 and a VOY101 capsid. In some embodiments, the AAV particle comprises a viral genome comprising SEQ ID NO: 2309 and a VOY201 capsid. In some embodiments, the AAV particle comprises a viral genome comprising SEQ ID NO: 2309 and an AAV9 capsid. In some embodiments, the AAV particle comprises a viral genome comprising SEQ ID NO: 2309 and an AAV9K449R capsid. In some embodiments, the AAV particle comprises a viral genome comprising SEQ ID NO: 2309 and an AAVPHP.B capsid. In some embodiments, the AAV particle comprises a viral genome comprising SEQ ID NO: 2309 and an AAVPHP.N capsid. In some embodiments, the AAV particle comprises a viral genome comprising SEQ ID NO: 2309 and an AAV2 variant capsid. In some embodiments, the AAV particle comprises a viral genome comprising SEQ ID NO: 2309 and an AAV2/3 variant capsid. In some embodiments, the AAV particle comprises a viral genome comprising SEQ ID NO: 2309 and a capsid comprising SEQ ID NO: 1. In some embodiments, the AAV particle comprises a viral genome comprising SEQ ID NO: 2309 and a capsid encoded by a nucleic acid sequence comprising SEQ ID NO: 2. In some embodiments, the AAV particle comprises a viral genome comprising SEQ ID NO: 2309 and a capsid comprising SEQ ID NO: 4534. In some embodiments, the AAV particle comprises a viral genome comprising SEQ ID NO: 2309 and a capsid encoded by a nucleic acid sequence comprising SEQ ID NO: 3. In some embodiments, the AAV particle comprises a viral genome comprising SEQ ID NO: 2309 and a capsid comprising SEQ ID NO: 138. In some embodiments, the AAV particle comprises a viral genome comprising SEQ ID NO: 2309 and a capsid encoded by a nucleic acid sequence comprising SEQ ID NO: 137. In some embodiments, the AAV particle comprises a viral genome comprising SEQ ID NO: 2309 and a capsid comprising SEQ ID NO: 5. In some embodiments, the AAV particle comprises a viral genome comprising SEQ ID NO: 2309 and a capsid encoded by a nucleic acid sequence comprising SEQ ID NO: 6. In some embodiments, the AAV particle comprises a viral genome comprising SEQ ID NO: 2309 and a capsid comprising SEQ ID NO: 4. In some embodiments, the AAV particle comprises a viral genome comprising SEQ ID NO: 2309 and a capsid comprising SEQ ID NO: 11. In some embodiments, the AAV particle comprises a viral genome comprising SEQ ID NO: 2309 and a capsid comprising SEQ ID NO: 2679. In some embodiments, the AAV particle comprises a viral genome comprising SEQ ID NO: 2309 and a capsid comprising SEQ ID NO: 2809. In some embodiments, the AAV particle comprises a viral genome comprising SEQ ID NO: 2309 and a capsid comprising SEQ ID NO: 2871.

[0984] In some embodiments, the AAV particle comprises a viral genome comprising SEQ ID NO: 2310 and a VOY101 capsid. In some embodiments, the AAV particle comprises a viral genome comprising SEQ ID NO: 2310 and a VOY201 capsid. In some embodiments, the AAV particle comprises a viral genome comprising SEQ ID NO: 2310 and an AAV9 capsid. In some embodiments, the AAV particle comprises a viral genome comprising SEQ ID NO: 2310 and an AAV9K449R capsid. In some embodiments, the AAV particle comprises a viral genome comprising SEQ ID NO: 2310 and an AAVPHP.B capsid. In some embodiments, the AAV particle comprises a viral genome comprising SEQ ID NO: 2310 and an AAVPHP.N capsid. In some embodiments, the AAV particle comprises a viral genome comprising SEQ ID NO: 2310 and an AAV2 variant capsid. In some embodiments, the AAV particle comprises a viral genome comprising SEQ ID NO: 2310 and an AAV2/3 variant capsid. In some embodiments, the AAV particle comprises a viral genome comprising SEQ ID NO: 2310 and a capsid comprising SEQ ID NO: 1. In some embodiments, the AAV particle comprises a viral genome comprising SEQ ID NO: 2310 and a capsid encoded by a nucleic acid sequence comprising SEQ ID NO: 2. In some embodiments, the AAV particle comprises a viral genome comprising SEQ ID NO: 2310 and a capsid comprising SEQ ID NO: 4534. In some embodiments, the AAV particle comprises a viral genome comprising SEQ ID NO: 2310 and a capsid encoded by a nucleic acid sequence comprising SEQ ID NO: 3. In some embodiments, the AAV particle comprises a viral genome comprising SEQ ID NO: 2310 and a capsid comprising SEQ ID NO: 138. In some embodiments, the AAV particle comprises a viral genome comprising SEQ ID NO: 2310 and a capsid encoded by a nucleic acid sequence comprising SEQ ID NO: 137. In some embodiments, the AAV particle comprises a viral genome comprising SEQ ID NO: 2310 and a capsid comprising SEQ ID NO: 5. In some embodiments, the AAV particle comprises a viral genome comprising SEQ ID NO: 2310 and a capsid encoded by a nucleic acid sequence comprising SEQ ID NO: 6. In some embodiments, the AAV particle comprises a viral genome comprising SEQ ID NO: 2310 and a capsid comprising SEQ ID NO: 4. In some embodiments, the AAV particle comprises a viral genome comprising SEQ ID NO: 2310 and a capsid comprising SEQ ID NO: 11. In some embodiments, the AAV particle comprises a viral genome comprising SEQ ID NO: 2310 and a capsid comprising SEQ ID NO: 2679. In some embodiments, the AAV particle comprises a viral genome comprising SEQ ID NO: 2310 and a capsid comprising SEQ ID NO: 2809. In some embodiments, the AAV particle comprises a viral genome comprising SEQ ID NO: 2310 and a capsid comprising SEQ ID NO: 2871.

[0985] In some embodiments, the AAV particle comprises a viral genome comprising SEQ ID NO: 2311 and a VOY101 capsid. In some embodiments, the AAV particle comprises a viral genome comprising SEQ ID NO: 2311 and a VOY201 capsid. In some embodiments, the AAV particle comprises a viral genome comprising SEQ ID NO: 2311 and an AAV9 capsid. In some embodiments, the AAV particle comprises a viral genome comprising SEQ ID NO: 2311 and an AAV9K449R capsid. In some embodiments, the AAV particle comprises a viral genome comprising SEQ ID NO: 2311 and an AAVPHP.B capsid. In some embodiments, the AAV particle comprises a viral genome comprising SEQ ID NO: 2311 and an AAVPHP.N capsid. In some embodiments, the AAV particle comprises a viral genome comprising SEQ ID NO: 2311 and an AAV2 variant capsid. In some embodiments, the AAV particle comprises a viral genome comprising SEQ ID NO: 2311 and an AAV2/3 variant capsid. In some embodiments, the AAV particle comprises a viral genome comprising SEQ ID NO: 2311 and a capsid comprising SEQ ID NO: 1. In some embodiments, the AAV particle comprises a viral genome comprising SEQ ID NO: 2311 and a capsid encoded by a nucleic acid sequence comprising SEQ ID NO: 2. In some embodiments, the AAV particle comprises a viral genome comprising SEQ ID NO: 2311 and a capsid comprising SEQ ID NO: 4534. In some embodiments, the AAV particle comprises a viral genome comprising SEQ ID NO: 2311 and a capsid encoded by a nucleic acid sequence comprising SEQ ID NO: 3. In some embodiments, the AAV particle comprises a viral genome comprising SEQ ID NO: 2311 and a capsid comprising SEQ ID NO: 138. In some embodiments, the AAV particle comprises a viral genome comprising SEQ ID NO: 2311 and a capsid encoded by a nucleic acid sequence comprising SEQ ID NO: 137. In some embodiments, the AAV particle comprises a viral genome comprising SEQ ID NO: 2311 and a capsid comprising SEQ ID NO: 5. In some embodiments, the AAV particle comprises a viral genome comprising SEQ ID NO: 2311 and a capsid encoded by a nucleic acid sequence comprising SEQ ID NO: 6. In some embodiments, the AAV particle comprises a viral genome comprising SEQ ID NO: 2311 and a capsid comprising SEQ ID NO: 4. In some embodiments, the AAV particle comprises a viral genome comprising SEQ ID NO: 2311 and a capsid comprising SEQ ID NO: 11. In some embodiments, the AAV particle comprises a viral genome comprising SEQ ID NO: 2311 and a capsid comprising SEQ ID NO: 2679. In some embodiments, the AAV particle comprises a viral genome comprising SEQ ID NO: 2311 and a capsid comprising SEQ ID NO: 2809. In some embodiments, the AAV particle comprises a viral genome comprising SEQ ID NO: 2311 and a capsid comprising SEQ ID NO: 2871.

[0986] In some embodiments, the AAV particle comprises a viral genome comprising SEQ ID NO: 2312 and a VOY101 capsid. In some embodiments, the AAV particle comprises a viral genome comprising SEQ ID NO: 2312 and a VOY201 capsid. In some embodiments, the AAV particle comprises a viral genome comprising SEQ ID NO: 2312 and an AAV9 capsid. In some embodiments, the AAV particle comprises a viral genome comprising SEQ ID NO: 2312 and an AAV9K449R capsid. In some embodiments, the AAV particle comprises a viral genome comprising SEQ ID NO: 2312 and an AAVPHP.B capsid. In some embodiments, the AAV particle comprises a viral genome comprising SEQ ID NO: 2312 and an AAVPHP.N capsid. In some embodiments, the AAV particle comprises a viral genome comprising SEQ ID NO: 2312 and an AAV2 variant capsid. In some embodiments, the AAV particle comprises a viral genome comprising SEQ ID NO: 2312 and an AAV2/3 variant capsid. In some embodiments, the AAV particle comprises a viral genome comprising SEQ ID NO: 2312 and a capsid comprising SEQ ID NO: 1. In some embodiments, the AAV particle comprises a viral genome comprising SEQ ID NO: 2312 and a capsid encoded by a nucleic acid sequence comprising SEQ ID NO: 2. In some embodiments, the AAV particle comprises a viral genome comprising SEQ ID NO: 2312 and a capsid comprising SEQ ID NO: 4534. In some embodiments, the AAV particle comprises a viral genome comprising SEQ ID NO: 2312 and a capsid encoded by a nucleic acid sequence comprising SEQ ID NO: 3. In some embodiments, the AAV particle comprises a viral genome comprising SEQ ID NO: 2312 and a capsid comprising SEQ ID NO: 138. In some embodiments, the AAV particle comprises a viral genome comprising SEQ ID NO: 2312 and a capsid encoded by a nucleic acid sequence comprising SEQ ID NO: 137. In some embodiments, the AAV particle comprises a viral genome comprising SEQ ID NO: 2312 and a capsid comprising SEQ ID NO: 5. In some embodiments, the AAV particle comprises a viral genome comprising SEQ ID NO: 2312 and a capsid encoded by a nucleic acid sequence comprising SEQ ID NO: 6. In some embodiments, the AAV particle comprises a viral genome comprising SEQ ID NO: 2312 and a capsid comprising SEQ ID NO: 4. In some embodiments, the AAV particle comprises a viral genome comprising SEQ ID NO: 2312 and a capsid comprising SEQ ID NO: 11. In some embodiments, the AAV particle comprises a viral genome comprising SEQ ID NO: 2312 and a capsid comprising SEQ ID NO: 2679. In some embodiments, the AAV particle comprises a viral genome comprising SEQ ID NO: 2312 and a capsid comprising SEQ ID NO: 2809. In some embodiments, the AAV particle comprises a viral genome comprising SEQ ID NO: 2312 and a capsid comprising SEQ ID NO: 2871.

[0987] In some embodiments, the AAV particle comprises a viral genome comprising SEQ ID NO: 2313 and a VOY101 capsid. In some embodiments, the AAV particle comprises a viral genome comprising SEQ ID NO: 2313 and a VOY201 capsid. In some embodiments, the AAV particle comprises a viral genome comprising SEQ ID NO: 2313 and an AAV9 capsid. In some embodiments, the AAV particle comprises a viral genome comprising SEQ ID NO: 2313 and an AAV9K449R capsid. In some embodiments, the AAV particle comprises a viral genome comprising SEQ ID NO: 2313 and an AAVPHP.B capsid. In some embodiments, the AAV particle comprises a viral genome comprising SEQ ID NO: 2313 and an AAVPHP.N capsid. In some embodiments, the AAV particle comprises a viral genome comprising SEQ ID NO: 2313 and an AAV2 variant capsid. In some embodiments, the AAV particle comprises a viral genome comprising SEQ ID NO: 2313 and an AAV2/3 variant capsid. In some embodiments, the AAV particle comprises a viral genome comprising SEQ ID NO: 2313 and a capsid comprising SEQ ID NO: 1. In some embodiments, the AAV particle comprises a viral genome comprising SEQ ID NO: 2313 and a capsid encoded by a nucleic acid sequence comprising SEQ ID NO: 2. In some embodiments, the AAV particle comprises a viral genome comprising SEQ ID NO: 2313 and a capsid comprising SEQ ID NO: 4534. In some embodiments, the AAV particle comprises a viral genome comprising SEQ ID NO: 2313 and a capsid encoded by a nucleic acid sequence comprising SEQ ID NO: 3. In some embodiments, the AAV particle comprises a viral genome comprising SEQ ID NO: 2313 and a capsid comprising SEQ ID NO: 138. In some embodiments, the AAV particle comprises a viral genome comprising SEQ ID NO: 2313 and a capsid encoded by a nucleic acid sequence comprising SEQ ID NO: 137. In some embodiments, the AAV particle comprises a viral genome comprising SEQ ID NO: 2313 and a capsid comprising SEQ ID NO: 5. In some embodiments, the AAV particle comprises a viral genome comprising SEQ ID NO: 2313 and a capsid encoded by a nucleic acid sequence comprising SEQ ID NO: 6. In some embodiments, the AAV particle comprises a viral genome comprising SEQ ID NO: 2313 and a capsid comprising SEQ ID NO: 4. In some embodiments, the AAV particle comprises a viral genome comprising SEQ ID NO: 2313 and a capsid comprising SEQ ID NO: 11. In some embodiments, the AAV particle comprises a viral genome comprising SEQ ID NO: 2313 and a capsid comprising SEQ ID NO: 2679. In some embodiments, the AAV particle comprises a viral genome comprising SEQ ID NO: 2313 and a capsid comprising SEQ ID NO: 2809. In some embodiments, the AAV particle comprises a viral genome comprising SEQ ID NO: 2313 and a capsid comprising SEQ ID NO: 2871.

[0988] In some embodiments, the AAV particle comprises a viral genome comprising SEQ ID NO: 2314 and a VOY101 capsid. In some embodiments, the AAV particle comprises a viral genome comprising SEQ ID NO: 2314 and a VOY201 capsid. In some embodiments, the AAV particle comprises a viral genome comprising SEQ ID NO: 2314 and an AAV9 capsid. In some embodiments, the AAV particle comprises a viral genome comprising SEQ ID NO: 2314 and an AAV9K449R capsid. In some embodiments, the AAV particle comprises a viral genome comprising SEQ ID NO: 2314 and an AAVPHP.B capsid. In some embodiments, the AAV particle comprises a viral genome comprising SEQ ID NO: 2314 and an AAVPHP.N capsid. In some embodiments, the AAV particle comprises a viral genome comprising SEQ ID NO: 2314 and an AAV2 variant capsid. In some embodiments, the AAV particle comprises a viral genome comprising SEQ ID NO: 2314 and an AAV2/3 variant capsid. In some embodiments, the AAV particle comprises a viral genome comprising SEQ ID NO: 2314 and a capsid comprising SEQ ID NO: 1. In some embodiments, the AAV particle comprises a viral genome comprising SEQ ID NO: 2314 and a capsid encoded by a nucleic acid sequence comprising SEQ ID NO: 2. In some embodiments, the AAV particle comprises a viral genome comprising SEQ ID NO: 2314 and a capsid comprising SEQ ID NO: 4534. In some embodiments, the AAV particle comprises a viral genome comprising SEQ ID NO: 2314 and a capsid encoded by a nucleic acid sequence comprising SEQ ID NO: 3. In some embodiments, the AAV particle comprises a viral genome comprising SEQ ID NO: 2314 and a capsid comprising SEQ ID NO: 138. In some embodiments, the AAV particle comprises a viral genome comprising SEQ ID NO: 2314 and a capsid encoded by a nucleic acid sequence comprising SEQ ID NO: 137. In some embodiments, the AAV particle comprises a viral genome comprising SEQ ID NO: 2314 and a capsid comprising SEQ ID NO: 5. In some embodiments, the AAV particle comprises a viral genome comprising SEQ ID NO: 2314 and a capsid encoded by a nucleic acid sequence comprising SEQ ID NO: 6. In some embodiments, the AAV particle comprises a viral genome comprising SEQ ID NO: 2314 and a capsid comprising SEQ ID NO: 4. In some embodiments, the AAV particle comprises a viral genome comprising SEQ ID NO: 2314 and a capsid comprising SEQ ID NO: 11. In some embodiments, the AAV particle comprises a viral genome comprising SEQ ID NO: 2314 and a capsid comprising SEQ ID NO: 2679. In some embodiments, the AAV particle comprises a viral genome comprising SEQ ID NO: 2314 and a capsid comprising SEQ ID NO: 2809. In some embodiments, the AAV particle comprises a viral genome comprising SEQ ID NO: 2314 and a capsid comprising SEQ ID NO: 2871.

[0989] In some embodiments, the AAV particle comprises a viral genome comprising SEQ ID NO: 2315 and a VOY101 capsid. In some embodiments, the AAV particle comprises a viral genome comprising SEQ ID NO: 2315 and a VOY201 capsid. In some embodiments, the AAV particle comprises a viral genome comprising SEQ ID NO: 2315 and an AAV9 capsid. In some embodiments, the AAV particle comprises a viral genome comprising SEQ ID NO: 2315 and an AAV9K449R capsid. In some embodiments, the AAV particle comprises a viral genome comprising SEQ ID NO: 2315 and an AAVPHP.B capsid. In some embodiments, the AAV particle comprises a viral genome comprising SEQ ID NO: 2315 and an AAVPHP.N capsid. In some embodiments, the AAV particle comprises a viral genome comprising SEQ ID NO: 2315 and an AAV2 variant capsid. In some embodiments, the AAV particle comprises a viral genome comprising SEQ ID NO: 2315 and an AAV2/3 variant capsid. In some embodiments, the AAV particle comprises a viral genome comprising SEQ ID NO: 2315 and a capsid comprising SEQ ID NO: 1. In some embodiments, the AAV particle comprises a viral genome comprising SEQ ID NO: 2315 and a capsid encoded by a nucleic acid sequence comprising SEQ ID NO: 2. In some embodiments, the AAV particle comprises a viral genome comprising SEQ ID NO: 2315 and a capsid comprising SEQ ID NO: 4534. In some embodiments, the AAV particle comprises a viral genome comprising SEQ ID NO: 2315 and a capsid encoded by a nucleic acid sequence comprising SEQ ID NO: 3. In some embodiments, the AAV particle comprises a viral genome comprising SEQ ID NO: 2315 and a capsid comprising SEQ ID NO: 138. In some embodiments, the AAV particle comprises a viral genome comprising SEQ ID NO: 2315 and a capsid encoded by a nucleic acid sequence comprising SEQ ID NO: 137. In some embodiments, the AAV particle comprises a viral genome comprising SEQ ID NO: 2315 and a capsid comprising SEQ ID NO: 5. In some embodiments, the AAV particle comprises a viral genome comprising SEQ ID NO: 2315 and a capsid encoded by a nucleic acid sequence comprising SEQ ID NO: 6. In some embodiments, the AAV particle comprises a viral genome comprising SEQ ID NO: 2315 and a capsid comprising SEQ ID NO: 4. In some embodiments, the AAV particle comprises a viral genome comprising SEQ ID NO: 2315 and a capsid comprising SEQ ID NO: 11. In some embodiments, the AAV particle comprises a viral genome comprising SEQ ID NO: 2315 and a capsid comprising SEQ ID NO: 2679. In some embodiments, the AAV particle comprises a viral genome comprising SEQ ID NO: 2315 and a capsid comprising SEQ ID NO: 2809. In some embodiments, the AAV particle comprises a viral genome comprising SEQ ID NO: 2315 and a capsid comprising SEQ ID NO: 2871.

[0990] In some embodiments, the AAV particle comprises a viral genome comprising SEQ ID NO: 2316 and a VOY101 capsid. In some embodiments, the AAV particle comprises a viral genome comprising SEQ ID NO: 2316 and a VOY201 capsid. In some embodiments, the AAV particle comprises a viral genome comprising SEQ ID NO: 2316 and an AAV9 capsid. In some embodiments, the AAV particle comprises a viral genome comprising SEQ ID NO: 2316 and an AAV9K449R capsid. In some embodiments, the AAV particle comprises a viral genome comprising SEQ ID NO: 2316 and an AAVPHP.B capsid. In some embodiments, the AAV particle comprises a viral genome comprising SEQ ID NO: 2316 and an AAVPHP.N capsid. In some embodiments, the AAV particle comprises a viral genome comprising SEQ ID NO: 2316 and an AAV2 variant capsid. In some embodiments, the AAV particle comprises a viral genome comprising SEQ ID NO: 2316 and an AAV2/3 variant capsid. In some embodiments, the AAV particle comprises a viral genome comprising SEQ ID NO: 2316 and a capsid comprising SEQ ID NO: 1. In some embodiments, the AAV particle comprises a viral genome comprising SEQ ID NO: 2316 and a capsid encoded by a nucleic acid sequence comprising SEQ ID NO: 2. In some embodiments, the AAV particle comprises a viral genome comprising SEQ ID NO: 2316 and a capsid comprising SEQ ID NO: 4534. In some embodiments, the AAV particle comprises a viral genome comprising SEQ ID NO: 2316 and a capsid encoded by a nucleic acid sequence comprising SEQ ID NO: 3. In some embodiments, the AAV particle comprises a viral genome comprising SEQ ID NO: 2316 and a capsid comprising SEQ ID NO: 138. In some embodiments, the AAV particle comprises a viral genome comprising SEQ ID NO: 2316 and a capsid encoded by a nucleic acid sequence comprising SEQ ID NO: 137. In some embodiments, the AAV particle comprises a viral genome comprising SEQ ID NO: 2316 and a capsid comprising SEQ ID NO: 5. In some embodiments, the AAV particle comprises a viral genome comprising SEQ ID NO: 2316 and a capsid encoded by a nucleic acid sequence comprising SEQ ID NO: 6. In some embodiments, the AAV particle comprises a viral genome comprising SEQ ID NO: 2316 and a capsid comprising SEQ ID NO: 4. In some embodiments, the AAV particle comprises a viral genome comprising SEQ ID NO: 2316 and a capsid comprising SEQ ID NO: 11. In some embodiments, the AAV particle comprises a viral genome comprising SEQ ID NO: 2316 and a capsid comprising SEQ ID NO: 2679. In some embodiments, the AAV particle comprises a viral genome comprising SEQ ID NO: 2316 and a capsid comprising SEQ ID NO: 2809. In some embodiments, the AAV particle comprises a viral genome comprising SEQ ID NO: 2316 and a capsid comprising SEQ ID NO: 2871.

[0991] In some embodiments, the AAV particle comprises a viral genome comprising SEQ ID NO: 2317 and a VOY101 capsid. In some embodiments, the AAV particle comprises a viral genome comprising SEQ ID NO: 2317 and a VOY201 capsid. In some embodiments, the AAV particle comprises a viral genome comprising SEQ ID NO: 2317 and an AAV9 capsid. In some embodiments, the AAV particle comprises a viral genome comprising SEQ ID NO: 2317 and an AAV9K449R capsid. In some embodiments, the AAV particle comprises a viral genome comprising SEQ ID NO: 2317 and an AAVPHP.B capsid. In some embodiments, the AAV particle comprises a viral genome comprising SEQ ID NO: 2317 and an AAVPHP.N capsid. In some embodiments, the AAV particle comprises a viral genome comprising SEQ ID NO: 2317 and an AAV2 variant capsid. In some embodiments, the AAV particle comprises a viral genome comprising SEQ ID NO: 2317 and an AAV2/3 variant capsid. In some embodiments, the AAV particle comprises a viral genome comprising SEQ ID NO: 2317 and a capsid comprising SEQ ID NO: 1. In some embodiments, the AAV particle comprises a viral genome comprising SEQ ID NO: 2317 and a capsid encoded by a nucleic acid sequence comprising SEQ ID NO: 2. In some embodiments, the AAV particle comprises a viral genome comprising SEQ ID NO: 2317 and a capsid comprising SEQ ID NO: 4534. In some embodiments, the AAV particle comprises a viral genome comprising SEQ ID NO: 2317 and a capsid encoded by a nucleic acid sequence comprising SEQ ID NO: 3. In some embodiments, the AAV particle comprises a viral genome comprising SEQ ID NO: 2317 and a capsid comprising SEQ ID NO: 138. In some embodiments, the AAV particle comprises a viral genome comprising SEQ ID NO: 2317 and a capsid encoded by a nucleic acid sequence comprising SEQ ID NO: 137. In some embodiments, the AAV particle comprises a viral genome comprising SEQ ID NO: 2317 and a capsid comprising SEQ ID NO: 5. In some embodiments, the AAV particle comprises a viral genome comprising SEQ ID NO: 2317 and a capsid encoded by a nucleic acid sequence comprising SEQ ID NO: 6. In some embodiments, the AAV particle comprises a viral genome comprising SEQ ID NO: 2317 and a capsid comprising SEQ ID NO: 4. In some embodiments, the AAV particle comprises a viral genome comprising SEQ ID NO: 2317 and a capsid comprising SEQ ID NO: 11. In some embodiments, the AAV particle comprises a viral genome comprising SEQ ID NO: 2317 and a capsid comprising SEQ ID NO: 2679. In some embodiments, the AAV particle comprises a viral genome comprising SEQ ID NO: 2317 and a capsid comprising SEQ ID NO: 2809. In some embodiments, the AAV particle comprises a viral genome comprising SEQ ID NO: 2317 and a capsid comprising SEQ ID NO: 2871.

[0992] In some embodiments, the AAV particle comprises a viral genome comprising SEQ ID NO: 2318 and a VOY101 capsid. In some embodiments, the AAV particle comprises a viral genome comprising SEQ ID NO: 2318 and a VOY201 capsid. In some embodiments, the AAV particle comprises a viral genome comprising SEQ ID NO: 2318 and an AAV9 capsid. In some embodiments, the AAV particle comprises a viral genome comprising SEQ ID NO: 2318 and an AAV9K449R capsid. In some embodiments, the AAV particle comprises a viral genome comprising SEQ ID NO: 2318 and an AAVPHP.B capsid. In some embodiments, the AAV particle comprises a viral genome comprising SEQ ID NO: 2318 and an AAVPHP.N capsid. In some embodiments, the AAV particle comprises a viral genome comprising SEQ ID NO: 2318 and an AAV2 variant capsid. In some embodiments, the AAV particle comprises a viral genome comprising SEQ ID NO: 2318 and an AAV2/3 variant capsid. In some embodiments, the AAV particle comprises a viral genome comprising SEQ ID NO: 2318 and a capsid comprising SEQ ID NO: 1. In some embodiments, the AAV particle comprises a viral genome comprising SEQ ID NO: 2318 and a capsid encoded by a nucleic acid sequence comprising SEQ ID NO: 2. In some embodiments, the AAV particle comprises a viral genome comprising SEQ ID NO: 2318 and a capsid comprising SEQ ID NO: 4534. In some embodiments, the AAV particle comprises a viral genome comprising SEQ ID NO: 2318 and a capsid encoded by a nucleic acid sequence comprising SEQ ID NO: 3. In some embodiments, the AAV particle comprises a viral genome comprising SEQ ID NO: 2318 and a capsid comprising SEQ ID NO: 138. In some embodiments, the AAV particle comprises a viral genome comprising SEQ ID NO: 2318 and a capsid encoded by a nucleic acid sequence comprising SEQ ID NO: 137. In some embodiments, the AAV particle comprises a viral genome comprising SEQ ID NO: 2318 and a capsid comprising SEQ ID NO: 5. In some embodiments, the AAV particle comprises a viral genome comprising SEQ ID NO: 2318 and a capsid encoded by a nucleic acid sequence comprising SEQ ID NO: 6. In some embodiments, the AAV particle comprises a viral genome comprising SEQ ID NO: 2318 and a capsid comprising SEQ ID NO: 4. In some embodiments, the AAV particle comprises a viral genome comprising SEQ ID NO: 2318 and a capsid comprising SEQ ID NO: 11. In some embodiments, the AAV particle comprises a viral genome comprising SEQ ID NO: 2318 and a capsid comprising SEQ ID NO: 2679. In some embodiments, the AAV particle comprises a viral genome comprising SEQ ID NO: 2318 and a capsid comprising SEQ ID NO: 2809. In some embodiments, the AAV particle comprises a viral genome comprising SEQ ID NO: 2318 and a capsid comprising SEQ ID NO: 2871.

[0993] In some embodiments, the AAV particle comprises a viral genome comprising SEQ ID NO: 2319 and a VOY101 capsid. In some embodiments, the AAV particle comprises a viral genome comprising SEQ ID NO: 2319 and a VOY201 capsid. In some embodiments, the AAV particle comprises a viral genome comprising SEQ ID NO: 2319 and an AAV9 capsid. In some embodiments, the AAV particle comprises a viral genome comprising SEQ ID NO: 2319 and an AAV9K449R capsid. In some embodiments, the AAV particle comprises a viral genome comprising SEQ ID NO: 2319 and an AAVPHP.B capsid. In some embodiments, the AAV particle comprises a viral genome comprising SEQ ID NO: 2319 and an AAVPHP.N capsid. In some embodiments, the AAV particle comprises a viral genome comprising SEQ ID NO: 2319 and an AAV2 variant capsid. In some embodiments, the AAV particle comprises a viral genome comprising SEQ ID NO: 2319 and an AAV2/3 variant capsid. In some embodiments, the AAV particle comprises a viral genome comprising SEQ ID NO: 2319 and a capsid comprising SEQ ID NO: 1. In some embodiments, the AAV particle comprises a viral genome comprising SEQ ID NO: 2319 and a capsid encoded by a nucleic acid sequence comprising SEQ ID NO: 2. In some embodiments, the AAV particle comprises a viral genome comprising SEQ ID NO: 2319 and a capsid comprising SEQ ID NO: 4534. In some embodiments, the AAV particle comprises a viral genome comprising SEQ ID NO: 2319 and a capsid encoded by a nucleic acid sequence comprising SEQ ID NO: 3. In some embodiments, the AAV particle comprises a viral genome comprising SEQ ID NO: 2319 and a capsid comprising SEQ ID NO: 138. In some embodiments, the AAV particle comprises a viral genome comprising SEQ ID NO: 2319 and a capsid encoded by a nucleic acid sequence comprising SEQ ID NO: 137. In some embodiments, the AAV particle comprises a viral genome comprising SEQ ID NO: 2319 and a capsid comprising SEQ ID NO: 5. In some embodiments, the AAV particle comprises a viral genome comprising SEQ ID NO: 2319 and a capsid encoded by a nucleic acid sequence comprising SEQ ID NO: 6. In some embodiments, the AAV particle comprises a viral genome comprising SEQ ID NO: 2319 and a capsid comprising SEQ ID NO: 4. In some embodiments, the AAV particle comprises a viral genome comprising SEQ ID NO: 2319 and a capsid comprising SEQ ID NO: 11. In some embodiments, the AAV particle comprises a viral genome comprising SEQ ID NO: 2319 and a capsid comprising SEQ ID NO: 2679. In some embodiments, the AAV particle comprises a viral genome comprising SEQ ID NO: 2319 and a capsid comprising SEQ ID NO: 2809. In some embodiments, the AAV particle comprises a viral genome comprising SEQ ID NO: 2319 and a capsid comprising SEQ ID NO: 2871.

[0994] In some embodiments, the AAV particle comprises a viral genome comprising SEQ ID NO: 2320 and a VOY101 capsid. In some embodiments, the AAV particle comprises a viral genome comprising SEQ ID NO: 2320 and a VOY201 capsid. In some embodiments, the AAV particle comprises a viral genome comprising SEQ ID NO: 2320 and an AAV9 capsid. In some embodiments, the AAV particle comprises a viral genome comprising SEQ ID NO: 2320 and an AAV9K449R capsid. In some embodiments, the AAV particle comprises a viral genome comprising SEQ ID NO: 2320 and an AAVPHP.B capsid. In some embodiments, the AAV particle comprises a viral genome comprising SEQ ID NO: 2320 and an AAVPHP.N capsid. In some embodiments, the AAV particle comprises a viral genome comprising SEQ ID NO: 2320 and an AAV2 variant capsid. In some embodiments, the AAV particle comprises a viral genome comprising SEQ ID NO: 2320 and an AAV2/3 variant capsid. In some embodiments, the AAV particle comprises a viral genome comprising SEQ ID NO: 2320 and a capsid comprising SEQ ID NO: 1. In some embodiments, the AAV particle comprises a viral genome comprising SEQ ID NO: 2320 and a capsid encoded by a nucleic acid sequence comprising SEQ ID NO: 2. In some embodiments, the AAV particle comprises a viral genome comprising SEQ ID NO: 2320 and a capsid comprising SEQ ID NO: 4534. In some embodiments, the AAV particle comprises a viral genome comprising SEQ ID NO: 2320 and a capsid encoded by a nucleic acid sequence comprising SEQ ID NO: 3. In some embodiments, the AAV particle comprises a viral genome comprising SEQ ID NO: 2320 and a capsid comprising SEQ ID NO: 138. In some embodiments, the AAV particle comprises a viral genome comprising SEQ ID NO: 2320 and a capsid encoded by a nucleic acid sequence comprising SEQ ID NO: 137. In some embodiments, the AAV particle comprises a viral genome comprising SEQ ID NO: 2320 and a capsid comprising SEQ ID NO: 5. In some embodiments, the AAV particle comprises a viral genome comprising SEQ ID NO: 2320 and a capsid encoded by a nucleic acid sequence comprising SEQ ID NO: 6. In some embodiments, the AAV particle comprises a viral genome comprising SEQ ID NO: 2320 and a capsid comprising SEQ ID NO: 4. In some embodiments, the AAV particle comprises a viral genome comprising SEQ ID NO: 2320 and a capsid comprising SEQ ID NO: 11. In some embodiments, the AAV particle comprises a viral genome comprising SEQ ID NO: 2320 and a capsid comprising SEQ ID NO: 2679. In some embodiments, the AAV particle comprises a viral genome comprising SEQ ID NO: 2320 and a capsid comprising SEQ ID NO: 2809. In some embodiments, the AAV particle comprises a viral genome comprising SEQ ID NO: 2320 and a capsid comprising SEQ ID NO: 2871.

[0995] In some embodiments, the AAV particle comprises a viral genome comprising SEQ ID NO: 2321 and a VOY101 capsid. In some embodiments, the AAV particle comprises a viral genome comprising SEQ ID NO: 2321 and a VOY201 capsid. In some embodiments, the AAV particle comprises a viral genome comprising SEQ ID NO: 2321 and an AAV9 capsid. In some embodiments, the AAV particle comprises a viral genome comprising SEQ ID NO: 2321 and an AAV9K449R capsid. In some embodiments, the AAV particle comprises a viral genome comprising SEQ ID NO: 2321 and an AAVPHP.B capsid. In some embodiments, the AAV particle comprises a viral genome comprising SEQ ID NO: 2321 and an AAVPHP.N capsid. In some embodiments, the AAV particle comprises a viral genome comprising SEQ ID NO: 2321 and an AAV2 variant capsid. In some embodiments, the AAV particle comprises a viral genome comprising SEQ ID NO: 2321 and an AAV2/3 variant capsid. In some embodiments, the AAV particle comprises a viral genome comprising SEQ ID NO: 2321 and a capsid comprising SEQ ID NO: 1. In some embodiments, the AAV particle comprises a viral genome comprising SEQ ID NO: 2321 and a capsid encoded by a nucleic acid sequence comprising SEQ ID NO: 2. In some embodiments, the AAV particle comprises a viral genome comprising SEQ ID NO: 2321 and a capsid comprising SEQ ID NO: 4534. In some embodiments, the AAV particle comprises a viral genome comprising SEQ ID NO: 2321 and a capsid encoded by a nucleic acid sequence comprising SEQ ID NO: 3. In some embodiments, the AAV particle comprises a viral genome comprising SEQ ID NO: 2321 and a capsid comprising SEQ ID NO: 138. In some embodiments, the AAV particle comprises a viral genome comprising SEQ ID NO: 2321 and a capsid encoded by a nucleic acid sequence comprising SEQ ID NO: 137. In some embodiments, the AAV particle comprises a viral genome comprising SEQ ID NO: 2321 and a capsid comprising SEQ ID NO: 5. In some embodiments, the AAV particle comprises a viral genome comprising SEQ ID NO: 2321 and a capsid encoded by a nucleic acid sequence comprising SEQ ID NO: 6. In some embodiments, the AAV particle comprises a viral genome comprising SEQ ID NO: 2321 and a capsid comprising SEQ ID NO: 4. In some embodiments, the AAV particle comprises a viral genome comprising SEQ ID NO: 2321 and a capsid comprising SEQ ID NO: 11. In some embodiments, the AAV particle comprises a viral genome comprising SEQ ID NO: 2321 and a capsid comprising SEQ ID NO: 2679. In some embodiments, the AAV particle comprises a viral genome comprising SEQ ID NO: 2321 and a capsid comprising SEQ ID NO: 2809. In some embodiments, the AAV particle comprises a viral genome comprising SEQ ID NO: 2321 and a capsid comprising SEQ ID NO: 2871.

### II. Formulation and Delivery

### Pharmaceutical Compositions

[0996] According to the present disclosure the AAV particles may be prepared as pharmaceutical compositions. It will be understood that such compositions necessarily comprise one or more active ingredients and, most often, a pharmaceutically acceptable excipient.

[0997] Relative amounts of the active ingredient (e.g. AAV particle), a pharmaceutically acceptable excipient, and/or any additional ingredients in a pharmaceutical composition in accordance with the present disclosure may vary, depending upon the identity, size, and/or condition of the subject being treated and further depending upon the route by which the composition is to be administered. For example, the composition may comprise between 0.1% and 99% (w/w) of the active ingredient. By way of example, the composition may comprise between 0.1% and 100%, e.g., between 0.5 and 50%, between 1-30%, between 5-80%, at least 80% (w/w) active ingredient.

[0998] In some embodiments, the AAV particle pharmaceutical compositions described herein may comprise at least one payload. As a non-limiting example, the pharmaceutical compositions may contain an AAV particle with 1, 2, 3, 4 or 5 payloads. In some embodiments, the pharmaceutical composition may contain a nucleic acid encoding a payload construct encoding proteins selected from antibodies and/or antibody-based compositions.

[0999] Although the descriptions of pharmaceutical compositions provided herein are principally directed to pharmaceutical compositions which are suitable for administration to humans, it will be understood by the skilled artisan that such compositions are generally suitable for administration to any other animal, e.g., to non-human animals, e.g. non-human mammals. Modification of pharmaceutical compositions suitable for administration to humans in order to render the compositions suitable for administration to various animals is well understood, and the ordinarily skilled veterinary pharmacologist can design and/or perform such modification with merely ordinary, if any, experimentation. Subjects to which administration of the pharmaceutical compositions is contemplated include, but are not limited to, humans and/or other primates; mammals, including commercially relevant mammals such as cattle, pigs, horses, sheep, cats, dogs, mice, rats, birds, including commercially relevant birds such as poultry, chickens, ducks, geese, and/or turkeys.

[1000] In some embodiments, compositions are administered to humans, human patients, or subjects.

### Formulations

[1001] The AAV particles can be formulated using one or more excipients to: (1) increase stability; (2) increase cell transfection or transduction; (3) permit the sustained or delayed expression of the payload; (4) alter the biodistribution (e.g., target the viral particle to specific tissues or cell types); (5) increase the translation of encoded protein; (6) alter the release profile of encoded protein; and/or (7) allow for regulatable expression of the payload.

[1002] Formulations of the present disclosure can include, without limitation, saline, liposomes, lipid nanoparticles, polymers, peptides, proteins, cells transfected with viral vectors (e.g., for transfer or transplantation into a subject) and combinations thereof.

[1003] Formulations of the pharmaceutical compositions described herein may be prepared by any method known or hereafter developed in the art of pharmacology. As used herein the term “pharmaceutical composition” refers to compositions comprising at least one active ingredient and optionally one or more pharmaceutically acceptable excipients.

[1004] In general, such preparatory methods include the step of associating the active ingredient with an excipient and/or one or more other accessory ingredients. As used herein, the phrase “active ingredient” generally refers either to an AAV particle carrying a payload region encoding the polypeptides or to the antibody or antibody-based composition encoded by a viral genome of by an AAV particle as described herein.

[1005] A pharmaceutical composition in accordance with the present disclosure may be prepared, packaged, and/or sold in bulk, as a single unit dose, and/or as a plurality of single unit doses. As used herein, a “unit dose” refers to a discrete amount of the pharmaceutical composition comprising a predetermined amount of the active ingredient. The amount of the active ingredient is generally equal to the dosage of the active ingredient which would be administered to a subject and/or a convenient fraction of such a dosage such as, for example, one-half or one-third of such a dosage.

[1006] In some embodiments, the AAV particles may be formulated in phosphate buffered saline (PBS), in combination with an ethylene oxide/propylene oxide copolymer (also known as Pluronic or poloxamer).

[1007] In some embodiments, the AAV particles may be formulated in PBS with 0.001% Pluronic acid (F-68) (poloxamer 188) at a pH of about 7.0.

[1008] In some embodiments, the AAV particles may be formulated in PBS with 0.001% Pluronic acid (F-68) (poloxamer 188) at a pH of about 7.3.

[1009] In some embodiments, the AAV particles may be formulated in PBS with 0.001% Pluronic acid (F-68) (poloxamer 188) at a pH of about 7.4.

[1010] In some embodiments, the AAV particles may be formulated in a solution comprising sodium chloride, sodium phosphate and an ethylene oxide/propylene oxide copolymer.

[1011] In some embodiments, the AAV particles may be formulated in a solution comprising sodium chloride, sodium phosphate dibasic, sodium phosphate monobasic and poloxamer 188/Pluronic acid (F-68).

[1012] In some embodiments, the AAV particles may be formulated in a solution comprising about 180 mM sodium chloride, about 10 mM sodium phosphate and about 0.001% poloxamer 188. In some embodiments, this formulation may be at a pH of about 7.3. The concentration of sodium chloride in the final solution may be 150 mM-200 mM. As non-limiting examples, the concentration of sodium chloride in the final solution may be 150 mM, 160 mM, 170 mM, 180 mM, 190 mM or 200 mM. The concentration of sodium phosphate in the final solution may be 1 mM-50 mM. As non-limiting examples, the concentration of sodium phosphate in the final solution may be 1 mM, 2 mM, 3 mM, 4 mM, 5 mM, 6 mM, 7 mM, 8 mM, 9 mM, 10 mM, 15 mM, 20 mM, 25 mM, 30 mM, 40 mM, or 50 mM. The concentration of poloxamer 188 (Pluronic acid (F-68)) may be 0.0001%-1%. As non-limiting examples, the concentration of poloxamer 188 (Pluronic acid (F-68)) may be 0.0001%, 0.0005%, 0.001%, 0.005%, 0.01%, 0.05%, 0.1%, 0.5%, or 1%. The final solution may have a pH of 6.8-7.7. Non-limiting examples for the pH of the final solution include a pH of 6.8, 6.9, 7.0, 7.1, 7.2, 7.3, 7.4, 7.5, 7.6, or 7.7.

[1013] In some embodiments, the AAV particles of the invention may be formulated in a solution comprising about 1.05% sodium chloride, about 0.212% sodium phosphate dibasic, heptahydrate, about 0.025% sodium phosphate monobasic, monohydrate, and 0.001% poloxamer 188, at a pH of about 7.4. As a non-limiting example, the concentration of AAV particle in this formulated solution may be about 0.001%. The concentration of sodium chloride in the final solution may be 0.1-2.0%, with non-limiting examples of 0.1%, 0.25%, 0.5%, 0.75%, 0.95%, 0.96%, 0.97%, 0.98%, 0.99%, 1.00%, 1.01%, 1.02%, 1.03%, 1.04%, 1.05%, 1.06%, 1.07%, 1.08%, 1.09%, 1.10%, 1.25%, 1.5%, 1.75%, or 2%. The concentration of sodium phosphate dibasic in the final solution may be 0.100-0.300% with non-limiting examples including 0.100%, 0.125%, 0.150%, 0.175%, 0.200%, 0.210%, 0.211%, 0.212%, 0.213%, 0.214%, 0.215%, 0.225%, 0.250%, 0.275%, 0.300%. The concentration of sodium phosphate monobasic in the final solution may be 0.010-0.050%, with non-limiting examples of 0.010%, 0.015%, 0.020%, 0.021%, 0.022%, 0.023%, 0.024%, 0.025%, 0.026%, 0.027%, 0.028%, 0.029%, 0.030%, 0.035%, 0.040%, 0.045%, or 0.050%. The concentration of poloxamer 188 (Pluronic acid (F-68)) may be 0.0001%-1%. As non-limiting examples, the concentration of poloxamer 188 (Pluronic acid (F-68)) may be 0.0001%, 0.0005%, 0.001%, 0.005%, 0.01%, 0.05%, 0.1%, 0.5%, or 1%. The final solution may have a pH of 6.8-7.7. Non-limiting examples for the pH of the final solution include a pH of 6.8, 6.9, 7.0, 7.1, 7.2, 7.3, 7.4, 7.5, 7.6, or 7.7.

[1014] Relative amounts of the active ingredient (e.g. AAV particle), the pharmaceutically acceptable excipient, and/or any additional ingredients in a pharmaceutical composition in accordance with the present disclosure may vary, depending upon the identity, size, and/or condition of the subject being treated and further depending upon the route by which the composition is to be administered. For example, the composition may comprise between 0.1% and 99% (w/w) of the active ingredient. By way of example, the composition may comprise between 0.1% and 100%, e.g., between 0.5 and 50%, between 1-30%, between 5-80%, or at least 80% (w/w) active ingredient.

[1015] In some embodiments, the AAV formulations described herein may contain sufficient AAV particles for expression of at least one expressed functional antibody or antibody-based composition. As a non-limiting example, the AAV particles may contain viral genomes encoding 1, 2, 3, 4, or 5 functional antibodies.

[1016] According to the present disclosure AAV particles may be formulated for CNS delivery. Agents that cross the brain blood barrier may be used. For example, some cell penetrating peptides that can target molecules to the brain blood barrier endothelium may be used for formulation (e.g., Mathupala, Expert Opin Ther Pat., 2009, 19, 137-140; the content of which is incorporated herein by reference in its entirety).

### Excipients and Diluents

[1017] In some embodiments, a pharmaceutically acceptable excipient may be at least 95%, at least 96%, at least 97%, at least 98%, at least 99%, or 100% pure. In some embodiments, an excipient is approved for use for humans and for veterinary use. In some embodiments, an excipient may be approved by United States Food and Drug Administration. In some embodiments, an excipient may be of pharmaceutical grade. In some embodiments, an excipient may meet the standards of the United States Pharmacopoeia (USP), the European Pharmacopoeia (EP), the British Pharmacopoeia, and/or the International Pharmacopoeia.

[1018] Excipients, as used herein, include, but are not limited to, any and all solvents, dispersion media, diluents, or other liquid vehicles, dispersion or suspension aids, surface active agents, isotonic agents, thickening or emulsifying agents, preservatives, and the like, as suited to the particular dosage form desired. Various excipients for formulating pharmaceutical compositions and techniques for preparing the composition are known in the art (see Remington: The Science and Practice of Pharmacy, 21st Edition, A. R. Gennaro, Lippincott, Williams & Wilkins, Baltimore, Md., 2006; incorporated herein by reference in its entirety). The use of a conventional excipient medium may be contemplated within the scope of the present disclosure, except insofar as any conventional excipient medium may be incompatible with a substance or its derivatives, such as by producing any undesirable biological effect or otherwise interacting in a deleterious manner with any other component(s) of the pharmaceutical composition.

[1019] Exemplary diluents include, but are not limited to, calcium carbonate, sodium carbonate, calcium phosphate, dicalcium phosphate, calcium sulfate, calcium hydrogen phosphate, sodium phosphate lactose, sucrose, cellulose, microcrystalline cellulose, kaolin, mannitol, sorbitol, inositol, sodium chloride, dry starch, cornstarch, powdered sugar, etc., and/or combinations thereof.

### Inactive Ingredients

[1020] In some embodiments, AAV particle formulations may comprise at least one inactive ingredient. As used herein, the term “inactive ingredient” refers to one or more agents that do not contribute to the activity of the active ingredient of the pharmaceutical composition included in formulations. In some embodiments, all, none or some of the inactive ingredients which may be used in the formulations of the present disclosure may be approved by the US Food and Drug Administration (FDA).

[1021] Pharmaceutical composition formulations of AAV particles disclosed herein may include cations or anions. In some embodiments, the formulations include metal cations such as, but not limited to, Zn2+, Ca2+, Cu2+, Mn2+, Mg+ and combinations thereof. As a non-limiting example, formulations may include polymers and complexes with a metal cation (See e.g., U.S. Pat. Nos. 6,265,389 and 6,555,525, each of which is herein incorporated by reference in its entirety).

### III. Administration and Dosing

### Administration

[1022] The AAV particles of the present disclosure may be administered by any delivery route which results in a therapeutically effective outcome. These include, but are not limited to, enteral (into the intestine), gastroenteral, epidural (into the dura mater), oral (by way of the mouth), transdermal, intracerebral (into the cerebrum), intracerebroventricular (into the cerebral ventricles), epicutaneous (application onto the skin), intradermal (into the skin itself), subcutaneous (under the skin), nasal administration (through the nose), intravenous (into a vein), intravenous bolus, intravenous drip, intra-arterial (into an artery), intramuscular (into a muscle), intracardiac (into the heart), intraosseous infusion (into the bone marrow), intrathecal (into the spinal canal), intraparenchymal (into brain tissue), intraperitoneal (infusion or injection into the peritoneum), intravesical infusion, intravitreal (through the eye), intracavernous injection (into a pathologic cavity) intracavitary (into the base of the penis), intravaginal administration, intrauterine, extra-amniotic administration, transdermal (diffusion through the intact skin for systemic distribution), transmucosal (diffusion through a mucous membrane), transvaginal, insufflation (snorting), sublingual, sublabial, enema, eye drops (onto the conjunctiva), ear drops, auricular (in or by way of the ear), buccal (directed toward the cheek), conjunctival, cutaneous, dental (to a tooth or teeth), electro-osmosis, endocervical, endosinusial, endotracheal, extracorporeal, hemodialysis, infiltration, interstitial, intra-abdominal, intra-amniotic, intra-articular, intrabiliary, intrabronchial, intrabursal, intracartilaginous (within a cartilage), intracaudal (within the cauda equine), intracisternal (within the cisterna magna cerebellomedularis), intracorneal (within the cornea), dental intracoronal, intracoronary (within the coronary arteries), intracorporus cavernosum (within the dilatable spaces of the corporus cavernosa of the penis), intradiscal (within a disc), intraductal (within a duct of a gland), intraduodenal (within the duodenum), intradural (within or beneath the dura), intraepidermal (to the epidermis), intraesophageal (to the esophagus), intragastric (within the stomach), intragingival (within the gingivae), intraileal (within the distal portion of the small intestine), intralesional (within or introduced directly to a localized lesion), intraluminal (within a lumen of a tube), intralymphatic (within the lymph), intramedullary (within the marrow cavity of a bone), intrameningeal (within the meninges), intramyocardial (within the myocardium), intraocular (within the eye), intraovarian (within the ovary), intrapericardial (within the pericardium), intrapleural (within the pleura), intraprostatic (within the prostate gland), intrapulmonary (within the lungs or its bronchi), intrasinal (within the nasal or periorbital sinuses), intraspinal (within the vertebral column), intrasynovial (within the synovial cavity of a joint), intratendinous (within a tendon), intratesticular (within the testicle), intrathecal (within the cerebrospinal fluid at any level of the cerebrospinal axis), intrathoracic (within the thorax), intratubular (within the tubules of an organ), intratumor (within a tumor), intratympanic (within the aurus media), intravascular (within a vessel or vessels), intraventricular (within a ventricle), iontophoresis (by means of electric current where ions of soluble salts migrate into the tissues of the body), irrigation (to bathe or flush open wounds or body cavities), laryngeal (directly upon the larynx), nasogastric (through the nose and into the stomach), occlusive dressing technique (topical route administration which is then covered by a dressing which occludes the area), ophthalmic (to the external eye), oropharyngeal (directly to the mouth and pharynx), parenteral, percutaneous, periarticular, peridural, perineural, periodontal, rectal, respiratory (within the respiratory tract by inhaling orally or nasally for local or systemic effect), retrobulbar (behind the pons or behind the eyeball), soft tissue, subarachnoid, subconjunctival, submucosal, topical, transplacental (through or across the placenta), transtracheal (through the wall of the trachea), transtympanic (across or through the tympanic cavity), ureteral (to the ureter), urethral (to the urethra), vaginal, caudal block, diagnostic, nerve block, biliary perfusion, cardiac perfusion, photopheresis, and spinal.

[1023] In some embodiments, compositions may be administered in away which allows them to cross the blood-brain barrier, vascular barrier, or other epithelial barrier. The AAV particles of the present disclosure may be administered in any suitable form, either as a liquid solution or suspension, as a solid form suitable for liquid solution or suspension in a liquid solution. The AAV particles may be formulated with any appropriate and pharmaceutically acceptable excipient.

[1024] In some embodiments, the AAV particles of the present disclosure may be delivered to a subject via a single route administration.

[1025] In some embodiments, the AAV particles of the present disclosure may be delivered to a subject via a multi-site route of administration. A subject may be administered at 2, 3, 4, 5, or more than 5 sites.

[1026] In some embodiments, a subject may be administered the AAV particles of the present disclosure using a bolus infusion.

[1027] In some embodiments, a subject may be administered the AAV particles of the present disclosure using sustained delivery over a period of minutes, hours, or days. The infusion rate may be changed depending on the subject, distribution, formulation or another delivery parameter.

[1028] In some embodiments, the AAV particles may be delivered by more than one route of administration. As non-limiting examples of combination administrations, AAV particles may be delivered by intrathecal and intracerebroventricular, or by intravenous and intraparenchymal administration.

### Intravenous Administration

[1029] In some embodiments, the AAV particles may be administered to a subject by systemic administration.

[1030] In some embodiments, the systemic administration is intravenous administration.

[1031] In another embodiment, the systemic administration is intraarterial administration.

[1032] In some embodiments, the AAV particles of the present disclosure may be administered to a subject by intravenous administration.

[1033] In some embodiments, the intravenous administration may be achieved by subcutaneous delivery.

[1034] In some embodiments, the intravenous administration may be achieved by a tail vein injection (e.g., in a mouse model).

[1035] In some embodiments, the intravenous administration may be achieved by retro-orbital injection.

### Administration to the CNS

[1036] In some embodiments, the AAV particles may be delivered by direct injection into the brain. As a non-limiting example, the brain delivery may be by intrahippocampal administration.

[1037] In some embodiments, the AAV particles of the present disclosure may be administered to a subject by intraparenchymal administration. In some embodiments, the intraparenchymal administration is to tissue of the central nervous system.

[1038] In some embodiments, the AAV particles of the present disclosure may be administered to a subject by intracranial delivery (See. e.g., U.S. Pat. No. 8,119,611; the content of which is incorporated herein by reference in its entirety).

[1039] In some embodiments, the AAV particles may be delivered by injection into the CSF pathway. Non-limiting examples of delivery to the CSF pathway include intrathecal and intracerebroventricular administration.

[1040] In some embodiments, the AAV particles may be delivered to the brain by systemic delivery. As a non-limiting example, the systemic delivery may be by intravascular administration. As a non-limiting example, the systemic or intravascular administration may be intravenous.

[1041] In some embodiments, the AAV particles of the present disclosure may be delivered by intraocular delivery route. A non-limiting example of intraocular administration include an intravitreal injection.

### Intramuscular Administration

[1042] In some embodiments, the AAV particles may be delivered by intramuscular administration. Whilst not wishing to be bound by theory, the multi-nucleated nature of muscle cells provides an advantage to gene transduction subsequent to AAV delivery. Cells of the muscle are capable of expressing recombinant proteins with the appropriate post-translational modifications. The enrichment of muscle tissue with vascular structures allows for transfer to the blood stream and whole-body delivery. Examples of intramuscular administration include systemic (e.g., intravenous), subcutaneous or directly into the muscle. In some embodiments, more than one injection is administered.

[1043] In some embodiments, the AAV particles of the present disclosure may be delivered by intramuscular delivery route. (See, e.g., U.S. Pat. No. 6,506,379: the content of which is incorporated herein by reference in its entirety). Non-limiting examples of intramuscular administration include an intravenous injection or a subcutaneous injection.

[1044] In some embodiments, the AAV particles of the present disclosure are administered to a subject and transduce muscle of a subject. As a non-limiting example, the AAV particles are administered by intramuscular administration.

[1045] In some embodiments, the AAV particles of the present disclosure may be administered to a subject by subcutaneous administration.

[1046] In some embodiments, the intramuscular administration is via systemic delivery.

[1047] In some embodiments, the intramuscular administration is via intravenous delivery.

[1048] In some embodiments, the intramuscular administration is via direct injection to the muscle.

[1049] In some embodiments, the muscle is transduced by administration, and this is referred to as intramuscular administration.

[1050] In some embodiments, the intramuscular delivery comprises administration at one site.

[1051] In some embodiments, the intramuscular delivery comprises administration at more than one site. In some embodiments, the intramuscular delivery comprises administration at two sites. In some embodiments, the intramuscular delivery comprises administration at three sites. In some embodiments, the intramuscular delivery comprises administration at four sites. In some embodiments, the intramuscular delivery comprises administration at more than four sites.

[1052] In some embodiments, intramuscular delivery is combined with at least one other method of administration.

[1053] In some embodiments, the AAV particles that may be administered to a subject by peripheral injections. Non-limiting examples of peripheral injections include intraperitoneal, intramuscular, intravenous, conjunctival, or joint injection. It was disclosed in the art that the peripheral administration of AAV vectors can be transported to the central nervous system, for example, to the motor neurons (e.g., U.S. Patent Publication Nos. US20100240739 and US20100130594; the content of each of which is incorporated herein by reference in their entirety).

[1054] In some embodiments, the AAV particles of the present disclosure may be administered to a subject by intraparenchymal administration. In some embodiments, the intraparenchymal administration is to muscle tissue.

[1055] In some embodiments, the AAV particles of the present disclosure are delivered as described in Bright et al 2015 (Neurobiol Aging. 36(2):693-709), the contents of which are herein incorporated by reference in their entirety.

[1056] In some embodiments, the AAV particles of the present disclosure are administered to the gastrocnemius muscle of a subject.

[1057] In some embodiments, the AAV particles of the present disclosure are administered to the bicep femorii of the subject.

[1058] In some embodiments, the AAV particles of the present disclosure are administered to the tibialis anterior muscles.

[1059] In some embodiments, the AAV particles of the present disclosure are administered to the soleus muscle.

[1060] Depot Administration

[1061] As described herein, in some embodiments, pharmaceutical compositions, AAV particles of the present disclosure are formulated in depots for extended release. Generally, specific organs or tissues (“target tissues”) are targeted for administration.

[1062] In some aspects, pharmaceutical compositions, AAV particles of the present disclosure are spatially retained within or proximal to target tissues. Provided are methods of providing pharmaceutical compositions, AAV particles, to target tissues of mammalian subjects by contacting target tissues (which comprise one or more target cells) with pharmaceutical compositions, AAV particles, under conditions such that they are substantially retained in target tissues, meaning that at least 10, 20, 30, 40, 50, 60, 70, 80, 85, 90, 95, 96, 97, 98, 99, 99.9, 99.99 or greater than 99.99% of the composition is retained in the target tissues. Advantageously, retention is determined by measuring the amount of pharmaceutical compositions, AAV particles, that enter one or more target cells. For example, at least 1%, 5%, 10%, 20%, 30%, 40%, 50%, 60%, 70%, 80%, 85%, 90%, 95%, 96%, 97%, 98%, 99%, 99.9%, 99.99%, or greater than 99.99% of pharmaceutical compositions, AAV particles, administered to subjects are present intracellularly at a period of time following administration. For example, intramuscular injection to mammalian subjects may be performed using aqueous compositions comprising pharmaceutical compositions, AAV particles of the present disclosure and one or more transfection reagents, and retention is determined by measuring the amount of pharmaceutical compositions, AAV particles, present in muscle cells.

[1063] Certain aspects are directed to methods of providing pharmaceutical compositions, AAV particles of the present disclosure to a target tissues of mammalian subjects, by contacting target tissues (comprising one or more target cells) with pharmaceutical compositions, AAV particles under conditions such that they are substantially retained in such target tissues. Pharmaceutical compositions, AAV particles comprise enough active ingredient such that the effect of interest is produced in at least one target cell. In some embodiments, pharmaceutical compositions, AAV particles generally comprise one or more cell penetration agents, although “naked” formulations (such as without cell penetration agents or other agents) are also contemplated, with or without pharmaceutically acceptable carriers.

### Delivery

[1064] In some embodiments, the AAV particles or pharmaceutical compositions of the present disclosure may be administered or delivered using the methods for treatment of disease described in U.S. Pat. No. 8,999,948, or International Publication No. WO2014178863, the contents of which are herein incorporated by reference in their entirety.

[1065] In some embodiments, the AAV particles or pharmaceutical compositions of the present disclosure may be administered or delivered using the methods for delivering gene therapy in Alzheimer's Disease or other neurodegenerative conditions as described in US Application No. 20150126590, the contents of which are herein incorporated by reference in their entirety.

[1066] In some embodiments, the AAV particles or pharmaceutical compositions of the present disclosure may be administered or delivered using the methods for delivery of a CNS gene therapy as described in U.S. Pat. Nos. 6,436,708, and 8,946,152, and International Publication No. WO2015168666, the contents of which are herein incorporated by reference in their entirety.

[1067] In some embodiments, the AAV particle or pharmaceutical compositions of the present disclosure may be administered or delivered using the methods for delivering proteins using AAV vectors described in European Patent Application No. EP2678433, the contents of which are herein incorporated by reference in their entirety.

[1068] In some embodiments, the AAV particle or pharmaceutical compositions of the present disclosure may be administered or delivered using the methods for delivering DNA to the bloodstream described in U.S. Pat. No. 6,211,163, the contents of which are herein incorporated by reference in their entirety.

[1069] In some embodiments, the AAV particle or pharmaceutical compositions of the present disclosure may be administered or delivered using the methods for delivering a payload to the central nervous system described in U.S. Pat. No. 7,588,757, the contents of which are herein incorporated by reference in their entirety.

[1070] In some embodiments, the AAV particle or pharmaceutical compositions of the present disclosure may be administered or delivered using the methods for delivering a payload described in U.S. Pat. No. 8,283,151, the contents of which are herein incorporated by reference in their entirety.

[1071] In some embodiments, the AAV particle or pharmaceutical compositions of the present disclosure may be administered or delivered using the methods for delivering a payload using a glutamic acid decarboxylase (GAD) delivery vector described in International Patent Publication No. WO2001089583, the contents of which are herein incorporated by reference in their entirety.

[1072] In some embodiments, the AAV particle or pharmaceutical compositions of the present disclosure may be administered or delivered using the methods for delivering a payload to neural cells described in International Patent Publication No. WO2012057363, the contents of which are herein incorporated by reference in their entirety.

### Delivery to Cells

[1073] The present disclosure provides a method of delivering to a cell or tissue any of the above-described AAV particles, comprising contacting the cell or tissue with said AAV particle or contacting the cell or tissue with a formulation comprising said AAV particle, or contacting the cell or tissue with any of the described compositions, including pharmaceutical compositions. The method of delivering the AAV particle to a cell or tissue can be accomplished in vitro, ex vivo, or in vivo.

### Delivery to Subjects

[1074] The present disclosure additionally provides a method of delivering to a subject, including a mammalian subject, any of the above-described AAV particles comprising administering to the subject said AAV particle, or administering to the subject a formulation comprising said AAV particle, or administering to the subject any of the described compositions, including pharmaceutical compositions.

### Dose and Regimen

[1075] The present disclosure provides methods of administering AAV particles in accordance with the disclosure to a subject in need thereof. The pharmaceutical, diagnostic, or prophylactic AAV particles and compositions of the present disclosure may be administered to a subject using any amount and any route of administration effective for preventing, treating, managing, or diagnosing diseases, disorders and/or conditions. The exact amount required will vary from subject to subject, depending on the species, age, and general condition of the subject, the severity of the disease, the particular composition, its mode of administration, its mode of activity, and the like. The subject may be a human, a mammal, or an animal. Compositions in accordance with the disclosure are typically formulated in unit dosage form for ease of administration and uniformity of dosage. It will be understood, however, that the total daily usage of the compositions of the present disclosure may be decided by the attending physician within the scope of sound medical judgment. The specific therapeutically effective, prophylactically effective, or appropriate diagnostic dose level for any particular individual will depend upon a variety of factors including the disorder being treated and the severity of the disorder; the activity of the specific payload employed; the specific composition employed; the age, body weight, general health, sex and diet of the patient; the time of administration, route of administration, and rate of excretion of the specific AAV particle employed; the duration of the treatment; drugs used in combination or coincidental with the specific AAV particle employed; and like factors well known in the medical arts.

[1076] In certain embodiments, AAV particle pharmaceutical compositions in accordance with the present disclosure may be administered at dosage levels sufficient to deliver from about 0.0001 mg/kg to about 100 mg/kg, from about 0.001 mg/kg to about 0.05 mg/kg, from about 0.005 mg/kg to about 0.05 mg/kg, from about 0.001 mg/kg to about 0.005 mg/kg, from about 0.05 mg/kg to about 0.5 mg/kg, from about 0.01 mg/kg to about 50 mg/kg, from about 0.1 mg/kg to about 40 mg/kg, from about 0.5 mg/kg to about 30 mg/kg, from about 0.01 mg/kg to about 10 mg/kg, from about 0.1 mg/kg to about 10 mg/kg, or from about 1 mg/kg to about 25 mg/kg, of subject body weight per day, one or more times a day, to obtain the desired therapeutic, diagnostic, or prophylactic, effect. It will be understood that the above dosing concentrations may be converted to vg or viral genomes per kg or into total viral genomes administered by one of skill in the art.

[1077] In certain embodiments, AAV particle pharmaceutical compositions in accordance with the present disclosure may be administered at about 10 to about 600 μl/site, 50 to about 500 μl/site, 100 to about 400 μl/site, 120 to about 300 μl/site, 140 to about 200 μl/site, about 160 μl/site. As non-limiting examples, AAV particles may be administered at 50 μl/site and/or 150 μl/site.

[1078] In certain embodiments, the desired dosage may be delivered using multiple administrations (e.g., two, three, four, or more than four administrations). When multiple administrations are employed, split dosing regimens such as those described herein may be used. As used herein, a “split dose” is the division of “single unit dose” or total daily dose into two or more doses, e.g., two or more administrations of the “single unit dose”. As used herein, a “single unit dose” is a dose of any therapeutic administered in one dose/at one time/single route/single point of contact, i.e., single administration event.

[1079] The desired dosage of the AAV particles of the present disclosure may be administered as a “pulse dose” or as a “continuous flow”. As used herein, a “pulse dose” is a series of single unit doses of any therapeutic administered with a set frequency over a period of time. As used herein, a “continuous flow” is a dose of therapeutic administered continuously for a period of time in a single route/single point of contact, i.e., continuous administration event. A total daily dose, an amount given or prescribed in 24-hour period, may be administered by any of these methods, or as a combination of these methods, or by any other methods suitable for a pharmaceutical administration.

[1080] In some embodiments, delivery of the AAV particles of the present disclosure to a subject provides neutralizing activity to a subject. The neutralizing activity can be for at least 1 month, 2 months, 3 months, 4 months, 5 months, 6 months, 7 months, 8 months, 9 months, 10 months, 10 months, 1 year, 13 months, 14 months, 15 months, 16 months, 17 months, 18 months, 19 months, 20 months, 20 months, 21 months, 22 months, 23 months, 2 years, 3 years, 4 years, 5 years, 6 years, 7 years, 8 years, 9 years, 10 years or more than 10 years.

[1081] In some embodiments, delivery of the AAV particles of the present disclosure results in minimal serious adverse events (SAEs) as a result of the delivery of the AAV particles.

[1082] In some embodiments, delivery of AAV particles may comprise a total dose between about 1×10⁶VG and about 1×10¹⁶VG. In some embodiments, delivery may comprise a total dose of about 1×10⁶, 2×10⁶, 3×10⁶, 4×10⁶, 5×10⁶, 6×10⁶, 7×10⁶, 8×10⁶, 9×10⁶, 1×10⁷, 2×10⁷, 3×10⁷, 4×10⁷, 5×10⁷, 6×10⁷, 7×10⁷, 8×10⁷, 9×10⁷, 1×10⁸, 2×10⁸, 3×10⁸, 4×10⁸, 5×10⁸, 6×10⁸, 7×10⁸, 8×10⁸, 9×10⁸, 1×10⁹, 2×10⁹, 3×10⁹, 4×10⁹, 5×10⁹, 6×10⁹, 7×10⁹, 8×10⁹, 9×10⁹, 1×10¹⁰, 1.9×10¹⁰, 2×10¹⁰, 3×10¹⁰, 3.73×10¹⁰, 4×10¹⁰, 5×10¹⁰, 6×10¹⁰, 7×10¹⁰, 8×10¹⁰, 9×10¹⁰, 1×10¹¹, 2×10¹¹, 2.5×10¹¹, 3×10¹¹, 4×10¹¹, 5×10¹¹, 6×10¹¹, 7×10¹¹, 8×10¹¹, 9×10¹¹, 1×10¹², 2×10¹², 3×10¹², 4×10¹², 5×10¹², 6×10¹², 7×10¹², 8×10¹², 9×10¹², 1×10¹³, 2×10¹³, 3×10¹³, 4×10¹³, 5×10¹³, 6×10¹³, 7×10¹³, 8×10¹³, 9×10¹³, 1×10¹⁴, 2×10¹⁴, 3×10¹⁴, 4×10¹⁴, 5×10¹⁴, 6×10¹⁴, 7×10¹⁴, 8×10¹⁴, 9×10¹⁴, 1×10¹⁵, 2×10, 3×10¹⁵, 4×10¹⁵, 5×10¹⁵, 6×10¹⁵, 7×10¹⁵, 8×10¹⁵, 9×10¹⁵, or 1×10¹⁶ VG. As a non-limiting example, the total dose is 1×10¹³VG. As another non-limiting example, the total dose is 2.1×10¹² VG.

[1083] In some embodiments, delivery of AAV particles may comprise a composition concentration between about 1×10⁶ VG/mL and about 1×10¹⁶ VG/mL. In some embodiments, delivery may comprise a composition concentration of about 1×10⁶, 2×10⁶, 3×10⁶, 4×10⁶, 5×10⁶, 6×10⁶, 7×10⁶, 8×10⁶, 9×10⁶, 1×10⁷, 2×10⁷, 3×10⁷, 4×10⁷, 5×10⁷, 6×10⁷, 7×10⁷, 8×10⁷, 9×10⁷, 1×10⁸, 2×10⁸, 3×10⁸, 4×10⁸, 5×10⁸, 6×10⁸, 7×10⁸, 8×10⁸, 9×10⁸, 1×10⁹, 2×10⁹, 3×10⁹, 4×10⁹, 5×10⁹, 6×10⁹, 7×10⁹, 8×10⁹, 9×10⁹, 1×10¹⁰, 2×10¹⁰, 3×10¹⁰, 4×10¹⁰, 5×10¹⁰, 6×10¹⁰, 7×10¹⁰, 8×10¹⁰, 9×10¹⁰, 1×10¹¹, 2×10¹¹, 3×10¹¹, 4×10¹¹, 5×10¹¹, 6×10¹¹, 7×10¹¹, 8×10¹¹, 9×10¹¹, 1×10¹², 2×10¹², 3×10¹², 4×10¹², 5×10¹², 6×10¹², 7×10¹², 8×10¹², 9×10¹², 1×10¹³, 2×10¹³, 3×10¹³, 4×10¹³, 5×10¹³, 6×10¹³, 7×10¹³, 8×10¹³, 9×10¹³, 1×10¹⁴, 2×10¹⁴, 3×10¹⁴, 4×10¹⁴, 5×10¹⁴, 6×10¹⁴, 7×10¹⁴, 8×10¹⁴, 9×10¹⁴, 1×10¹⁵, 2×10, 3×10¹⁵, 4×10¹⁵, 5×10¹⁵, 6×10¹⁵, 7×10¹⁵, 8×10¹⁵, 9×10¹⁵, or 1×10¹⁶ VG/mL. In some embodiments, the delivery comprises a composition concentration of 1×10¹³ VG/mL. In some embodiments, the delivery comprises a composition concentration of 2.1×10¹² VG/mL.

### Combinations

[1084] The AAV particles may be used in combination with one or more other therapeutic, prophylactic, research or diagnostic agents. By “in combination with,” it is not intended to imply that the agents must be administered at the same time and/or formulated for delivery together, although these methods of delivery are within the scope of the present disclosure. Compositions can be administered concurrently with, prior to, or subsequent to, one or more other desired therapeutics or medical procedures. In general, each agent will be administered at a dose and/or on a time schedule determined for that agent. In some embodiments, the present disclosure encompasses the delivery of pharmaceutical, prophylactic, research, or diagnostic compositions in combination with agents that may improve their bioavailability, reduce and/or modify their metabolism, inhibit their excretion, and/or modify their distribution within the body.

### Measurement of Expression

[1085] Expression of payloads from viral genomes may be determined using various methods known in the art such as, but not limited to immunochemistry (e.g., IHC), in situ hybridization (ISH), enzyme-linked immunosorbent assay (ELISA), affinity ELISA, ELISPOT, flow cytometry, immunocytology, immunohistochemistry, surface plasmon resonance analysis, kinetic exclusion assay, liquid chromatography-mass spectrometry (LCMS), high-performance liquid chromatography (HPLC), BCA assay, immunoelectrophoresis, Western blot, SDS-PAGE, protein immunoprecipitation, and/or PCR.

[1086] In some embodiments, the ELISA assays used are those described in Liu et al 2016, the contents of which are herein incorporated by reference in their entirety (Liu, W et al., 2016 J Neurosci 36(49):12425-12435).

### IV. Methods and Uses of the Compositions

[1087] The present disclosure provides a method for treating a disease, disorder and/or condition in a mammalian subject, including a human subject, comprising administering to the subject any of the AAV particles described herein or administering to the subject any of the described compositions, including pharmaceutical compositions, described herein.

[1088] In some embodiments, the AAV particles of the present disclosure are administered to a subject prophylactically.

[1089] In some embodiments, the AAV particles of the present disclosure are administered to a subject having at least one of the diseases described herein.

[1090] In some embodiments, the AAV particles of the present disclosure are administered to a subject to treat a disease or disorder described herein. The subject may have the disease or disorder or may be at-risk to developing the disease or disorder.

[1091] In some embodiments, the AAV particles of the present disclosure are part of an active immunization strategy to protect against diseases and disorders. In an active immunization strategy, a vaccine or AAV particles are administered to a subject to prevent an infectious disease by activating the subject's production of antibodies that can fight off invading bacteria or viruses.

[1092] In some embodiments, the AAV particles of the present disclosure are part of a passive immunization strategy. In a passive immunization strategy, antibodies against a particular infectious agent are given directly to the subject.

[1093] In some embodiments, the AAV particles of the present disclosure may be used for passive immunotherapy of tauopathy, (e.g. Alzheimer Disease or Frontotemporal Dementia), as described in Liu et al, the contents of which are herein incorporated by reference in their entirety (Liu, W et al., 2016 J Neurosci 36(49):12425-12435). As a non-limiting example, the AAV particles of the present disclosure may encode a PHF1 antibody. Heavy and light chains of the PHF1 antibody may be linked by a Tav2A and/or Furin 2A linker sequence. Antibody expression may be under the control of a CAG promoter. The AAV particle may comprise, as a non-limiting example, an AAVrh.10 serotype capsid. Further, these PHF1 encoding AAV particles may be administered by bilateral intraparenchymal delivery directly to the hippocampus. Such treatment with AAV-PHF1 may result in a 50-fold increase in antibody levels in the hippocampus as compared to antibody levels subsequent to systemic administration. Neuropathological tau species in the hippocampus may be reduced as much as 80-90% and hippocampal atrophy may be fully rescued after treatment with AAV particles of the present disclosure.

[1094] In some embodiments, the AAV particles of the present disclosure may be used to treat tauopathy as described in Ising et al, the contents of which are herein incorporated by reference in their entirety (Ising, C et al., 2017 J Exp Med April 17, Epub ahead of print). As a non-limiting example, the AAV particles of the present disclosure may encode an HJ8.5, HJ8.7, or Tau5 antibody or a single chain variable fragment (scFv) derived therefrom. Heavy and light chains of the HJ8.5 antibody or scFv may be linked by variable length linker sequences and may be flexible glycine and/or serine linkers. The AAV particle may comprise, as a non-limiting example, an AAV2/8 serotype. Further, these HJ8.5, HJ8.7 or Tau5 encoding AAV particles may be administered by bilateral intracerebroventricular delivery. Such treatment with HJ8.5, HJ8.7 or Tau5 encoding AAV particles may result in a significant reduction in neuropathological tau species in the hippocampus.

[1095] Passive immunization by intravenous (or intraperitoneal in mice) delivery of antibody has been shown to result in substantial serum levels of antibody (Chai et al., 2011, J Biol Chem., 286, 34457-34467, the contents of which are herein incorporated by reference in their entirety) and reduced tau pathology in mouse models of tauopathy (e.g., P301L or P301S mice). However, these reductions in tau pathology are considered modest (e.g., about 34%) and require high and repeated dosing to achieve. Passive immunization strategies are thought to be limited in their ability to deliver large quantity of antibody to the brain, which may limit efficacy, and are also challenged in addressing intracellular aggregates. In some embodiments, delivery of an AAV particle comprising a viral genome encoding an anti-tau antibody can be used to overcome the limitations seen with passive immunization strategies.

[1096] In some embodiments, the administration of AAV particles of the present disclosure may result in substantially higher antibody levels in the target tissue (e.g., CNS) of the subject than if anti-tau antibodies were administered by passive immunization. In some embodiments, AAV mediated delivery can result in 1.5-16 fold higher antibody levels in the brain than if delivered by passive immunization. Whilst not wishing to be bound by theory, passive immunization is thought to generate 20-40 ng of antibody per mg of protein in the brain of the subject. In some embodiments, AAV-mediated delivery results in antibody levels 2-5× above the levels seen with passive immunization. In some embodiments, AAV-mediated delivery results in antibody levels 1.5-3× above the levels seen with passive immunization. In some embodiments, AAV-mediated delivery results in antibody levels 5-10× above the levels seen with passive immunization. In some embodiments, AAV-mediated delivery results in antibody levels 8-16× above the levels seen with passive immunization.

### Diagnostic Applications

[1097] The AAV particles of the present disclosure may be used for diagnostic purposes or as diagnostic tools for any disease or disorder. As non-limiting examples, the AAV particles of the present disclosure or the antibodies encoded within the viral genome therein may be used as a biomarker for disease diagnosis. As a second non-limiting example, the AAV particles of the present disclosure or the antibodies encoded within the viral genome therein may be used for diagnostic imaging purposes, e.g., MRI, PET, CT or ultrasound.

### Preventative Applications

[1098] The AAV particles of the present disclosure or the antibodies encoded by the viral genome therein may be used to prevent disease or stabilize the progression of disease. In some embodiments, the AAV particles of the present disclosure are used to as a prophylactic to prevent a disease or disorder in the future. In some embodiments, the AAV particles of the present disclosure are used to halt further progression of a disease or disorder. As a non-limiting example, the AAV particles may be used in a manner similar to that of a vaccine.

### Research Applications

[1099] The AAV particles of the present disclosure or the antibodies encoded by the viral genome therein may also be used as research tools. The AAV particles may be used as in any research experiment, e.g., in vivo or in vitro experiments. In a non-limiting example, the AAV particles may be used in cultured cells. The cultured cells may be derived from any origin known to one with skill in the art, and may be as non-limiting examples, derived from a stable cell line, an animal model or a human patient or control subject. In a non-limiting example, the AAV particles may be used in in vivo experiments in animal models (i.e., mouse, rat, rabbit, dog, cat, non-human primate, guinea pig, ferret, c-elegans, drosophila, zebrafish, or any other animal used for research purposes, known in the art). In another non-limiting example, the AAV particles may be used in human research experiments or human clinical trials.

### Combination Applications

[1100] The AAV particles may be used as a combination therapy with any other therapeutic molecule known in the art. The therapeutic molecule may be approved by the US Food and Drug Administration or may be in clinical trial or at the preclinical research stage. The therapeutic molecule may utilize any therapeutic modality known in the art, with non-limiting examples including gene silencing or interference (i.e., miRNA, siRNA, RNAi, shRNA), gene editing (i.e., TALEN, CRISPR/Cas9 systems, zinc finger nucleases), and gene, protein or enzyme replacement.

### Therapeutic Applications

[1101] The present disclosure additionally provides a method for treating neurological diseases and/or disorders in a mammalian subject, including a human subject, comprising administering to the subject any of the AAV particles. In some cases, neurological diseases and/or disorders treated according to methods described herein include indications involving irregular expression or aggregation of tau. Such indications may include, but are not limited to Alzheimer's disease (AD), frontotemporal dementia and parkinsonism linked to chromosome 17 (FTDP-17), Frontotemporal lobar degeneration (FTLD), Frontotemporal dementia (FTD), chronic traumatic encephalopathy (CTE), Progressive Supranuclear Palsy (PSP), Down's syndrome, Pick's disease, Corticobasal degeneration (CBD), Corticobasal syndrome, Amyotrophic lateral sclerosis (ALS), Prion diseases, Creutzfeldt-Jakob disease (CJD), Multiple system atrophy, Tangle-only dementia, and Progressive subcortical gliosis.

[1102] In some embodiments, methods of treating neurological diseases and/or disorders in a subject in need thereof may comprise the steps of: (1) deriving, generating and/or selecting an anti-tau antibody, antibody-based composition or fragment thereof: (2) producing an AAV particle with a viral genome that includes a payload region encoding the selected antibody of (1); and (3) administering the AAV particle (or pharmaceutical composition thereof) to the subject.

[1103] The present disclosure provides a method for administering to a subject in need thereof, including a human subject, a therapeutically effective amount of the AAV particles to slow, stop or reverse disease progression. As a non-limiting example, disease progression may be measured by cognitive tests such as, but not limited to, the Mini-Mental State Exam (MMSE) or other similar diagnostic tool(s), known to those skilled in the art. As another non-limiting example, disease progression may be measured by change in the pathological features of the brain. CSF or other tissues of the subject, such as, but not limited to a decrease in levels of tau (either soluble or insoluble). In some embodiments levels of insoluble hyperphosphorylated tau are decreased. In some embodiments levels of soluble tau are decreased. In some embodiments both soluble and insoluble tau are decreased. In some embodiments, levels of insoluble hyperphosphorylated tau are increased. In some embodiments levels of soluble tau are increased. In some embodiments both insoluble and soluble tau levels are increased. In some embodiments, neurofibrillary tangles are decreased in size, number, density, or combination thereof. In another embodiment, neurofibrillary tangles are increased in size, number, density or combination thereof.

### Alzheimer's Disease

[1104] Alzheimer Disease (AD) is a debilitating neurodegenerative disease currently afflicting more than 35 million people worldwide, with that number expected to double in coming decades. Symptomatic treatments have been available for many years but these treatments do not address the underlying pathophysiology. Recent clinical trials using these and other treatments have largely failed and, to date, no known cure has been identified.

[1105] The AD brain is characterized by the presence of two forms of pathological aggregates, the extracellular plaques composed of β-amyloid (Aβ) and the intracellular neurofibrillary tangles (NFT) comprised of hyperphosphorylated microtubule associated protein tau. Based on early genetic findings, β-amyloid alterations were thought to initiate disease, with changes in tau considered downstream. Thus, most clinical trials have been Aβ-centric. Although no mutations of the tau gene have been linked to AD, such alterations have been shown to result in a family of dementias known as tauopathies, demonstrating that changes in tau can contribute to neurodegenerative processes. Tau is normally a very soluble protein known to associate with microtubules based on the extent of its phosphorylation. Hyperphosphorylation of tau depresses its binding to microtubules and microtubule assembly activity. In tauopathies, the tau becomes hyperphosphorylated, misfolds and aggregates as NFT of paired helical filaments (PHF), twisted ribbons or straight filaments. In AD, NFT pathology, rather than plaque pathology, correlates more closely with neuropathological markers such as neuronal loss, synaptic deficits, severity of disease and cognitive decline. NFT pathology marches through the brain in a stereotyped manner and animal studies suggest a trans-cellular propagation mechanism along neuronal connections.

[1106] Several approaches have been proposed for therapeutically interfering with progression of tau pathology and preventing the subsequent molecular and cellular consequences. Given that NFT are composed of a hyperphosphorylated, misfolded and aggregated form of tau, interference at each of these stages has yielded the most avidly pursued set of targets. Introducing agents that limit phosphorylation, block misfolding or prevent aggregation have all generated promising results. Passive and active immunization with late stage anti-phospho-tau antibodies in mouse models have led to dramatic decreases in tau aggregation and improvements in cognitive parameters. It has also been suggested that introduction of anti-tau antibodies can prevent the trans-neuronal spread of tau pathology.

[1107] The vectored antibody delivery (VAD) of tau disease associated antibodies of the present disclosure may be used to treat subjects suffering from AD and other tauopathies. In some cases, methods of the present disclosure may be used to treat subjects suspected of developing AD or other tauopathies.

### Frontotemporal Dementia and Parkinsonism Linked to Chromosome 17 (FTDP-17)

[1108] Although Alzheimer's disease is, in part, characterized by the presence of tau pathology, no known mutations in the tau gene have been causally linked to the disease. Mutations in the tau gene have been shown to lead to an autosomal dominantly inherited tauopathy known as frontotemporal dementia and parkinsonism linked to chromosome 17 (FTDP-17) and demonstrate that alterations in tau can lead to neurodegenerative changes in the brain. Mutations in the tau gene that lead to FTDP-17 are thought to influence splicing patterns, thereby leading to an elevated proportion of tau with four microtubule binding domains (rather than three). These molecules are considered to be more amyloidogenic, meaning they are more likely to become hyperphosphorylated and more likely to aggregate into NFT (Hutton, M. et al., 1998, Nature 393(6686):702-5). Although physically and behaviorally, FTDP-17 patients can appear quite similar to Alzheimer's disease patients, at autopsy FTDP-17 brains lack the prominent Aβ plaque pathology of an AD brain (Gotz, J. et al., 2012, British Journal of Pharmacology 165(5):1246-59). Therapeutically targeting the aggregates of tau protein may ameliorate and prevent degenerative changes in the brain and potentially lead to improved cognitive ability.

[1109] As of today, there is no treatment to prevent, slow the progression, or cure FTDP-17. Medication may be prescribed to reduce aggressive, agitated or dangerous behavior. There remains a need for therapy affecting the underlying pathophysiology, such as antibody therapies targeting tau protein.

[1110] In some embodiments, the vectored antibody delivery of the present disclosure may be used to treat subjects suffering from FTDP-17. In some cases, methods of the present disclosure may be used to treat subjects suspected of developing FTDP-17.

### Chronic Traumatic Encephalopathy

[1111] Unlike the genetically linked tauopathies, chronic traumatic encephalopathy is a degenerative tauopathy linked to repeated head injuries. The disease was first described in boxers who behaved “punch drunk” and has since been identified primarily in athletes that play American football, ice hockey, wrestling and other contact sports. The brains of those suffering from CTE are characterized by distinctive patterns of brain atrophy accompanied by accumulation of hyperphosphorylated species of aggregated tau in NFT. In CTE, pathological changes in tau are accompanied by a number of other pathobiological processes, such as inflammation (Daneshvar, D. H. et al., 2015 Mol Cell Neurosci 66(Pt B): 81-90). Targeting the tau aggregates may provide reprieve from the progression of the disease and may allow cognitive improvement.

[1112] As of today, there is no medical therapy to treat or cure CTE. The condition is only diagnosed after death, due to lack of in vivo techniques to identify CTE specific biomarkers. There remains a need for therapy affecting the underlying pathophysiology, such as antibody therapies targeting tau protein.

[1113] In some embodiments, the vectored antibody delivery methods of the present disclosure may be used to treat subjects suffering from CTE. In some cases, methods of the present disclosure may be used to treat subjects suspected of developing CTE.

### Prion Diseases

[1114] Prion diseases, also known as transmissible spongiform encephalopathies (TSEs), are a group of rare progressive conditions affecting the nervous system. The related conditions are rare and are typically caused by mutations in the PRNP gene which enables production of the prion protein. Gene mutations lead to an abnormally structured prion protein. Alternatively, the abnormal prion may be acquired by exposure from an outside source, e.g. by consumption of beef products containing the abnormal prion protein. Abnormal prions are misfolded, causing the brain tissue to degenerate rapidly. Prion diseases include, but are not limited to, Creutzfeldt-Jakob disease (CJD), Gerstmann-Sträussler-Scheinker syndrome (GSS), fatal insomnia (FFI), variably protease-sensitive prionopathy (VPSPr), and kuru. Prion diseases are rare. Approximately 350 cases of prion diseases are diagnosed in the US annually.

[1115] CJD is a degenerative brain disorder characterized by problems with muscular coordination, personality changes including mental impairment, impaired vision, involuntary muscle jerks, weakness and eventually coma. The most common categories of CJD are sporadic, hereditary due to a genetic mutation, and acquired. Sporadic CJD is the most common form affecting people with no known risk factors for the disease. The acquired form of CJD is transmitted by exposure of the brain and nervous system tissue to the prion. As an example, variant CJD (vCDJ) is linked to a bovine spongiform encephalopathy (BSE), also known as a ‘mad cow’ disease. CJD is fatal and patients typically die within one year of diagnosis.

[1116] Prion diseases are associated with an infectious agent consisting of an alternative conformational isoform of the prion protein, PrPSc. PrPSc replication is considered to occur through an induction of the infectious prion in the normal prion protein (PrPC). The replication occurs without a nucleic acid.

[1117] As of today, there is no therapy to manage or cure CJD, or other prion diseases. Typically, treatment is aimed at alleviating symptoms and increasing comfortability of the patient, e.g. with pain relievers. There remains a need for therapy affecting the underlying pathophysiology, such as antibody therapies targeting the prion protein.

[1118] In some embodiments, vectored antibody delivery methods of the present disclosure may be used to treat subjects suffering from a prion disease. In some cases, methods of the present disclosure may be used to treat subjects suspected of developing a prion disease.

### Neurodegeneration and Stroke

[1119] Neurodegenerative diseases and other diseases of the nervous system share many common features. Neurodegenerative diseases, in particular, are a group of conditions characterized by progressive loss of neuronal structure and function, ultimately leading to neuronal cell death. Neurons are the building blocks of the nervous system(s) and are generally not able to reproduce and/or be replaced, and therefore neuron damage and/or death is especially devastating. Other, non-degenerating diseases that lead to neuronal cell loss, such as stroke, have similarly debilitating outcomes. Targeting molecules that contribute to the deteriorating cell structure or function may prove beneficial generally for treatment of nervous system diseases, neurodegenerative disease and/or stroke.

[1120] Certain molecules are believed to have inhibitory effects on neurite outgrowth, contributing to the limited ability of the central nervous system to repair. Such molecules include, but are not limited to, myelin associated proteins, such as, but not limited to, RGM (Repulsive guidance molecule), NOGO (Neurite outgrowth inhibitor), NOGO receptor, MAG (myelin associated glycoprotein), and MAI (myelin associated inhibitor). In some embodiments, the vectored antibody delivery of the present disclosure is utilized to target the aforementioned antigens (e.g., neurite outgrowth inhibitors).

[1121] Many neurodegenerative diseases are associated with aggregation of misfolded proteins, including, but not limited to, alpha synuclein, tau, amyloid β, prion proteins, TDP-43, and huntingtin (see, e.g. De Genst et al., 2014, Biochim Biophys Acta; 1844(11):1907-1919, and Yu et al., 2013, Neurotherapeutics.; 10(3): 459-472, references therein). The aggregation results from disease-specific conversion of soluble proteins to an insoluble, highly ordered fibrillary deposit. This conversion is thought to prevent the proper disposal or degradation of the misfolded protein, thereby leading to further aggregation. Conditions associated with alpha synuclein and tau may be referred to as “synucleinopathies” and “tauopathies”, respectively. In some embodiments, the vectored antibody delivery of the present disclosure is utilized to target the aforementioned antigens (e.g., misfolded or aggregated proteins).

[1122] AAV Particles and methods of using the AAV particles described in the present disclosure may be used to prevent, manage and/or treat tauopathies or tau associated disease. As a non-limiting example, the AAV particles of the present disclosure comprise a nucleic acid sequence encoding at least one of the sequences described in Table 3.

### V. Kits and Devices

### Kits

[1123] In some embodiments, the disclosure provides a variety of kits for conveniently and/or effectively carrying out methods of the present disclosure. Typically, kits will comprise sufficient amounts and/or numbers of components to allow a user to perform multiple treatments of a subject(s) and/or to perform multiple experiments.

[1124] Any of the AAV particles of the present disclosure may be comprised in a kit. In some embodiments, kits may further include reagents and/or instructions for creating and/or synthesizing compounds and/or compositions of the present disclosure. In some embodiments, kits may also include one or more buffers. In some embodiments, kits may include components for making protein or nucleic acid arrays or libraries and thus, may include, for example, solid supports.

[1125] In some embodiments, kit components may be packaged either in aqueous media or in lyophilized form. The container means of the kits will generally include at least one vial, test tube, flask, bottle, syringe or other container means, into which a component may be placed, and preferably, suitably aliquoted. Where there is more than one kit component, (labeling reagent and label may be packaged together), kits may also generally contain second, third or other additional containers into which additional components may be separately placed. In some embodiments, kits may also comprise second container means for containing sterile, pharmaceutically acceptable buffers and/or other diluents. In some embodiments, various combinations of components may be comprised in one or more vial. Kits of the present disclosure may also typically include means for containing compounds and/or compositions of the present disclosure, e.g., proteins, nucleic acids, and any other reagent containers in close confinement for commercial sale. Such containers may include injection or blow-molded plastic containers into which desired vials are retained.

[1126] In some embodiments, kit components are provided in one and/or more liquid solutions. In some embodiments, liquid solutions are aqueous solutions, with sterile aqueous solutions being particularly preferred. In some embodiments, kit components may be provided as dried powder(s). When reagents and/or components are provided as dry powders, such powders may be reconstituted by the addition of suitable volumes of solvent. In some embodiments, it is envisioned that solvents may also be provided in another container means. In some embodiments, labeling dyes are provided as dried powders. In some embodiments, it is contemplated that 10, 20, 30, 40, 50, 60, 70, 80, 90, 100, 120, 120, 130, 140, 150, 160, 170, 180, 190, 200, 300, 400, 500, 600, 700, 800, 900, 1000 micrograms or at least or at most those amounts of dried dye are provided in kits. In such embodiments, dye may then be resuspended in any suitable solvent, such as DMSO.

[1127] In some embodiments, kits may include instructions for employing kit components as well the use of any other reagent not included in the kit. Instructions may include variations that may be implemented.

### Devices

[1128] In some embodiments, the AAV particles may delivered to a subject using a device to deliver the AAV particles and a head fixation assembly. The head fixation assembly may be, but is not limited to, any of the head fixation assemblies sold by MRI interventions. As a non-limiting example, the head fixation assembly may be any of the assemblies described in U.S. Pat. Nos. 8,099,150, 8,548,569, and 9,031,636 and International Patent Publication Nos. WO201108495 and WO2014014585, the contents of each of which are incorporated by reference in their entireties. A head fixation assembly may be used in combination with an MRI compatible drill such as, but not limited to, the MRI compatible drills described in International Patent Publication No. WO2013181008 and US Patent Publication No. US20130325012, the contents of which are herein incorporated by reference in its entirety.

[1129] In some embodiments, the AAV particles may be delivered using a method, system and/or computer program for positioning apparatus to a target point on a subject to deliver the AAV particles. As a non-limiting example, the method, system and/or computer program may be the methods, systems and/or computer programs described in U.S. Pat. No. 8,340,743, the contents of which are herein incorporated by reference in its entirety. The method may include: determining a target point in the body and a reference point, wherein the target point and the reference point define a planned trajectory line (PTL) extending through each; determining a visualization plane, wherein the PTL intersects the visualization plane at a sighting point: mounting the guide device relative to the body to move with respect to the PTL, wherein the guide device does not intersect the visualization plane: determining a point of intersection (GPP) between the guide axis and the visualization plane; and aligning the GPP with the sighting point in the visualization plane.

[1130] In some embodiments, the AAV particles may be delivered to a subject using a convention-enhanced delivery device. Non-limiting examples of targeted delivery of drugs using convection are described in US Patent Publication Nos. US20100217228, US20130035574, and US 20130035660 and International Patent Publication No. WO2013019830 and WO2008144585, the contents of each of which are herein incorporated by reference in their entireties.

[1131] In some embodiments, a subject may be imaged prior to, during and/or after delivery of the AAV particles. The imaging method may be a method known in the art and/or described herein, such as but not limited to, magnetic resonance imaging (MRI). As a non-limiting example, imaging may be used to assess therapeutic effect. As another non-limiting example, imaging may be used for assisted delivery of AAV particles.

[1132] In some embodiments, the AAV particles may be delivered using an MRI-guided device. Non-limiting examples of MRI-guided devices are described in U.S. Pat. Nos. 9,055,884, 9,042,958, 8,886,288, 8,768,433, 8,396,532, 8,369,930, 8,374,677, and 8,175,677 and US Patent Application No. US20140024927 the contents of each of which are herein incorporated by reference in their entireties. As a non-limiting example, the MRI-guided device may be able to provide data in real time such as those described in U.S. Pat. Nos. 8,886,288 and 8,768,433, the contents of each of which is herein incorporated by reference in its entirety. As another non-limiting example, the MRI-guided device or system may be used with a targeting cannula such as the systems described in U.S. Pat. Nos. 8,175,677 and 8,374,677, the contents of each of which are herein incorporated by reference in their entireties. As yet another non-limiting example, the MRI-guided device includes a trajectory guide frame for guiding an interventional device as described, for example, in U.S. Pat. No. 9,055,884 and US Patent Application No. US20140024927, the contents of each of which are herein incorporated by reference in their entireties.

[1133] In some embodiments, the AAV particles may be delivered using an MRI-compatible tip assembly. Non-limiting examples of MRI-compatible tip assemblies are described in US Patent Publication No. US20140275980, the contents of which is herein incorporated by reference in its entirety.

[1134] In some embodiments, the AAV particles may be delivered using a cannula which is MRI-compatible. Non-limiting examples of MRI-compatible cannulas include those taught in International Patent Publication No. WO2011130107, the contents of which are herein incorporated by reference in its entirety.

[1135] In some embodiments, the AAV particles may be delivered using a catheter which is MRI-compatible. Non-limiting examples of MRI-compatible catheters include those taught in International Patent Publication No. WO2012116265, U.S. Pat. No. 8,825,133 and US Patent Publication No. US20140024909, the contents of each of which are herein incorporated by reference in their entireties.

[1136] In some embodiments, the AAV particles may be delivered using a device with an elongated tubular body and a diaphragm as described in US Patent Publication Nos. US20140276582 and US20140276614, the contents of each of which are herein incorporated by reference in their entireties.

[1137] In some embodiments, the AAV particles may be delivered using an MRI compatible localization and/or guidance system such as, but not limited to, those described in US Patent Publication Nos. US20150223905 and US20150230871, the contents of each of which are herein incorporated by reference in their entireties. As a non-limiting example, the MRI compatible localization and/or guidance systems may comprise a mount adapted for fixation to a patient, a targeting cannula with a lumen configured to attach to the mount so as to be able to controllably translate in at least three dimensions, and an elongate probe configured to snugly advance via slide and retract in the targeting cannula lumen, the elongate probe comprising at least one of a stimulation or recording electrode.

[1138] In some embodiments, the AAV particles may be delivered to a subject using a trajectory frame as described in US Patent Publication Nos. US20150031982 and US20140066750 and International Patent Publication Nos. WO2015057807 and WO2014039481, the contents of each of which are herein incorporated by reference in their entireties.

[1139] In some embodiments, the AAV particles may be delivered to a subject using a gene gun.

### VI. Definitions

[1140] At various places in the present specification, substituents of compounds of the present disclosure are disclosed in groups or in ranges. It is specifically intended that the present disclosure include each and every individual sub combination of the members of such groups and ranges.

[1141] About: As used herein, the term “about” means +/−10% of the recited value.

[1142] Adeno-associated virus: The term “adeno-associated virus” or “AAV” as used herein refers to members of the dependovirus genus comprising any particle, sequence, gene, protein, or component derived therefrom.

[1143] AA6V Particle: As used herein, an “AAV particle” is a virus which comprises a viral genome with at least one payload region and at least one ITR region. AAV vectors of the present disclosure may be produced recombinantly and may be based on adeno-associated virus (AAV) parent or reference sequences. AAV particle may be derived from any serotype, described herein or known in the art, including combinations of serotypes (i.e., “pseudotyped” AAV) or from various genomes (e.g., single stranded or self-complementary). In addition, the AAV particle may be replication defective and/or targeted.

[1144] Activity: As used herein, the term “activity” refers to the condition in which things are happening or being done. Compositions may have activity and this activity may involve one or more biological events.

[1145] Administered in combination: As used herein, the term “administered in combination” or “combined administration” means that two or more agents are administered to a subject at the same time or within an interval such that there may be an overlap of an effect of each agent on the patient. In some embodiments, they are administered within about 60, 30, 15, 10, 5, or 1 minute of one another. In some embodiments, the administrations of the agents are spaced sufficiently closely together such that a combinatorial (e.g., a synergistic) effect is achieved.

[1146] Amelioration: As used herein, the term “amelioration” or “ameliorating” refers to a lessening of severity of at least one indicator of a condition or disease. For example, in the context of neurodegeneration disorder, amelioration includes the reduction of neuron loss.

[1147] Animal: As used herein, the term “animal” refers to any member of the animal kingdom. In some embodiments, “animal” refers to humans at any stage of development. In some embodiments, “animal” refers to non-human animals at any stage of development. In certain embodiments, the non-human animal is a mammal (e.g., a rodent, a mouse, a rat, a rabbit, a monkey, a dog, a cat, a sheep, cattle, a primate, or a pig). In some embodiments, animals include, but are not limited to, mammals, birds, reptiles, amphibians, fish, and worms. In some embodiments, the animal is a transgenic animal, genetically-engineered animal, or a clone.

[1148] Antibody: As used herein, the term “antibody” is referred to in the broadest sense and specifically covers various embodiments including, but not limited to monoclonal antibodies, polyclonal antibodies, multispecific antibodies (e.g. bispecific antibodies formed from at least two intact antibodies), and antibody fragments (e.g., diabodies) so long as they exhibit a desired biological activity (e.g., “functional”). Antibodies are primarily amino-acid based molecules but may also comprise one or more modifications (including, but not limited to the addition of sugar moieties, fluorescent moieties, chemical tags, etc.). Non-limiting examples of antibodies or fragments thereof include V_{H} and VL domains, scFvs, Fab, Fab′, F(ab′)₂, Fv fragment, diabodies, linear antibodies, single chain antibody molecules, multispecific antibodies, bispecific antibodies, intrabodies, monoclonal antibodies, polyclonal antibodies, humanized antibodies, codon-optimized antibodies, tandem scFv antibodies, bispecific T-cell engagers, mAb2 antibodies, chimeric antigen receptors (CAR), tetravalent bispecific antibodies, biosynthetic antibodies, native antibodies, miniaturized antibodies, unibodies, maxibodies, antibodies to senescent cells, antibodies to conformers, antibodies to disease specific epitopes, or antibodies to innate defense molecules.

[1149] Antibody-based composition: As used herein, “antibody-based” or “antibody-derived” compositions are monomeric or multi-meric polypeptides which comprise at least one amino-acid region derived from a known or parental antibody sequence and at least one amino acid region derived from a non-antibody sequence, e.g., mammalian protein.

[1150] Approximately: As used herein, the term “approximately” or “about,” as applied to one or more values of interest, refers to a value that is similar to a stated reference value. In certain embodiments, the term “approximately” or “about” refers to a range of values that fall within 25%, 20%, 19%, 18%, 17%, 16%, 15%, 14%, 13%, 12%, 11%, 10%, 9%, 8%, 7%, 6%, 5%, 4%, 3%, 2%, 1%, or less in either direction (greater than or less than) of the stated reference value unless otherwise stated or otherwise evident from the context (except where such number would exceed 100% of a possible value).

[1151] Associated with: As used herein, the terms “associated with,” “conjugated,” “linked,” “attached,” and “tethered,” when used with respect to two or more moieties, means that the moieties are physically associated or connected with one another, either directly or via one or more additional moieties that serves as a linking agent, to form a structure that is sufficiently stable so that the moieties remain physically associated under the conditions in which the structure is used, e.g., physiological conditions. An “association” need not be strictly through direct covalent chemical bonding. It may also suggest ionic or hydrogen bonding or a hybridization based connectivity sufficiently stable such that the “associated” entities remain physically associated.

[1152] Bifunctional: As used herein, the term “bifunctional” refers to any substance, molecule or moiety which is capable of or maintains at least two functions. The functions may affect the same outcome or a different outcome. The structure that produces the function may be the same or different.

[1153] Biocompatible: As used herein, the term “biocompatible” means compatible with living cells, tissues, organs or systems posing little to no risk of injury, toxicity or rejection by the immune system.

[1154] Biodegradable: As used herein, the term “biodegradable” means capable of being broken down into innocuous products by the action of living things.

[1155] Biologically active: As used herein, the phrase “biologically active” refers to a characteristic of any substance that has activity in a biological system and/or organism. For instance, a substance that, when administered to an organism, has a biological effect on that organism, is considered to be biologically active. In particular embodiments, an AAV particle of the present disclosure may be considered biologically active if even a portion of the encoded payload is biologically active or mimics an activity considered biologically relevant.

[1156] Capsid: As used herein, the term “capsid” refers to the protein shell of a virus particle. In some embodiments, the term capsid may refer to the nucleic acid encoding the protein shell of the virus particle.

[1157] Chimeric antigen receptor (CAR): As used herein, the term “chimeric antigen receptor” or “CAR” refers to an artificial chimeric protein comprising at least one antigen specific targeting region (ASTR), a transmembrane domain and an intracellular signaling domain, wherein the antigen specific targeting region comprises a full-length antibody or a fragment thereof. As a non-limiting example, the ASTR of a CAR may be any of the antibodies listed in Table 3, antibody-based compositions or fragments thereof. Any molecule that is capable of binding a target antigen with high affinity can be used in the ASTR of a CAR. The CAR may optionally have an extracellular spacer domain and/or a co-stimulatory domain. A CAR may also be used to generate a cytotoxic cell carrying the CAR.

[1158] Complementary and substantially complementary: As used herein, the term “complementary” refers to the ability of polynucleotides to form base pairs with one another. Base pairs are typically formed by hydrogen bonds between nucleotide units in antiparallel polynucleotide strands. Complementary polynucleotide strands can form base pair in the Watson-Crick manner (e.g., A to T. A to U, C to G), or in any other manner that allows for the formation of duplexes. As persons skilled in the art are aware, when using RNA as opposed to DNA, uracil rather than thymine is the base that is considered to be complementary to adenosine. However, when a U is denoted in the context of the present disclosure, the ability to substitute a T is implied, unless otherwise stated. Perfect complementarity or 100% complementarity refers to the situation in which each nucleotide unit of one polynucleotide strand can form hydrogen bond with a nucleotide unit of a second polynucleotide strand. Less than perfect complementarity refers to the situation in which some, but not all, nucleotide units of two strands can form hydrogen bond with each other. For example, for two 20-mers, if only two base pairs on each strand can form hydrogen bond with each other, the polynucleotide strands exhibit 10% complementarity. In the same example, if 18 base pairs on each strand can form hydrogen bonds with each other, the polynucleotide strands exhibit 90% complementarity. As used herein, the term “substantially complementary” means that the siRNA has a sequence (e.g., in the antisense strand) which is sufficient to bind the desired target mRNA, and to trigger the RNA silencing of the target mRNA.

[1159] Compound: Compounds of the present disclosure include all of the isotopes of the atoms occurring in the intermediate or final compounds. “Isotopes” refers to atoms having the same atomic number but different mass numbers resulting from a different number of neutrons in the nuclei. For example, isotopes of hydrogen include tritium and deuterium.

[1160] The compounds and salts of the present disclosure can be prepared in combination with solvent or water molecules to form solvates and hydrates by routine methods.

[1161] Comprehensive Positional Evolution (CPE™): As used herein, the term “comprehensive positional evolution” refers to an antibody evolution technology that allows for mapping of the effects of amino acid changes at every position along an antibody variable domain's sequence. This comprehensive mutagenesis technology can be used to enhance one or more antibody properties or characteristics.

[1162] Comprehensive Protein Synthesis (CPS™): As used herein, the term “comprehensive protein synthesis” refers to a combinatorial protein synthesis technology that can be used to optimize antibody properties or characteristics by combining the best properties into a new, high-performance antibody.

[1163] Conditionally active: As used herein, the term “conditionally active” refers to a mutant or variant of a wild-type polypeptide, wherein the mutant or variant is more or less active at physiological conditions than the parent polypeptide. Further, the conditionally active polypeptide may have increased or decreased activity at aberrant conditions as compared to the parent polypeptide. A conditionally active polypeptide may be reversibly or irreversibly inactivated at normal physiological conditions or aberrant conditions.

[1164] Conserved: As used herein, the term “conserved” refers to nucleotides or amino acid residues of a polynucleotide sequence or polypeptide sequence, respectively, that are those that occur unaltered in the same position of two or more sequences being compared. Nucleotides or amino acids that are relatively conserved are those that are conserved amongst more related sequences than nucleotides or amino acids appearing elsewhere in the sequences.

[1165] In some embodiments, two or more sequences are said to be “completely conserved” if they are 100% identical to one another. In some embodiments, two or more sequences are said to be “highly conserved” if they are at least 70% identical, at least 80% identical, at least 90% identical, or at least 95% identical to one another. In some embodiments, two or more sequences are said to be “highly conserved” if they are about 70% identical, about 80% identical, about 90% identical, about 95%, about 98%, or about 99% identical to one another. In some embodiments, two or more sequences are said to be “conserved” if they are at least 30% identical, at least 40% identical, at least 50% identical, at least 60% identical, at least 70% identical, at least 80% identical, at least 90% identical, or at least 95% identical to one another. In some embodiments, two or more sequences are said to be “conserved” if they are about 30% identical, about 40% identical, about 50% identical, about 60% identical, about 70% identical, about 80% identical, about 90% identical, about 95% identical, about 98% identical, or about 99% identical to one another. Conservation of sequence may apply to the entire length of a polynucleotide or polypeptide or may apply to a portion, region or feature thereof.

[1166] Control Elements: As used herein, “control elements”, “regulatory control elements”, or “regulatory sequences” refers to promoter regions, polyadenylation signals, transcription termination sequences, upstream regulatory domains, origins of replication, internal ribosome entry sites (“IRES”), enhancers, and the like, which provide for the replication, transcription and translation of a coding sequence in a recipient cell. Not all of these control elements need always be present as long as the selected coding sequence is capable of being replicated, transcribed and/or translated in an appropriate host cell.

[1167] Controlled Release: As used herein, the term “controlled release” refers to a pharmaceutical composition or compound release profile that conforms to a particular pattern of release to affect a therapeutic outcome.

[1168] Cytostatic: As used herein, “cytostatic” refers to inhibiting, reducing, suppressing the growth, division, or multiplication of a cell (e.g., a mammalian cell (e.g., a human cell)), bacterium, virus, fungus, protozoan, parasite, prion, or a combination thereof.

[1169] Cytotoxic: As used herein, “cytotoxic” refers to killing or causing injurious, toxic, or deadly effect on a cell (e.g., a mammalian cell (e.g., a human cell)), bacterium, virus, fungus, protozoan, parasite, prion, or a combination thereof.

[1170] Delivery: As used herein, “delivery” refers to the act or manner of delivering an AAV particle, a compound, substance, entity, moiety, cargo or payload.

[1171] Delivery Agent: As used herein, “delivery agent” refers to any substance which facilitates, at least in part, the in vivo delivery of an AAV particle to targeted cells.

[1172] Destabilized: As used herein, the term “destable”, “destabilize”, or “destabilizing region” means a region or molecule that is less stable than a starting, wild-type or native form of the same region or molecule.

[1173] Detectable label: As used herein, “detectable label” refers to one or more markers, signals, or moieties which are attached, incorporated or associated with another entity that is readily detected by methods known in the art including radiography, fluorescence, chemiluminescence, enzymatic activity, absorbance and the like. Detectable labels include radioisotopes, fluorophores, chromophores, enzymes, dyes, metal ions, ligands such as biotin, avidin, streptavidin and haptens, quantum dots, and the like. Detectable labels may be located at any position in the peptides or proteins disclosed herein. They may be within the amino acids, the peptides, or proteins, or located at the N- or C-termini.

[1174] Digest: As used herein, the term “digest” means to break apart into smaller pieces or components. When referring to polypeptides or proteins, digestion results in the production of peptides.

[1175] Distal: As used herein, the term “distal” means situated away from the center or away from a point or region of interest.

[1176] Dosing regimen: As used herein, a “dosing regimen” is a schedule of administration or physician determined regimen of treatment, prophylaxis, or palliative care.

[1177] Encapsulate: As used herein, the term “encapsulate” means to enclose, surround or encase.

[1178] Engineered: As used herein, embodiments are “engineered” when they are designed to have a feature or property, whether structural or chemical, that varies from a starting point, wild type or native molecule.

[1179] Effective Amount: As used herein, the term “effective amount” of an agent is that amount sufficient to effect beneficial or desired results, for example, clinical results, and, as such, an “effective amount” depends upon the context in which it is being applied. For example, in the context of administering an agent that treats cancer, an effective amount of an agent is, for example, an amount sufficient to achieve treatment, as defined herein, of cancer, as compared to the response obtained without administration of the agent.

[1180] Epitope: As used herein, an “epitope” refers to a surface or region on a molecule that is capable of interacting with a biomolecule. For example, a protein may contain one or more amino acids, e.g., an epitope, which interacts with an antibody. e.g., a biomolecule. In some embodiments, when referring to a protein or protein module, an epitope may comprise a linear stretch of amino acids or a three-dimensional structure formed by folded amino acid chains.

[1181] EvoMap™: As used herein, an EvoMap™ refers to a map of a polypeptide, wherein detailed informatics are presented about the effects of single amino acid mutations within the length of the polypeptide and their influence on the properties and characteristics of that polypeptide.

[1182] Expression: As used herein, “expression” of a nucleic acid sequence refers to one or more of the following events: (1) production of an RNA template from a DNA sequence (e.g., by transcription); (2) processing of an RNA transcript (e.g., by splicing, editing, 5′ cap formation, and/or 3′ end processing): (3) translation of an RNA into a polypeptide or protein; and (4) post-translational modification of a polypeptide or protein.

[1183] Feature: As used herein, a “feature” refers to a characteristic, a property, or a distinctive element.

[1184] Formulation: As used herein, a “formulation” includes at least one AAV particle and a delivery agent.

[1185] Fragment: A “fragment.” as used herein, refers to a portion. For example, fragments of proteins may comprise polypeptides obtained by digesting full-length protein isolated from cultured cells.

[1186] Functional: As used herein, a “functional” biological molecule is a biological molecule in a form in which it exhibits a property and/or activity by which it is characterized.

[1187] Gene expression: The term “gene expression” refers to the process by which a nucleic acid sequence undergoes successful transcription and in most instances translation to produce a protein or peptide. For clarity, when reference is made to measurement of “gene expression”, this should be understood to mean that measurements may be of the nucleic acid product of transcription, e.g., RNA or mRNA or of the amino acid product of translation, e.g., polypeptides or peptides. Methods of measuring the amount or levels of RNA, mRNA, polypeptides and peptides are well known in the art.

[1188] Homology: As used herein, the term “homology” refers to the overall relatedness between polymeric molecules, e.g. between polynucleotide molecules (e.g. DNA molecules and/or RNA molecules) and/or between polypeptide molecules. In some embodiments, polymeric molecules are considered to be “homologous” to one another if their sequences are at least 25%, 30%, 35%, 40%, 45%, 50%, 55%, 60%, 65%, 70%, 75%, 80%, 85%, 90%, 95%, or 99% identical or similar. The term “homologous” necessarily refers to a comparison between at least two sequences (polynucleotide or polypeptide sequences). In accordance with the disclosure, two polynucleotide sequences are considered to be homologous if the polypeptides they encode are at least about 50%, 60%, 70%, 80%, 90%, 95%, or even 99% for at least one stretch of at least about 20 amino acids. In some embodiments, homologous polynucleotide sequences are characterized by the ability to encode a stretch of at least 4-5 uniquely specified amino acids. For polynucleotide sequences less than 60 nucleotides in length, homology is determined by the ability to encode a stretch of at least 4-5 uniquely specified amino acids. In accordance with the disclosure, two protein sequences are considered to be homologous if the proteins are at least about 50%, 60%, 70%, 80%, or 90% identical for at least one stretch of at least about 20 amino acids.

[1189] Heterologous Region: As used herein the term “heterologous region” refers to a region which would not be considered a homologous region.

[1190] Homologous Region: As used herein the term “homologous region” refers to a region which is similar in position, structure, evolution origin, character, form or function.

[1191] Identity: As used herein, the term “identity” refers to the overall relatedness between polymeric molecules, e.g., between polynucleotide molecules (e.g. DNA molecules and/or RNA molecules) and/or between polypeptide molecules. Calculation of the percent identity of two polynucleotide sequences, for example, can be performed by aligning the two sequences for optimal comparison purposes (e.g., gaps can be introduced in one or both of a first and a second nucleic acid sequences for optimal alignment and non-identical sequences can be disregarded for comparison purposes). In certain embodiments, the length of a sequence aligned for comparison purposes is at least 30%, at least 40%, at least 50%, at least 60%, at least 70%, at least 80%, at least 90%, at least 95%, or 100/0 of the length of the reference sequence. The nucleotides at corresponding nucleotide positions are then compared. When a position in the first sequence is occupied by the same nucleotide as the corresponding position in the second sequence, then the molecules are identical at that position. The percent identity between the two sequences is a function of the number of identical positions shared by the sequences, taking into account the number of gaps, and the length of each gap, which needs to be introduced for optimal alignment of the two sequences. The comparison of sequences and determination of percent identity between two sequences can be accomplished using a mathematical algorithm. For example, the percent identity between two nucleotide sequences can be determined using methods such as those described in Computational Molecular Biology, Lesk, A. M., ed., Oxford University Press, New York, 1988; Biocomputing: Informatics and Genome Projects, Smith. D. W., ed., Academic Press, New York, 1993; Sequence Analysis in Molecular Biology, von Heinje, G., Academic Press, 1987; Computer Analysis of Sequence Data, Part I, Griffin, A. M., and Griffin, H. G., eds., Humana Press, New Jersey, 1994; and Sequence Analysis Primer, Gribskov. M. and Devereux. J., eds., M Stockton Press, New York, 1991; each of which is incorporated herein by reference. For example, the percent identity between two nucleotide sequences can be determined using the algorithm of Meyers and Miller (CABIOS, 1989, 4:11-17), which has been incorporated into the ALIGN program (version 2.0) using a PAM120 weight residue table, a gap length penalty of 12 and a gap penalty of 4. The percent identity between two nucleotide sequences can, alternatively, be determined using the GAP program in the GCG software package using an NWSgapdna.CMP matrix. Methods commonly employed to determine percent identity between sequences include, but are not limited to those disclosed in Carillo, H. and Lipman, D., SIAM J Applied Math., 48:1073 (1988); incorporated herein by reference. Techniques for determining identity are codified in publicly available computer programs. Exemplary computer software to determine homology between two sequences include, but are not limited to, GCG program package, Devereux, J., el al., Nucleic Acids Research, 12(1), 387 (1984)), BLASTP, BLASTN, and FASTA Altschul, S. F. et al., J. Molec. Biol., 215, 403 (1990)).

[1192] Inhibit expression of a gene: As used herein, the phrase “inhibit expression of a gene” means to cause a reduction in the amount of an expression product of the gene. The expression product can be an RNA transcribed from the gene (e.g., an mRNA) or a polypeptide translated from an mRNA transcribed from the gene. Typically, a reduction in the level of an mRNA results in a reduction in the level of a polypeptide translated therefrom. The level of expression may be determined using standard techniques for measuring mRNA or protein.

[1193] In vitro: As used herein, the term “in vitro” refers to events that occur in an artificial environment, e.g., in a test tube or reaction vessel, in cell culture, in a Petri dish, etc., rather than within an organism (e.g., animal, plant, or microbe).

[1194] In vivo: As used herein, the term “in vivo” refers to events that occur within an organism (e.g., animal, plant, or microbe or cell or tissue thereof).

[1195] Isolated: As used herein, the term “isolated” refers to a substance or entity that has been separated from at least some of the components with which it was associated (whether in nature or in an experimental setting). Isolated substances may have varying levels of purity in reference to the substances from which they have been associated. Isolated substances and/or entities may be separated from at least about 10%, about 20%, about 30%, about 40%, about 50%, about 60%, about 70%, about 80%, about 90%, or more of the other components with which they were initially associated. In some embodiments, isolated agents are more than about 80%, about 85%, about 90%, about 91%, about 92%, about 93%, about 94%, about 95%, about 96%, about 97%, about 98%, about 99%, or more than about 99% pure. As used herein, a substance is “pure” if it is substantially free of other components.

[1196] Substantially isolated: By “substantially isolated” is meant that a substance is substantially separated from the environment in which it was formed or detected. Partial separation can include, for example, a composition enriched in the substance or AAV particles of the present disclosure. Substantial separation can include compositions containing at least about 50%, at least about 60%, at least about 70%, at least about 80%, at least about 90%, at least about 95%, at least about 97%, or at least about 99% by weight of the compound of the present disclosure, or salt thereof. Methods for isolating compounds and their salts are routine in the art.

[1197] Linker: As used herein “linker” refers to a molecule or group of molecules which connects two molecules, such as a V_{H} chain and V_{L} chain or an antibody. A linker may be a nucleic acid sequence connecting two nucleic acid sequences encoding two different polypeptides. The linker may or may not be translated. The linker may be a cleavable linker.

[1198] MicroRNA (miRNA) binding site: As used herein, a microRNA (miRNA) binding site represents a nucleotide location or region of a nucleic acid transcript to which at least the “seed” region of a miRNA binds.

[1199] Modified: As used herein “modified” refers to a changed state or structure of a molecule. Molecules may be modified in many ways including chemically, structurally, and functionally.

[1200] Naturally Occurring: As used herein, “naturally occurring” or “wild-type” means existing in nature without artificial aid, or involvement of the hand of man.

[1201] Non-human vertebrate: As used herein, a “non-human vertebrate” includes all vertebrates except Homo sapiens, including wild and domesticated species. Examples of non-human vertebrates include, but are not limited to, mammals, such as alpaca, banteng, bison, camel, cat, cattle, deer, dog, donkey, gayal, goat, guinea pig, horse, llama, mule, pig, rabbit, reindeer, sheep water buffalo, and yak.

[1202] Off-target: As used herein, “off target” refers to any unintended effect on any one or more target, gene, or cellular transcript.

[1203] Open reading frame: As used herein, “open reading frame” or “ORF” refers to a sequence which does not contain a stop codon in a given reading frame.

[1204] Operably linked: As used herein, the phrase “operably linked” refers to a functional connection between two or more molecules, constructs, transcripts, entities, moieties or the like.

[1205] Particle: As used herein, a “particle” is a virus comprised of at least two components, a protein capsid and a polynucleotide sequence enclosed within the capsid (e.g., viral genome).

[1206] Patient: As used herein, “patient” refers to a subject who may seek or be in need of treatment, requires treatment, is receiving treatment, will receive treatment, or a subject who is under care by a trained professional for a particular disease or condition.

[1207] Payload: As used herein, “payload” or “payload region” refers to one or more polynucleotides or polynucleotide regions encoded by or within a viral genome or an expression product of such polynucleotide or polynucleotide region, e.g., a transgene, a polynucleotide encoding a polypeptide or multi-polypeptide or a modulatory nucleic acid or regulatory nucleic acid.

[1208] Payload construct: As used herein, “payload construct” or “construct” is one or more polynucleotide regions encoding or comprising a payload that is flanked on one or both sides by an inverted terminal repeat (ITR) sequence. The payload construct is a template that is replicated in a viral production cell to produce a viral genome.

[1209] Payload construct vector: As used herein, “payload construct vector” is a vector encoding or comprising a payload construct, and regulatory regions for replication and expression in bacterial cells.

[1210] Payload construct expression vector: As used herein, a “payload construct expression vector” is a vector encoding or comprising a payload construct and which further comprises one or more polynucleotide regions encoding or comprising components for viral expression in a viral replication cell.

[1211] Peptide: As used herein, “peptide” is less than or equal to 50 amino acids long, e.g., about 5, 10, 15, 20, 25, 30, 35, 40, 45, or 50 amino acids long.

[1212] Pharmaceutically acceptable: The phrase “pharmaceutically acceptable” is employed herein to refer to those compounds, materials, compositions, and/or dosage forms which are, within the scope of sound medical judgment, suitable for use in contact with the tissues of human beings and animals without excessive toxicity, irritation, allergic response, or other problem or complication, commensurate with a reasonable benefit/risk ratio.

[1213] Pharmaceutically acceptable excipients: The phrase “pharmaceutically acceptable excipient.” as used herein, refers any ingredient other than the compounds described herein (for example, a vehicle capable of suspending or dissolving the active compound) and having the properties of being substantially nontoxic and non-inflammatory in a patient. Excipients may include, for example: antiadherents, antioxidants, binders, coatings, compression aids, disintegrants, dyes (colors), emollients, emulsifiers, fillers (diluents), film formers or coatings, flavors, fragrances, glidants (flow enhancers), lubricants, preservatives, printing inks, sorbents, suspensing or dispersing agents, sweeteners, and waters of hydration. Exemplary excipients include, but are not limited to: butylated hydroxytoluene (BHT), calcium carbonate, calcium phosphate (dibasic), calcium stearate, croscarmellose, crosslinked polyvinyl pyrrolidone, citric acid, crospovidone, cysteine, ethylcellulose, gelatin, hydroxypropyl cellulose, hydroxypropyl methylcellulose, lactose, magnesium stearate, maltitol, mannitol, methionine, methylcellulose, methyl paraben, microcrystalline cellulose, polyethylene glycol, polyvinyl pyrrolidone, povidone, pregelatinized starch, propyl paraben, retinyl palmitate, shellac, silicon dioxide, sodium carboxymethyl cellulose, sodium citrate, sodium starch glycolate, sorbitol, starch (corn), stearic acid, sucrose, talc, titanium dioxide, vitamin A, vitamin E, vitamin C, and xylitol.

[1214] Pharmaceutically acceptable salts: The present disclosure also includes pharmaceutically acceptable salts of the compounds described herein. As used herein, “pharmaceutically acceptable salts” refers to derivatives of the disclosed compounds wherein the parent compound is modified by converting an existing acid or base moiety to its salt form (e.g., by reacting the free base group with a suitable organic acid). Examples of pharmaceutically acceptable salts include, but are not limited to, mineral or organic acid salts of basic residues such as amines; alkali or organic salts of acidic residues such as carboxylic acids; and the like. Representative acid addition salts include acetate, acetic acid, adipate, alginate, ascorbate, aspartate, benzenesulfonate, benzene sulfonic acid, benzoate, bisulfate, borate, butyrate, camphorate, camphorsulfonate, citrate, cyclopentanepropionate, digluconate, dodecylsulfate, ethanesulfonate, fumarate, glucoheptonate, glycerophosphate, hemisulfate, heptonate, hexanoate, hydrobromide, hydrochloride, hydroiodide, 2-hydroxy-ethanesulfonate, lactobionate, lactate, laurate, lauryl sulfate, malate, maleate, malonate, methanesulfonate, 2-naphthalenesulfonate, nicotinate, nitrate, oleate, oxalate, palmitate, pamoate, pectinate, persulfate, 3-phenylpropionate, phosphate, picrate, pivalate, propionate, stearate, succinate, sulfate, tartrate, thiocyanate, toluenesulfonate, undecanoate, valerate salts, and the like. Representative alkali or alkaline earth metal salts include sodium, lithium, potassium, calcium, magnesium, and the like, as well as nontoxic ammonium, quaternary ammonium, and amine cations, including, but not limited to ammonium, tetramethylammonium, tetraethylammonium, methylamine, dimethylamine, trimethylamine, triethylamine, ethylamine, and the like. The pharmaceutically acceptable salts of the present disclosure include the conventional non-toxic salts of the parent compound formed, for example, from non-toxic inorganic or organic acids. The pharmaceutically acceptable salts of the present disclosure can be synthesized from the parent compound which contains a basic or acidic moiety by conventional chemical methods. Generally, such salts can be prepared by reacting the free acid or base forms of these compounds with a stoichiometric amount of the appropriate base or acid in water or in an organic solvent, or in a mixture of the two; generally, nonaqueous media like ether, ethyl acetate, ethanol, isopropanol, or acetonitrile are preferred. Lists of suitable salts are found in Remington's Pharmaceutical Sciences, 17^{th} ed., Mack Publishing Company, Easton, Pa., 1985, p. 1418, Pharmaceutical Salts: Properties, Selection, and Use, P. H. Stahl and C. G. Wermuth (eds.), Wiley-VCH, 2008, and Berge et al., Journal of Pharmaceutical Science, 66, 1-19 (1977), each of which is incorporated herein by reference in its entirety.

[1215] Pharmaceutically acceptable solvate: The term “pharmaceutically acceptable solvate,” as used herein, means a compound wherein molecules of a suitable solvent are incorporated in the crystal lattice. A suitable solvent is physiologically tolerable at the dosage administered. For example, solvates may be prepared by crystallization, recrystallization, or precipitation from a solution that includes organic solvents, water, or a mixture thereof. Examples of suitable solvents are ethanol, water (for example, mono-, di-, and tri-hydrates), N-methylpyrrolidinone (NMP), dimethyl sulfoxide (DMSO), N,N′-dimethylformamide (DMF), N,N′-dimethylacetamide (DMAC), 1,3-dimethyl-2-imidazolidinone (DMEU), 1,3-dimethyl-3,4,5,6-tetrahydro-2-(1H)-pyrimidinone (DMPU), acetonitrile (ACN), propylene glycol, ethyl acetate, benzyl alcohol, 2-pyrrolidone, benzyl benzoate, and the like. When water is the solvent, the solvate is referred to as a “hydrate.”

[1216] Pharmacokinetic: As used herein, “pharmacokinetic” refers to any one or more properties of a molecule or compound as it relates to the determination of the fate of substances administered to a living organism. Pharmacokinetics is divided into several areas including the extent and rate of absorption, distribution, metabolism and excretion. This is commonly referred to as ADME where: (A) Absorption is the process of a substance entering the blood circulation; (D) Distribution is the dispersion or dissemination of substances throughout the fluids and tissues of the body; (M) Metabolism (or Biotransformation) is the irreversible transformation of parent compounds into daughter metabolites; and (E) Excretion (or Elimination) refers to the elimination of the substances from the body. In rare cases, some drugs irreversibly accumulate in body tissue.

[1217] Physicochemical: As used herein, “physicochemical” means of or relating to a physical and/or chemical property.

[1218] Preventing: As used herein, the term “preventing” refers to partially or completely delaying onset of an infection, disease, disorder and/or condition: partially or completely delaying onset of one or more symptoms, features, or clinical manifestations of a particular infection, disease, disorder, and/or condition: partially or completely delaying onset of one or more symptoms, features, or manifestations of a particular infection, disease, disorder, and/or condition; partially or completely delaying progression from an infection, a particular disease, disorder and/or condition; and/or decreasing the risk of developing pathology associated with the infection, the disease, disorder, and/or condition.

[1219] Proliferate: As used herein, the term “proliferate” means to grow, expand or increase or cause to grow, expand or increase rapidly. “Proliferative” means having the ability to proliferate. “Anti-proliferative” means having properties counter to or inapposite to proliferative properties.

[1220] Prophylactic: As used herein, “prophylactic” refers to a therapeutic or course of action used to prevent the spread of disease.

[1221] Prophylaxis: As used herein, a “prophylaxis” refers to a measure taken to maintain health and prevent the spread of disease.

[1222] Protein of interest: As used herein, the terms “proteins of interest” or “desired proteins” include those provided herein and fragments, mutants, variants, and alterations thereof.

[1223] Proximal: As used herein, the term “proximal” means situated nearer to the center or to a point or region of interest.

[1224] Purified: As used herein, “purify,” “purified,” “purification” means to make substantially pure or clear from unwanted components, material defilement, admixture or imperfection. “Purified” refers to the state of being pure. “Purification” refers to the process of making pure.

[1225] Region: As used herein, the term “region” refers to a zone or general area. In some embodiments, when referring to a protein or protein module, a region may comprise a linear sequence of amino acids along the protein or protein module or may comprise a three-dimensional area, an epitope and/or a cluster of epitopes. In some embodiments, regions comprise terminal regions. As used herein, the term “terminal region” refers to regions located at the ends or termini of a given agent. When referring to proteins, terminal regions may comprise N- and/or C-termini. N-termini refer to the end of a protein comprising an amino acid with a free amino group. C-termini refer to the end of a protein comprising an amino acid with a free carboxyl group. N- and/or C-terminal regions may there for comprise the N- and/or C-termini as well as surrounding amino acids. In some embodiments, N- and/or C-terminal regions comprise from about 3 amino acid to about 30 amino acids, from about 5 amino acids to about 40 amino acids, from about 10 amino acids to about 50 amino acids, from about 20 amino acids to about 100 amino acids and/or at least 100 amino acids. In some embodiments, N-terminal regions may comprise any length of amino acids that includes the N-terminus, but does not include the C-terminus. In some embodiments, C-terminal regions may comprise any length of amino acids, which include the C-terminus, but do not comprise the N-terminus.

[1226] In some embodiments, when referring to a polynucleotide, a region may comprise a linear sequence of nucleic acids along the polynucleotide or may comprise a three-dimensional area, secondary structure, or tertiary structure. In some embodiments, regions comprise terminal regions. As used herein, the term “terminal region” refers to regions located at the ends or termini of a given agent. When referring to polynucleotides, terminal regions may comprise 5′ and 3′ termini, 5′ termini refer to the end of a polynucleotide comprising a nucleic acid with a free phosphate group. 3′ termini refer to the end of a polynucleotide comprising a nucleic acid with a free hydroxyl group. 5′ and 3′ regions may there for comprise the 5′ and 3′ termini as well as surrounding nucleic acids. In some embodiments, 5′ and 3′ terminal regions comprise from about 9 nucleic acids to about 90 nucleic acids, from about 15 nucleic acids to about 120 nucleic acids, from about 30 nucleic acids to about 150 nucleic acids, from about 60 nucleic acids to about 300 nucleic acids and/or at least 300 nucleic acids. In some embodiments, 5′ regions may comprise any length of nucleic acids that includes the 5′ terminus, but does not include the 3′ terminus. In some embodiments, 3′ regions may comprise any length of nucleic acids, which include the 3′ terminus, but does not comprise the 5′ terminus.

[1227] RNA or RNA molecule: As used herein, the term “RNA” or “RNA molecule” or “ribonucleic acid molecule” refers to a polymer of ribonucleotides; the term “DNA” or “DNA molecule” or “deoxyribonucleic acid molecule” refers to a polymer of deoxyribonucleotides. DNA and RNA can be synthesized naturally, e.g., by DNA replication and transcription of DNA, respectively; or be chemically synthesized. DNA and RNA can be single-stranded (i.e., ssRNA or ssDNA, respectively) or multi-stranded (e.g., double stranded, i.e., dsRNA and dsDNA, respectively). The term “mRNA” or “messenger RNA”, as used herein, refers to a single stranded RNA that encodes the amino acid sequence of one or more polypeptide chains.

[1228] Sample: As used herein, the term “sample” or “biological sample” refers to a subset of its tissues, cells or component parts (e.g. body fluids, including but not limited to blood, mucus, lymphatic fluid, synovial fluid, cerebrospinal fluid, saliva, amniotic fluid, amniotic cord blood, urine, vaginal fluid and semen). A sample further may include a homogenate, lysate or extract prepared from a whole organism or a subset of its tissues, cells or component parts, or a fraction or portion thereof, including but not limited to, for example, plasma, serum, spinal fluid, lymph fluid, the external sections of the skin, respiratory, intestinal, and genitourinary tracts, tears, saliva, milk, blood cells, tumors, organs. A sample further refers to a medium, such as a nutrient broth or gel, which may contain cellular components, such as proteins or nucleic acid molecule.

[1229] Self-complementary viral particle: As used herein, a “self-complementary viral particle” is a particle comprised of at least two components, a protein capsid and a polynucleotide sequence encoding a self-complementary genome enclosed within the capsid.

[1230] Signal Sequences: As used herein, the phrase “signal sequences” refers to a sequence which can direct the transport or localization of a protein.

[1231] Single unit dose: As used herein, a “single unit dose” is a dose of any therapeutic administered in one dose/at one time/single route/single point of contact, i.e., single administration event. In some embodiments, a single unit dose is provided as a discrete dosage form (e.g., a tablet, capsule, patch, loaded syringe, vial, etc.).

[1232] Similarity: As used herein, the term “similarity” refers to the overall relatedness between polymeric molecules, e.g. between polynucleotide molecules (e.g. DNA molecules and/or RNA molecules) and/or between polypeptide molecules. Calculation of percent similarity of polymeric molecules to one another can be performed in the same manner as a calculation of percent identity, except that calculation of percent similarity takes into account conservative substitutions as is understood in the art.

[1233] Split dose: As used herein, a “split dose” is the division of single unit dose or total daily dose into two or more doses.

[1234] Stable: As used herein “stable” refers to a compound that is sufficiently robust to survive isolation to a useful degree of purity from a reaction mixture, and preferably capable of formulation into an efficacious therapeutic agent.

[1235] Stabilized: As used herein, the term “stabilize”, “stabilized.” “stabilized region” means to make or become stable.

[1236] Subject: As used herein, the term “subject” or “patient” refers to any organism to which a composition in accordance with the disclosure may be administered, e.g., for experimental, diagnostic, prophylactic, and/or therapeutic purposes. Typical subjects include animals (e.g., mammals such as mice, rats, rabbits, non-human primates, and humans) and/or plants.

[1237] Substantially: As used herein, the term “substantially” refers to the qualitative condition of exhibiting total or near-total extent or degree of a characteristic or property of interest. One of ordinary skill in the biological arts will understand that biological and chemical phenomena rarely, if ever, go to completion and/or proceed to completeness or achieve or avoid an absolute result. The term “substantially” is therefore used herein to capture the potential lack of completeness inherent in many biological and chemical phenomena.

[1238] Substantially equal: As used herein as it relates to time differences between doses, the term means plus/minus 2%.

[1239] Substantially simultaneously: As used herein and as it relates to plurality of doses, the term means within 2 seconds.

[1240] Suffering from: An individual who is “suffering from” a disease, disorder, and/or condition has been diagnosed with or displays one or more symptoms of a disease, disorder, and/or condition.

[1241] Susceptible to: An individual who is “susceptible to” a disease, disorder, and/or condition has not been diagnosed with and/or may not exhibit symptoms of the disease, disorder, and/or condition but harbors a propensity to develop a disease or its symptoms. In some embodiments, an individual who is susceptible to a disease, disorder, and/or condition (for example, cancer) may be characterized by one or more of the following: (1) a genetic mutation associated with development of the disease, disorder, and/or condition; (2) a genetic polymorphism associated with development of the disease, disorder, and/or condition; (3) increased and/or decreased expression and/or activity of a protein and/or nucleic acid associated with the disease, disorder, and/or condition; (4) habits and/or lifestyles associated with development of the disease, disorder, and/or condition; (5) a family history of the disease, disorder, and/or condition; and (6) exposure to and/or infection with a microbe associated with development of the disease, disorder, and/or condition. In some embodiments, an individual who is susceptible to a disease, disorder, and/or condition will develop the disease, disorder, and/or condition. In some embodiments, an individual who is susceptible to a disease, disorder, and/or condition will not develop the disease, disorder, and/or condition.

[1242] Sustained release: As used herein, the term “sustained release” refers to a pharmaceutical composition or compound release profile that conforms to a release rate over a specific period of time.

[1243] Synthetic: The term “synthetic” means produced, prepared, and/or manufactured by the hand of man. Synthesis of polynucleotides or polypeptides or other molecules of the present disclosure may be chemical or enzymatic.

[1244] Targeting: As used herein, “targeting” means the process of design and selection of nucleic acid sequence that will hybridize to a target nucleic acid and induce a desired effect.

[1245] Targeted Cells: As used herein, “targeted cells” refers to any one or more cells of interest. The cells may be found in vitro, in vivo, in situ or in the tissue or organ of an organism. The organism may be an animal, preferably a mammal, more preferably a human and most preferably a patient.

[1246] Therapeutic Agent: The term “therapeutic agent” refers to any agent that, when administered to a subject, has a therapeutic, diagnostic, and/or prophylactic effect and/or elicits a desired biological and/or pharmacological effect.

[1247] Therapeutically effective amount: As used herein, the term “therapeutically effective amount” means an amount of an agent to be delivered (e.g., nucleic acid, drug, therapeutic agent, diagnostic agent, prophylactic agent, etc.) that is sufficient, when administered to a subject suffering from or susceptible to an infection, disease, disorder, and/or condition, to treat, improve symptoms of, diagnose, prevent, and/or delay the onset of the infection, disease, disorder, and/or condition. In some embodiments, a therapeutically effective amount is provided in a single dose. In some embodiments, a therapeutically effective amount is administered in a dosage regimen comprising a plurality of doses. Those skilled in the art will appreciate that in some embodiments, a unit dosage form may be considered to comprise a therapeutically effective amount of a particular agent or entity if it comprises an amount that is effective when administered as part of such a dosage regimen.

[1248] Therapeutically effective outcome: As used herein, the term “therapeutically effective outcome” means an outcome that is sufficient in a subject suffering from or susceptible to an infection, disease, disorder, and/or condition, to treat, improve symptoms of, diagnose, prevent, and/or delay the onset of the infection, disease, disorder, and/or condition.

[1249] Total daily dose: As used herein, a “total daily dose” is an amount given or prescribed in 24 hr period. It may be administered as a single unit dose.

[1250] Transfection: As used herein, the term “transfection” refers to methods to introduce exogenous nucleic acids into a cell. Methods of transfection include, but are not limited to, chemical methods, physical treatments and cationic lipids or mixtures.

[1251] Treating: As used herein, the term “treating” refers to partially or completely alleviating, ameliorating, improving, relieving, delaying onset of, inhibiting progression of, reducing severity of, and/or reducing incidence of one or more symptoms or features of a particular infection, disease, disorder, and/or condition. For example, “treating” cancer may refer to inhibiting survival, growth, and/or spread of a tumor. Treatment may be administered to a subject who does not exhibit signs of a disease, disorder, and/or condition and/or to a subject who exhibits only early signs of a disease, disorder, and/or condition for the purpose of decreasing the risk of developing pathology associated with the disease, disorder, and/or condition.

[1252] Unmodified: As used herein, “unmodified” refers to any substance, compound or molecule prior to being changed in any way. Unmodified may, but does not always, refer to the wild type or native form of a biomolecule. Molecules may undergo a series of modifications whereby each modified molecule may serve as the “unmodified” starting molecule for a subsequent modification.

[1253] Vector: As used herein, a “vector” is any molecule or moiety which transports, transduces or otherwise acts as a carrier of a heterologous molecule. Vectors of the present disclosure may be produced recombinantly and may be based on and/or may comprise adeno-associated virus (AAV) parent or reference sequence. Such parent or reference AAV sequences may serve as an original, second, third or subsequent sequence for engineering vectors. In non-limiting examples, such parent or reference AAV sequences may comprise any one or more of the following sequences: a polynucleotide sequence encoding a polypeptide or multi-polypeptide, which sequence may be wild-type or modified from wild-type and which sequence may encode full-length or partial sequence of a protein, protein domain, or one or more subunits of a protein; a polynucleotide comprising a modulatory or regulatory nucleic acid which sequence may be wild-type or modified from wild-type; and a transgene that may or may not be modified from wild-type sequence. These AAV sequences may serve as either the “donor” sequence of one or more codons (at the nucleic acid level) or amino acids (at the polypeptide level) or “acceptor” sequences of one or more codons (at the nucleic acid level) or amino acids (at the polypeptide level).

[1254] Viral genome: As used herein, a “viral genome” or “vector genome” is a polynucleotide comprising at least one inverted terminal repeat (ITR) and at least one encoded payload. A viral genome encodes at least one copy of the payload.

[1255] Described herein are compositions, methods, processes, kits and devices for the design, preparation, manufacture and/or formulation of AAV particles. In some embodiments, payloads, such as but not limited to AAV polynucleotides, may be encoded by payload constructs or contained within plasmids or vectors or recombinant adeno-associated viruses (AAVs).

[1256] The details of one or more embodiments are set forth in the accompanying description below. Although any materials and methods similar or equivalent to those described herein can be used in the practice or testing of the present disclosure, the preferred materials and methods are now described. Other features, objects and advantages will be apparent from the description. In the description, the singular forms also include the plural unless the context clearly dictates otherwise. Unless defined otherwise, all technical and scientific terms used herein have the same meaning as commonly understood by one of ordinary skill in the art to which this disclosure belongs. In the case of conflict, the present description will control.

[1257] The present disclosure is further illustrated by the following non-limiting examples.

### VII. Examples

### Example 1. Generation of Antibodies

### Antibody Production by Hybridoma Technology

[1258] Host animals (e.g. mice, rabbits, goats, and llamas) are immunized by an injection with an antigenic protein (e.g., tau) to elicit lymphocytes that specifically bind to the antigen (e.g., tau). Lymphocytes are collected and fused with immortalized cell lines to generate hybridomas. Hybridomas are cultured in a suitable culture medium that is enriched with appropriate selection agents to promote growth.

[1259] Antibodies produced by the cultured hybridomas are subjected to analysis to determine binding specificity of the antibodies for the target antigen. Once antibodies with desirable characteristics are identified, corresponding hybridomas are subcloned through limiting dilution procedures and grown by standard methods. Antibodies produced by these cells are isolated and purified using standard immunoglobulin purification procedures.

[1260] Tau knock-out mice and/or wild-type mice (CD1 or B6/129) are immunized with a tau antigen using the HT-Hock immunization method. The tau antigens are selected from, (1) ePHF, (2) a mid-domain tau peptide for targeting pathological forms of tau around T181-T217 of human 441 tau, (3) a C-terminal tau peptide for targeting pathological forms of tau around S396-S422, and (4) an AT100 immunopurified tau from human AD brain.

### Recombinant Antibody Production

[1261] Recombinant antibodies are produced using heavy and light chain variable region cDNA sequences selected from hybridomas or from other sources. Sequences encoding antibody variable domains expressed by hybridomas are determined by extracting RNA molecules from antibody-producing hybridoma cells and producing cDNA by reverse transcriptase polymerase chain reaction (PCR). PCR is used to amplify cDNA using primers specific for heavy and light chain sequences. PCR products are then subcloned into plasmids for sequence analysis. Antibodies are produced by insertion of resulting variable domain sequences into expression vectors.

[1262] Recombinant antibodies are also produced using phage display technology. Target antigens are screened, in vitro, using phage display libraries having millions to billions of phage particles expressing unique single chain variable fragments (scFvs) on their viral coat. Precipitated phage particles are analyzed and sequences encoding expressed scFvs are determined. Sequences encoding antibody variable domains and/or CDRs are inserted into expression vectors for antibody production.

[1263] Recombinant antibodies are further produced using yeast surface display technology, wherein antibody variable domain sequences are expressed on the cell surface of Saccharomyces cerevisiae. Recombinant antibodies are developed by displaying the antibody fragment of interest as a fusion to e.g. Aga2p protein on the surface of the yeast, were the protein interacts with proteins and small molecules in a solution, scFvs with affinity towards desired receptors are isolated from the yeast surface using magnetic separation and flow cytometry. Several cycles of yeast surface display and isolation will be done to attain scFvs with desired properties through directed evolution.

### Reverse Translation for Antibody Generation

[1264] Nucleotide sequences are derived from antibody amino acid sequences. The amino acid sequence is reverse translated from a parent antibody sequence (e.g., light chain variable or heavy chain variable region) to generate a nucleotide sequence. The nucleotide sequence is then cloned into an antibody constant region framework and tested for expression and activity.

### Codon-Optimization

[1265] Nucleotide sequences are codon-optimized to enhance one or more desirable features of the encoded antibody (e.g., expression or affinity for the target). Each antibody nucleotide sequence is codon-optimized according to several methods known in the art and compared to the other codon-optimized variants in vitro or in vivo. All codon-optimized variants are then cloned into viral genomes and tested in vitro. The codon-optimized variants with the greatest in vitro or in vivo expression and/or affinity characteristics are selected for further study.

### Generation of Antibody Fragments

[1266] In addition to generating full length anti-tau antibodies, antibody fragments and variants are also generated. These fragments may lack the effector (Fc) region typically included in a full-length antibody. For each anti-tau antibody (e.g., IPN002, PT3, C10.2, CP13), a series of Fab, F(ab)2 and/or scFv fragments are generated and tested in vitro or in vivo. Those showing the best expression in vitro and/or in vivo are selected for further studies.

### Antibody Screening

[1267] Anti-tau antibodies that are generated by any of the methods described above or other methods known in the art, are screened for expression and affinity characteristics. Antibodies are screened first with one or more ELISA assays (phospho-tau ELISA, wild-type tau ELISA, or ePHF ELISA). An in vitro cellular screen using a biosensor system is used to assess in vitro seeding. The biosensor system may be a semi-quantitative FRET assay. Further in vitro characterization will be carried out by standard techniques known in the art, such as western blotting or immunoprecipitation, immunohistochemistry, immunocytochemistry, immunofluorescence, or an in vitro seeding assay in primary neurons. Propagation and biophysical characteristics are screened with in vitro and/or in vivo methods, which may rely on a tau-seeding and/or propagation model. Anti-tau antibodies may be purified by any method known to one with skill in the art.

### Example 2. Engineering Viral Genomes for the Expression of Anti-Tau Antibodies

[1268] Viral genomes were designed for AAV delivery of anti-tau antibodies IPN002, PHF1, MC1, C10.2 or PT3. The ITR to ITR sequences for the viral genomes are given as TAU_ITR1 to TAU_ITR249 as shown in Tables 4-6 and given by SEQ ID NO: 1990-2075 and 2137-2168, 2171-2237 and 2260-2321.

### Viral Genomes for the Expression of IPN002

[1269] Sixteen viral genomes were generated for delivery of anti-tau antibody IPN002 (TAU_ITR1 to TAU_ITR15 and TAU_ITR87; SEQ ID NO: 1990-2004 and 2137). The payload regions for these viral genomes were designed to comprise an antibody heavy chain signal sequence (SEQ ID NO: 1740), an antibody heavy chain variable region (SEQ ID NO: 1821), an antibody heavy chain constant region (SEQ ID NO: 1742), a linker region, an antibody light chain signal sequence (SEQ ID NO: 1861), an antibody light chain variable region (SEQ ID NO: 1939), and an antibody light chain constant region (SEQ ID NO: 1864), but not always in this order when read 5′ to 3′. The linker region selected for these viral genomes was either T2A (SEQ ID NO: 1726) or F2A (SEQ ID NO: 1727). For TAU_ITR1 to TAU_ITR8 (SEQ ID NO: 1990-1997), a furin cleavage site (SEQ ID NO: 1724 or 1725) was located immediately 5′ to the T2A or F2A linker.

[1270] In designing viral genomes for the expression of anti-tau antibody IPN002, one of four promoters were selected. The ubiquitous CAG promoter (SEQ ID NO: 2080), further comprising a CMVie element (SEQ ID NO: 2081) and a CBA minimal promoter region (SEQ ID NO: 2082) was used for TAU_ITR1 (SEQ ID NO: 1990), TAU_ITR2 (SEQ ID NO: 1991), TAU_ITR9 (SEQ ID NO: 1998) and TAU_ITR10 (SEQ ID NO: 1999). The ubiquitous CB promoter (SEQ ID NO: 2083), was used for TAU_ITR3 (SEQ ID NO: 1992), TAU_ITR4 (SEQ ID NO: 1993), TAU_ITR11 (SEQ ID NO: 2000) and TAU_ITR87 (SEQ ID NO: 2137). The astrocyte targeting GFAP promoter (SEQ ID NO: 2085) was used for TAU_ITR5 (SEQ ID NO: 1994), TAU_ITR6 (SEQ ID NO: 1995), TAU_ITR12 (SEQ ID NO: 2001) and TAU_ITR13 (SEQ ID NO: 2002). A neuronal targeting synapsin promoter (SEQ ID NO: 2086) was used for TAU_ITR7 (SEQ ID NO: 1996), TAU_ITR8 (SEQ ID NO: 1997), TAU_ITR14 (SEQ ID NO: 2003) and TAU_ITR15 (SEQ ID NO: 2004).

[1271] The viral genomes designed with CB, GFAP and synapsin promoters further included an ie1 exon region (SEQ ID NO: 2090), an ie1 intron 1 region (SEQ ID NO: 2095), a human beta-globin intron region (SEQ ID NO: 2097) and a human beta-globin exon region (SEQ ID NO: 2093). These four elements were always maintained in this order when read 5′ to 3′.

[1272] The 5′ ITR (SEQ ID NO: 2076), the polyadenylation sequence (SEQ ID NO: 2122) and the 3′ ITR (SEQ ID NO: 2078) were retained across all sixteen viral genomes designed for the expression of anti-tau antibody IPN002.

[1273] The order of heavy and light chains (including signal sequence, variable region and constant region) was alternated with respect to 5′ to 3′ direction. When read 5′ to 3′, viral genomes encoding heavy chain antibody sequences, a linker region, and light chain antibody sequences (heavy-linker-light) include TAU_ITR1 to TAU_ITR8 (SEQ ID NO: 1990-1997). Viral genomes encoding light chain antibody sequences, a linker region, and heavy chain antibody sequences (light-linker-heavy) when read 5′ to 3′, include TAU_ITR9 to TAU_ITR15 (SEQ ID NO: 1998-2004) and TAU_ITR87 (SEQ ID NO: 2137).

[1274] In summary, these 16 viral genomes represent four configurations HF.T2AL, HF.F2AL, LT2AH, and LF2AH, each driven by one of four promoters, CAG, CB6, GFAP or synapsin. The description of these viral genomes, including the individual sequence regions, is laid out in Tables 15-20 above.

### Viral Genomes for the Expression of C10.2

### Codon-Optimized Variants

[1275] Ten viral genomes were designed for the expression of anti-tau antibody C10.2 (TAU_ITR16 to TAU_ITR25; SEQ ID NO: 2005-2014). These viral genomes were differentiated from one another by the codon-optimized sequences for C10.2 (with light chain variable regions given by SEQ ID NO: 1921-1930 and heavy chain variable regions given by SEQ ID NO: 1804-1813). Codon-optimization was determined according to one of the following methods: Bioinformatics (TAU_ITR16: SEQ ID NO: 2005), EMBOSS (TAU_ITR17; SEQ ID NO: 2006), GeneInfinity (TAU_ITR18; SEQ ID NO: 2007), Greg Thatcher (TAU_ITR19; SEQ ID NO: 2008), IDT (TAU_ITR20; SEQ ID NO: 2009), In Silico (TAU_ITR21; SEQ ID NO: 2010), Molecular Biology (TAU_ITR22; SEQ ID NO: 2011). N2P (TAU_ITR23; SEQ ID NO: 2012), SnapGene (TAU_ITR24; SEQ ID NO: 2013), or VectorNTI (TAU_ITR25; SEQ ID NO: 2014).

[1276] Beyond the antibody light chain variable and heavy chain variable regions, each viral genome included a 5′ ITR (SEQ ID NO: 2076), a CB promoter (SEQ ID NO: 2083), an exon/intron region comprising an ie1 exon 1 region (SEQ ID NO: 2090), an ie1 intron 1 region (SEQ ID NO: 2095), a human beta-globin intron region (SEQ ID NO: 2097) and a human beta-globin exon region (SEQ ID NO: 2093), a light chain antibody signal sequence (SEQ ID NO: 1861), a light chain constant region (SEQ ID NO: 1864), a T2A linker (SEQ ID NO: 1726), a heavy chain signal sequence (SEQ ID NO: 1740), a heavy chain constant region (SEQ ID NO: 1743), a polyadenylation sequence (SEQ ID NO: 2122) and a 3′ ITR (SEQ ID NO: 2078).

[1277] Each of these viral genomes was configured in a light-linker-heavy 5′ to 3′ orientation. The description of these viral genomes, including the individual sequence regions, is laid out in Tables 21 and 22 above.

### Promoter and Configuration Variants

[1278] Sixteen viral genomes, representing four configurations (HF.T2AL, LT2AH, HF.F2AL, LF2AH), driven by each of four promoters (CAG, CBA, GFAP, synapsin) were generated for delivery of anti-tau antibody C10.2 (TAU_ITR21, TAU_ITR88 to TAU_ITR102: SEQ ID NO: 2010, 2138-2152). The payload regions for these viral genomes were designed to comprise an antibody heavy chain (SEQ ID NO: 1809), a linker region (T2A; SEQ ID NO: 1726 or F2A; SEQ ID NO: 1727), and an antibody light chain (SEQ ID NO: 1926), not always in this order when read 5′ to 3′, depending on configuration. C10.2 antibody sequences were codon-optimized according to the InSilico method.

[1279] One of four promoters was selected in designing viral genomes for the expression of anti-tau antibody C10.2. The ubiquitous CAG promoter (SEQ ID NO: 2080), further comprising a CMVie element (SEQ ID NO: 2081) and a CBA minimal promoter region (SEQ ID NO: 2082), was used for TAU_ITR89 (SEQ ID NO: 2139), TAU_ITR93 (SEQ ID NO: 2143), TAU_ITR97 (SEQ ID NO: 2147) and TAU_ITR100 (SEQ ID NO: 2150). The ubiquitous CB promoter (SEQ ID NO: 2083), further comprising a CMVie enhancer (SEQ ID NO: 2087) immediately 5′ to the promoter sequence was used for TAU_ITR88 (SEQ ID NO: 2138), TAU_ITR92 (SEQ ID NO: 2142), TAU_ITR96 (SEQ ID NO: 2146) and TAU_ITR21 (SEQ ID NO: 2010). The astrocyte targeting GFAP promoter (SEQ ID NO: 2085) was used for TAU_ITR90 (SEQ ID NO: 2140), TAU_ITR94 (SEQ ID NO: 2144), TAU_ITR98 (SEQ ID NO: 2148) and TAU_ITR101 (SEQ ID NO: 2151). A neuronal targeting synapsin promoter (SEQ ID NO: 2086) was used for TAU_ITR91 (SEQ ID NO: 2141), TAU_ITR95 (SEQ ID NO: 2145). TAU_ITR99 (SEQ ID NO: 2149) and TAU_ITR102 (SEQ ID NO: 2152).

[1280] Viral genomes driven by CB, GFAP and synapsin promoters further comprised an intron/exon region consisting of an ie1 exon region (SEQ ID NO: 2090), an ie1 intron region (SEQ ID NO: 2095), a human beta-globin intron region (SEQ ID NO: 2097) and a human beta-globin exon region (SEQ ID NO: 2093), as read in the 5′ to 3′ direction.

[1281] The 5′ ITR (SEQ ID NO: 2076), the polyadenylation sequence (SEQ ID NO: 2122), and the 3′ ITR (SEQ ID NO: 2078) were retained across all sixteen viral genomes designed for the expression of anti-tau antibody C10.2.

[1282] The order of heavy and light chains was alternated with respect to 5′ to 3′ direction. Eight viral genomes (TAU_ITR88 to TAU_ITR91; SEQ ID NO: 2138-2141 and TAU_ITR96 to TAU_ITR99; SEQ ID NO: 2146-2149) were designed encoding heavy chain antibody sequences, a T2A or F2A linker region, and light chain antibody sequences (heavy-linker-light), when read 5′ to 3′. In these heavy-linker-light configuration viral genomes, the linker also included a furin cleavage site (SEQ ID NO: 1724 or 1725) immediately 5′ to the linker sequence. The other eight viral genomes (TAU_ITR92 to TAU_ITR95; SEQ ID NO: 2142-2145, TAU_ITR21; SEQ ID NO: 2010, and TAU_ITR100 to TAU_ITR102: SEQ ID NO: 2150-2152), when read 5′ to 3′, were designed to encode light chain antibody sequences, a T2A or F2A linker region (linker only, no furin cleavage site), and heavy chain antibody sequences (light-linker-heavy).

[1283] In summary, these 16 viral genomes represent four configurations HF.T2AL, LT2AH, HF.F2AL, LF2AH, each driven by one of four promoters CAG, CB. GFAP or synapsin, for the expression of anti-tau antibody C10.2.

### Viral Genomes for the Expression of PT3

### Codon-Optimized Variants

[1284] Ten viral genomes were designed for the expression of anti-tau antibody PT3 (TAU_ITR26 to TAU_ITR35; SEQ ID NO: 2015-2024). These viral genomes were differentiated from one another by the codon-optimized sequences for PT3 (with light chain variable regions given by SEQ ID NO: 1971-1980 and heavy chain variable regions given by SEQ ID NO: 1851-1860). Codon-optimization was determined according to one of the following methods: GeneScript (TAU_ITR26; SEQ ID NO: 2015), SnapGene (TAU_ITR27; SEQ ID NO: 2016). EMBOSS (TAU_ITR28; SEQ ID NO: 2017), Bioinformatics (TAU_ITR29; SEQ ID NO: 2018), NUS (TAU_ITR30; SEQ ID NO: 2019). NUS2 (TAU_ITR31; SEQ ID NO: 2020), GeneInfinity (TAU_ITR32; SEQ ID NO: 2021), IDT (TAU_ITR33; SEQ ID NO: 2022), Bioinformatics2 (TAU_ITR34; SEQ ID NO: 2023), or NUS3 (TAU_ITR35; SEQ ID NO: 2024).

[1285] Beyond the antibody light chain variable and heavy chain variable regions, each viral genome included a 5′ ITR (SEQ ID NO: 2077), a CBA promoter (SEQ ID NO: 2084), an exon/intron region comprising an ie1 exon 1 region (SEQ ID NO: 2090), an ie1 intron 1 region (SEQ ID NO: 2095), a human beta-globin intron region (SEQ ID NO: 2097) and a human beta-globin exon region (SEQ ID NO: 2093), a heavy chain antibody signal sequence (SEQ ID NO: 1740), a heavy chain constant region (SEQ ID NO: 1742), a furin cleavage site (SEQ ID NO: 1724), a T2A linker (SEQ ID NO: 1726), a light chain signal sequence (SEQ ID NO: 1861), a light chain constant region (SEQ ID NO: 1864), a polyadenylation sequence (SEQ ID NO: 2123) and a 3′ ITR (SEQ ID NO: 2079). TAU_ITR27 (SEQ ID NO: 2016) had a partial heavy chain antibody signal sequence.

[1286] Each of these viral genomes was configured in a heavy-linker-light 5′ to 3′ orientation. The description of these viral genomes, including the individual sequence regions, is laid out in Tables 23 and 24 above.

[1287] Nucleotide sequences for the heavy chain and light chains of two codon-optimized variants, encoding anti-tau antibody PT3 were cloned into viral genomes with expression driven by either the CBA or CAG promoters. Four viral genomes were generated, each with an HF.T2AL configuration (TAU_ITR11: SEQ ID NO: 2161, TAU_ITR112; SEQ ID NO: 2162, TAU_ITR119; SEQ ID NO: 2169, TAU_ITR120; SEQ ID NO: 2170). Western blot analysis of PT3 expression from these four viral genome constructs showed the two bands expected to be expressed for each construct tested. Quantification by mouse IgG1 ELISA as a fold change normalized to Lucia indicated enhanced expression using the CAG promoter and the first codon-optimization variant (TAU_ITR120: SEQ ID NO: 2170). Assessment by wild-type tau ELISA showed PT3 binds to wt tau441 at high concentration, while GSK-phosphorylated tau ELISA showed PT3 weakly binds phosphorylated tau441 (GSKed_Tau protein from Signal Chem) and PHF-tau ELISA showed binding patterns of PT3 to PHF-tau substantially similar to those seen with IPN002.

### Promoter and Configuration Variants

[1288] Sixteen viral genomes, representing four configurations (HF.T2AL, HF.F2AL, LT2AH, and LF2AH), driven by each of four promoters (CAG. CB, GFAP, synapsin) were generated for delivery of anti-tau antibody PT3 (TAU_ITR103 to TAU_ITR120: SEQ ID NO: 2153-2170). The payload regions for these viral genomes were designed to comprise an antibody heavy chain (SEQ ID NO: 1859), a linker region, and an antibody light chain (SEQ ID NO: 1980), not always in this order when read 5′ to 3′, depending on configuration. PT3 antibody sequences were codon-optimized according to the SnapGene codon format. The linker region selected for these viral genomes was either T2A (SEQ ID NO: 1726) or F2A (SEQ ID NO: 1727).

[1289] One of four promoters was selected in designing viral genomes for the expression of anti-tau antibody PT3. The ubiquitous CAG promoter (SEQ ID NO: 2080), further comprising a CMVie element (SEQ ID NO: 2081) and a CBA minimal promoter region (SEQ ID NO: 2082) was used for TAU_ITR104 (SEQ ID NO: 2154), TAU_ITR108 (SEQ ID NO: 2158). TAU_ITR116 (SEQ ID NO: 2166) and TAU_ITR112 (SEQ ID NO: 2162). The ubiquitous CB promoter (SEQ ID NO: 2083) was used for TAU_ITR103 (SEQ ID NO: 2153), TAU_ITR107 (SEQ ID NO: 2157), TAU_ITR111 (SEQ ID NO: 2161) and TAU_ITR115 (SEQ ID NO: 2165). The astrocyte targeting GFAP promoter (SEQ ID NO: 2085) was used for TAU_ITR105 (SEQ ID NO: 2155), TAU_ITR109 (SEQ ID NO: 2159), TAU_ITR113 (SEQ ID NO: 2163) and TAU_ITR117 (SEQ ID NO: 2167). A neuronal targeting synapsin promoter (SEQ ID NO: 2086) was used for TAU_ITR106 (SEQ ID NO: 2156), TAU_ITR110 (SEQ ID NO: 2160), TAU_ITR114 (SEQ ID NO: 2164) and TAU_ITR117 (SEQ ID NO: 2167).

[1290] The viral genomes designed with CB, GFAP and synapsin promoters further included an ie1 exon region (SEQ ID NO: 2090), an ie1 intron 1 region (SEQ ID NO: 2095), a human beta-globin intron region (SEQ ID NO: 2097) and a human beta-globin exon region (SEQ ID NO: 2093). These four elements were always maintained in this order when read 5′ to 3′.

[1291] The 5′ ITR (SEQ ID NO: 2076), the polyadenylation sequence (SEQ ID NO: 2122) and the 3′ ITR (SEQ ID NO: 2078) were retained across all sixteen viral genomes designed for the expression of anti-tau antibody PT3.

[1292] The order of heavy and light chains was alternated with respect to 5′ to 3′ direction. Eight viral genomes (TAU_ITR103 to TAU_ITR106; SEQ ID NO: 2153-2156 and TAU_ITR111 to TAU_ITR114: SEQ ID NO: 2161-2164) were designed encoding heavy chain antibody sequences, a linker region, and light chain antibody sequences (heavy-linker-light), when read 5′ to 3′. In these heavy-linker-light configuration viral genomes, the linker also included a furin cleavage site (SEQ ID NO: 1724 or 1725) immediately 5′ to the T2A or F2A linker. The other eight viral genomes (TAU_ITR107 to TAU_ITR110; SEQ ID NO: 2157-2160 and TAU_ITR115 to TAU_ITR118; SEQ ID NO: 2165-2168), when read 5′ to 3′, were designed to encode light chain antibody sequences, a linker region (T2A or F2A only, no furin cleavage site), and heavy chain antibody sequences (light-linker-heavy).

[1293] In summary, these 16 viral genomes represent four configurations HF.T2AL, HF.F2AL, LT2AH, and LF2AH, each driven by one of four promoters CAG, CB6, GFAP or synapsin, for the expression of anti-tau antibody PT3.

[1294] Viral genomes for the expression of PHF/Thirty-six viral genomes were designed for the expression of anti-tau antibody PHF1 (TAU_ITR36 to TAU_ITR71; SEQ ID NO: 2025-2060).

[1295] Either a 130 or 141 nucleotide 5′ ITR (SEQ ID NO: 2076 or 2077, respectively) was selected, and matched with either a 130 or 141 nucleotide 3′ ITR (SEQ ID NO: 2078 or 2079, respectively). TAU_ITR69 to TAU_ITR71 (SEQ ID NO: 2058-2060) included 130 nucleotide ITRs, while TAU_ITR36 to TAU_ITR68 (SEQ ID NO: 2025-2057) included 141 nucleotide ITRs.

[1296] Promoters were selected from one of four, (1) CAG promoter (SEQ ID NO: 2080), further comprising a CMVie element (SEQ ID NO: 2081) and a CBA minimal promoter region (SEQ ID NO: 2082), (2) CBA promoter (SEQ ID NO: 2084), (3) CB6 promoter comprising a CMV enhancer (SEQ ID NO: 2087) and a CB promoter (SEQ ID NO: 2083), and (4) GFAP promoter (SEQ ID NO: 2085).

[1297] Viral genomes with CBA (TAU_ITR46 to TAU_ITR68: SEQ ID NO: 2035-2057) or CB6 promoters (TAU_ITR69 and TAU_ITR70; SEQ ID NO: 2058 and 2059) were further designed to incorporate an exon/intron region comprising an ie1 exon 1 region (SEQ ID NO: 2090-2092), an ie1 intron 1 region (SEQ ID NO: 2095), a human beta-globin intron region (SEQ ID NO: 2097-2102) and a human beta-globin exon region (SEQ ID NO: 2093), or an SV40 intron (SEQ ID NO: 2103).

[1298] At least one signal sequence was incorporated into each viral genome for the expression of PHF1, such as, a light chain antibody signal sequence (SEQ ID NO: 1862), a heavy chain antibody signal sequence (SEQ ID NO: 1741) or a human growth hormone 2 signal sequence (SEQ ID NO: 2106). As many as four signal sequences were incorporated into a single viral genome (TAU_ITR67; SEQ ID NO: 2056).

[1299] Nucleotide sequences encoding anti-tau antibody PHF1 were selected from light chain sequences given by SEQ ID NO: 1956, 1957 or 1962, and heavy chain sequences given by SEQ ID NO: 1838 and 1839. As many as 3 pairs of heavy and light chain sequences were incorporated into single viral genomes (TAU_ITR61; SEQ ID NO: 2050, TAU_ITR63; SEQ ID NO: 2052, TAU_ITR65; SEQ ID NO: 2054, TAU_ITR67; SEQ ID NO: 2056). Heavy and light chain antibody sequences were separated by a linker sequence selected from SG4S (encoded by SEQ ID NO: 1729) (corresponding protein sequence disclosed as SEQ ID NO: 4535), G4S3 (encoded by SEQ ID NO: 1730) (corresponding protein sequence disclosed as SEQ ID NO: 4537), F2A (encoded by SEQ ID NO: 1727), T2A (encoded by SEQ ID NP: 1726). In some cases, these linkers were combined with a furin cleavage site given by SEQ ID NO: 1724.

[1300] The order of heavy and light chains was alternated with respect to 5′ to 3′ direction (heavy-linker-light vs light-linker-heavy). When read 5′ to 3′, viral genomes in the heavy-linker-light configuration include TAU_ITR36 to TAU_ITR40 (SEQ ID NO: 2025-2029), TAU_ITR46 to TAU_ITR50 (SEQ ID NO: 2035-2039), TAU_ITR56 to TAU_ITR64 (SEQ ID NO: 2045-2053) and TAU_ITR69 (SEQ ID NO: 2058). Viral genomes designed in the light-linker-heavy configuration when read 5′ to 3′, include TAU_ITR41 to TAU_ITR45 (SEQ ID NO: 2030-2034), TAU_ITR51 to TAU_ITR55 (SEQ ID NO: 2040-2044), TAU_ITR65 to TAU_ITR68 (SEQ ID NO: 2054-2057) and TAU_ITR70 (SEQ ID NO: 2059) and TAU_ITR71 (SEQ ID NO: 2060).

[1301] One of four tag sequences was selected for use in these viral genomes, with as many as three tags per single viral genome. The tag sequences are given by SEQ ID NO: 2118-2121 and represent HA, SEKDEL (“SEKDEL” disclosed as SEQ ID NO: 4546) (21 nt and 18 nt) and HIS tags, respectively.

[1302] Polyadenylation sequences were selected from either a rabbit beta-globin polyadenylation sequence (SEQ ID NO: 2122), or a human growth hormone polyadenylation sequence (SEQ ID NO: 2123).

[1303] A subset of these viral genomes were supplemented with an albumin filler sequence selected from SEQ ID NO: 2125 or 2126.

[1304] The description of these viral genomes, including the individual sequence regions, is laid out in Tables 25-32 above.

### Viral Genomes for the Expression of MC1, PHF1 or IPN002

[1305] Viral genomes of Table 6 (SEQ ID NO: 2061-2075; TAU_ITR72-TAU_ITR86) were designed for delivery of anti-tau antibodies MC1 (with heavy chain of SEQ ID NO: 1832 and light chain of SEQ ID NO: 1950), PHF1 (with heavy chain of SEQ ID NO: 1838 and light chain of SEQ ID NO: 1962) and IPN002 (with heavy chain of SEQ ID NO: 1820 and light chain of SEQ ID NO: 1940) to cells. The viral genomes include, besides the antibody coding regions, a 5′ ITR (SEQ ID NO: 2076), a CMV enhancer (SEQ ID NO: 2087), a CB promoter (SEQ ID NO: 2083), an SV40 intron (SEQ ID NO: 2103), a rabbit globin polyadenylation sequence (SEQ ID NO: 2122), and a 3′ITR (SEQ ID NO: 2078).

[1306] Viral genomes were designed to encode a linker between light and heavy chain antibody sequences. Linker sequences were derived from an internal ribosome entry site (IRES; SEQ ID NO: 1732), foot and mouth disease virus 2A (F2A; SEQ ID NO: 1727), porcine teschovirus-1 virus 2A (P2A; SEQ ID NO: 1728), or G4S5 (SEQ ID NO: 1731) (corresponding protein sequence disclosed as SEQ ID NO: 4538) sequences. For TAU_ITR72 (SEQ ID NO: 2061), TAU_ITR73 (SEQ ID NO: 2062), TAU_ITR77 (SEQ ID NO: 2066), TAU_ITR78 (SEQ ID NO: 2067), TAU_ITR83 (SEQ ID NO: 2072) and TAU_ITR85 (SEQ ID NO: 2074), a furin cleavage site (F: SEQ ID NO: 1725) was introduced immediately 5′ to the linker sequence. The order of heavy and light chains was alternated with respect to 5′ to 3′ direction. When read 5′ to 3′, viral genomes encoding a heavy chain antibody sequence, a linker region, and a light chain antibody sequence (heavy-linker-light) include TAU_ITR72 to TAU_ITR77 (SEQ ID NO: 2061-2066) and TAU_ITR85 (SEQ ID NO: 2074). Viral genomes encoding a light chain antibody sequence, a linker region, and a heavy chain antibody sequence (light-linker-heavy) when read 5′ to 3′, include TAU_ITR78 to TAU_ITR84 (SEQ ID NO: 2067-2073) and TAU_ITR86 (SEQ ID NO: 2075).

[1307] The description of these viral genomes, including the individual sequence regions, is laid out in Tables 33-36 above.

[1308] The viral genomes for expression of IPN002, C10.2, PT2, PHF1 and MC1 were incorporated into AAV particles using an AAV1, AAV2, or VOY101 capsid.

### Example 3. Production and Purification of AAV Particles

[1309] Any of the viral genomes described herein (e.g., those of Example 2) may be encapsulated in an AAV capsid to generate an AAV particle. AAV particles described herein may be produced using methods known in the art, such as, for example, triple transfection or baculovirus mediated virus production. Any suitable permissive or packaging cell known in the art may be employed to produce the particles. Mammalian cells are often preferred. Also preferred are trans-complementing packaging cell lines that provide functions deleted from a replication-defective helper virus, e.g., 293 cells or other Ela trans-complementing cells.

[1310] The gene cassette may contain some or all of the parvovirus (e.g., AAV) cap and rep genes. Preferably, however, some or all of the cap and rep functions are provided in trans by introducing a packaging vector(s) encoding the capsid and/or Rep proteins into the cell. Most preferably, the gene cassette does not encode the capsid or Rep proteins. Alternatively, a packaging cell line is used that is stably transformed to express the cap and/or rep genes

[1311] Recombinant AAV virus particles are, in some cases, produced and purified from culture supernatants according to the procedure as described in US20160032254, the contents of which are incorporated by reference. Production may also involve methods known in the art including those using 293T cells, sf9 insect cells, triple transfection or any suitable production method.

[1312] In some cases, 293T cells (adhesion/suspension) are transfected with polyethyleneimine (PEI) with plasmids required for production of AAV, i.e., AAV2 rep, an adenoviral helper construct and an ITR flanked transgene cassette. The AAV2 rep plasmid also contains the cap sequence of the particular virus being studied. Twenty-four hours after transfection (no medium changes for suspension), which occurs in DMEM/F17 with/without serum, the medium is replaced with fresh medium with or without serum. Three (3) days after transfection, a sample is taken from the culture medium of the 293 adherent cells. Subsequently cells are scraped, or suspension cells are pelleted, and transferred into a receptacle. For adhesion cells, after centrifugation to remove cellular pellet, a second sample is taken from the supernatant after scraping. Next, cell lysis is achieved by three consecutive freeze-thaw cycles (−80 C to 37 C) or adding detergent triton. Cellular debris is removed by centrifugation or depth filtration and sample 3 is taken from the medium. The samples are quantified for AAV particles by DNase resistant genome titration by DNA qPCR. The total production yield from such a transfection is equal to the particle concentration from sample 3 described above.

[1313] AAV particle titers are measured according to genome copy number (genome particles per milliliter). Genome particle concentrations are based on DNA qPCR of the vector DNA as previously reported (Clark et al. (1999) Hum. Gene Ther., 10:1031-1039; Veldwijk et al. (2002) Mol. Ther., 6:272-278).

### Example 4. Development of ELISA Assay to Determine Affinity to ePHF Tau

[1314] An assay was developed to determine the affinity of anti-tau antibodies, expressed from various viral genome constructs, for extracellular tau in the form of paired helical filaments (ePHF). The ePHF were first immobilized on a 96-well plate overnight by pre-coating with 1500× of the concentrated PHF tau at 4° C., washed 3 times with PBS then blocked with 3% BSA for 2 hrs at room temperature or overnight at 4° C. Supernatants from suspensions of Expi 293 cells transfected with anti-tau antibody viral genome constructs (TAU_ITR72-TAU_ITR86) were collected and loaded onto the plates. Anti-tau antibody MC1 was diluted in 3% BSA and analyzed separately as a control. Plates were then incubated for 2 hrs at room temperature. Wells were washed 5 times with TBS/0.5% Tween 20 wash buffer, then incubated with 1:5000 dilution of anti-mouse antibody labeled with HRP (Thermo Fisher Scientific, Waltham, Mass.) for 30 min. Plates were then developed by incubating with one-step TMB substrate (Thermo Fisher Scientific, Waltham, Mass.) for 30 min, stopped by 2N H₂SO₄ and read using a BioTek Synergy H1 hybrid reader (BioTek, Winooski, Vt.) at 450 nm. The concentration of anti-tau antibodies, and their affinity for ePHF tau, was determined using a standard curve. Anti-tau antibodies produced using MC1LIRESH (TAU_ITR80), MC1LF2AH (TAU_ITR79), MC1HF.F2AL (TAU_ITR72), MC1LF.F2AH (TAU_ITR78), and MC1HF.P2AL (TAU_ITR73) viral genome constructs showed similar affinity for ePHF tau as the MC1 control. Anti-tau antibodies generated using MC1HIRESL (TAU_ITR75), MC1LP2AH (TAU_ITR82) and MC1LF.P2AH (TAU_ITR83) viral genome constructs demonstrated lower affinity to ePHF tau than control MC1. Data are shown in Table 92 below (construct names are shown without the MC1 prefix).

TABLE 92
ePHF Tau ELISA: OD450 data

| ng/ml | HIRESL | LIRESH | LF2AH | HF.F2AL | LF.F2AH | LP2AH | HFP2AL | LF.P2AH | MC1 |
|---|---|---|---|---|---|---|---|---|---|
| 1000.0 | 1.0 | 1.0 | 1.1 | 1.1 | 1.1 | 0.8 | 0.9 | 0.6 | — |
| 500.0 | 0.7 | 0.9 | 1.0 | 1.0 | 1.0 | 0.7 | 0.9 | 0.4 | — |
| 166.7 | 0.3 | 0.6 | 0.7 | 0.7 | 0.7 | 0.4 | 0.6 | 0.2 | — |
| 55.6 | 0.2 | 0.3 | 0.4 | 0.5 | 0.4 | 0.2 | 0.4 | 0.1 | — |
| 18.5 | 0.1 | 0.2 | 0.2 | 0.3 | 0.2 | 0.1 | 0.2 | 0.1 | — |
| 6.2 | 0.1 | 0.1 | 0.1 | 0.2 | 0.1 | 0.1 | 0.1 | 0.1 | — |
| 2.1 | 0.1 | 0.1 | 0.1 | 0.1 | 0.1 | 0.1 | 0.1 | 0.1 | — |
| 0.7 | 0.1 | 0.1 | 0.1 | 0.1 | 0.1 | 0.1 | 0.1 | 0.1 | — |
| 2558.9 | — | — | — | — | — | — | — | — | 1.2 |
| 1279.4 | — | — | — | — | — | — | — | — | 1.2 |
| 426.5 | — | — | — | — | — | — | — | — | 1.0 |
| 142.2 | — | — | — | — | — | — | — | — | 0.7 |
| 47.4 | — | — | — | — | — | — | — | — | 0.4 |
| 15.8 | — | — | — | — | — | — | — | — | 0.2 |
| 5.3 | — | — | — | — | — | — | — | — | 0.3 |
| 1.8 | — | — | — | — | — | — | — | — | 0.1 |

[1315] According to the same assay, MC1LF2AH (TAU_ITR79), MC1HF.F2AL (TAU_ITR72), IPN002LF2AH (TAU_ITR84), IPN002HF.F2AL (TAU_ITR77), PHF-1LF2AH (TAU_ITR86), and PHF-1HF.F2AL (TAU_ITR85) viral genome constructs were expressed in Expi 293 cells, the supernatants collected and expressed antibodies were tested for affinity to ePHF tau. Antibodies generated from the six viral genome constructs tested showed similar affinity for ePHF tau in comparison to their respective control antibodies (MC1. PHF1 and IPN002 antibodies).

### Example 5. ELISA Assay for Detection of Expressed Antibodies

[1316] Expi 293 cell culture supernatants from cells expressing anti-tau antibodies were tested by sandwich ELISA to detect and determine concentrations of expressed antibodies. Ninety-six well plates were pre-coated with anti-mouse IgG1 overnight at 4° C. then washed 3 times with PBS and blocked with 3% BSA for 2 hrs at room temperature. Supernatants were diluted in blocking buffer (3% BSA), added to the wells and incubated for 2 hrs at room temperature. Samples were then washed 5 times with TBS/0.5% Tween 20 wash buffer and incubated with 1:5000 dilution of anti-mouse antibody labeled with HRP (Thermo Fisher Scientific, Waltham, Mass.) for 30 min. Plates were developed by incubating with one-step TMB substrate for 30 min, stopped by 2N H₂SO₄ and read using a BioTek Synergy H1 hybrid reader (BioTek, Winooski, Vt.) at 450 nm. The concentration of expressed MC1 anti-tau antibodies was then determined for each construct using a standard curve (see Table 93).

TABLE 93
Concentrations of expressed antibodies

| Construct name | Antibody concentration μg/ml |
|---|---|
| MC1HIRESL | 4.42 |
| MC1LIRESH | 32.29 |
| MC1LF2AH | 10.74 |
| MC1HF.F2AL | 12.10 |
| MC1LF.F2AH | 12.94 |
| MC1LP2AH | 44.12 |
| MC1HF.P2AL | 23.79 |
| MC1LF.P2AH | 46.43 |

[1317] Cells expressing MC1LIRESH (TAU_ITR80), MC1LP2AH (TAU_ITR82) and MC1LF.P2AH (TAU_ITR83) viral genome constructs produced the highest concentration of antibodies from transfected cells.

[1318] In a subsequent experiment using the same methods, cell supernatants from Expi 293 cells expressing MC1LF2AH (TAU_ITR79), MC1HF.F2AL (TAU_ITR72), PHF1LF2AH (TAU_ITR86), PHF1HF.F2AL (TAU_ITR85), IPN002LF2AH (TAU_ITR84), or IPN002HF.F2AL (TAU_ITR77) viral genome constructs were also assessed for concentrations of expressed antibodies by sandwich ELISA. Antibody concentrations from supernatants tested are presented in Table 94.

TABLE 94
Concentrations of expressed antibodies

| Construct name | Antibody concentration μg/ml |
|---|---|
| MC1LF2AH | 40.4 |
| MC1HF.F2AL | 4.5 |
| PHF1LF2AH | 28.3 |
| PHF1HF.F2AL | 2.9 |
| IPN002LF2AH | 10.2 |
| IPN002HF.F2AL | 1.6 |

[1319] Cells expressing MC1LF2AH (TAU_ITR79), PHF1LF2AH (TAU_ITR86) and IPN002LF2AH (TAU_ITR84) viral genome constructs produced the highest concentration of antibodies from transfected cells.

### Example 6. Western Blotting for Anti-Tau Antibody Expression

[1320] Anti-tau antibodies expressed using MC1HIRESL (TAU_ITR75), MC1LIRESH (TAU_ITR80), MC1HF2AL (TAU_ITR74), MC1LF2AH (TAU_ITR79), MC1HF.F2AL (TAU_ITR72), MC1LF.F2AH (TAU_ITR78), MC1HP2AL (TAU_ITR76), MC1LP2AH (TAU_ITR82), MC1HF.P2AL (TAU_ITR73), MC1LF.P2AH (TAU_ITR83), and MC1LG4S5H (TAU_ITR81) viral genome constructs were assessed by Western blotting in both small and large volume (30 mL) cell culture experiments. Expi 293 cells expressing MC1HIRESL (TAU_ITR75), MC1LIRESH (TAU_ITR80), MC1 HF2AL (TAU_ITR74), MC1LF2AH (TAU_ITR79), MC1HF.F2AL (TAU_ITR72). MC1LF.F2AH (TAU_ITR78), MC1HP2AL (TAU_ITR76), MC1LP2AH (TAU_ITR82), MC1HF.P2AL (TAU_ITR73). MC1LF.P2AH (TAU_ITR83), and MC1LG4S5H (TAU_ITR81) viral genome constructs were cultured to produce antibody-rich supernatant. After centrifugation, supernatants were collected and two small samples of each were removed and mixed with equal volumes of Laemmli sample buffer. Samples were then boiled at 95° C. for 5 min before loading into two 4-20% polyacrylamide gels along with molecular weight markers. Both gels were run for 1-2 hrs at 100V under reducing or non-reducing conditions. Proteins were then transferred to a nitrocellulose membrane for 2 hr at 4° C. and stained with anti-mouse IgGs. First, membranes were placed in blocking buffer for 1 h at room temperature or overnight at 4° C. followed by incubation with anti-mouse IgG antibodies in blocking buffer overnight at 4° C. The membranes were then washed three times each for 5 min in TBST and incubated with enzyme-labeled secondary antibody in blocking buffer for 1 hr at room temperature. Membranes were washed three times each for 5 min in TBST then developed using a luminescent substrate.

[1321] Under both reducing and non-reducing conditions, three viral genome constructs showed limited expression when initially assessed by Western blot. In normal (reducing) conditions, antibody heavy chains usually run at approximately 50 kD, while light chains are evident at 25 kD. In supernatant from cells expressing MC1HF2AL (TAU_ITR74) and MC1LG4S5H (TAU_ITR81) viral genome constructs, only the 25 kD species was evident while in supernatant from cells expressing MC1HP2AL (TAU_ITR76), neither species appeared. The remaining supernatants showed the anticipated 25 and 50 kD species under reducing conditions and several high molecular weight (80-150 kD) bands under non-reducing conditions.

[1322] A similar experiment was conducted using MC1LF2AH (TAU_ITR79), MC1HF.F2AL (TAU_ITR72), IPN002LF2AH (TAU_ITR84), IPN002HF.F2AL (TAU_ITR77), PHF-1LF2AH (TAU_ITR86), and PHF-1HF.F2AL (TAU_ITR86) viral genome constructs. Western blot showed the expected 25 kD and 50 kD bands under reducing conditions and high molecular weight triplets under non-reducing conditions, similar to the appropriate controls (MC1, PHF1 and IPN002 antibodies). LF2AH viral genome constructs generated better expression levels for all three antibodies than the HF.F2AL viral genome constructs.

[1323] Antibody concentrations from scaled-up culture conditions (30 mL) were determined for select constructs (see Table 95).

TABLE 95
Antibody concentrations from 30 mL cultures

| Construct name | Concentration μg/ml |
|---|---|
| MC1LIRESH | 20.3 |
| MC1LF2AH | 86.2 |
| MC1HF.F2AL | 9.9 |
| MC1LF.F2AH | 14.7 |
| MC1HF.P2AL | 15.9 |

[1324] Viral genome construct MC1 LF2AH (TAU_ITR79) yielded the highest concentration of antibody from transfected cells.

### Example 7. Purification of Anti-Tau Antibody Constructs

### Purification of Anti-Tau Antibody MC1

[1325] Anti-tau antibodies expressed in large volumes of Expi 293 cells (30 mL) were purified using protein A/G beads. A column was prepared with protein A/G bead resin and washed 3 times with loading buffer. Supernatants were diluted with equal volumes of loading buffer and applied to the column. Unbound proteins were washed through with loading buffer. Elution buffer was added to the column and fractions collected. Fractions containing proteins were identified by absorbance at 280 nm, pooled together, neutralized and run on polyacrylamide gels as described in Example 6. Under reducing conditions, antibodies produced using MC1LIRESH (TAU_ITR80), MC1LF2AH (TAU_ITR79), MC1HF.F2AL (TAU_ITR72), MC1LF.F2AH (TAU_ITR78), and MC1HF.P2AL (TAU_ITR73) viral genome constructs yielded protein bands when examined by Western blotting that were similar to those observed with MC1 control antibody (bands at 25 kD and 50 kD). Under non-reducing conditions, all expressed antibodies generated a triplet set of bands between 80-150 kD, as did the MC1 control.

[1326] Purified anti-tau antibodies were then tested for their affinity to ePHF tau by ELISA assay as described in Example 4. Antibodies with the highest affinity for ePHF tau were those produced using MC1LF2AH (TAU_ITR79), MC1HF.F2AL (TAU_ITR72) and MC1LF.F2AH (TAU_ITR78) viral genome constructs. These antibodies all demonstrated affinity for ePHF tau that was similar to that observed with MC1 control antibody.

[1327] Purification of anti-tau antibody PT3 Anti-tau antibody PT3 was produced and purified in a IL culture of ExpiCHO cells, as described above. Cells were transfected with expifectamine and maintained in culture. The culture media was harvested and PT3 purified using a Protein G column, then concentrated to 6 mg/ml in 1×PBS with 55 mM NaCl and 0.001% F-68. When examined by SDS-PAGE under reduced conditions, bands at approximately 25 kD and 50 kD were observed. Under non-reducing conditions, bands were evident at approximately 160 kD. The purified PT3 antibody was tested for affinity to ePHF and wild-type tau by ELISA assay and demonstrated a greater affinity for ePHF tau.

### Example 8. Optimization of Viral Genomes for Antibody Expression

### Viral Genomes for IPN002 Antibody Expression

[1328] Ten viral genomes (TAU_ITR1 to TAU_ITR4, TAU_ITR9 to TAU_ITR11, TAU_ITR87, TAU_ITR84, and TAU_ITR77) were generated to test the influence of ubiquitous promoters (CB6 vs CAG) and configuration (HF.F2AL vs LF2AH) on IPN002 expression. Characterization included ExpiCHO transfection, mouse IgG1 ELISA, Western blot, Phospho-tau ELISA and wild-type tau ELISA.

[1329] ExpiCHO cells were transfected with each of the IPN002 antibody expressing viral genome constructs listed above to generate an antibody-rich supernatant. Samples of supernatant were prepared for analysis by mouse IgG1 ELISA to determine the expression level of anti-tau antibody IPN002 in the ExpiCHO cells. Quantification of IgG1 (μg/mL) and the average fold change when normalized to Lucia, is shown in Table 96 below.

TABLE 96
Quantification of ExpiCHO Transfection with IPN002 constructs

| | | SEQ | | | Norm. | | Avg. |
|---|---|---|---|---|---|---|---|
| | TAU_ITR | ID | | IgG1 | to | Fold | Fold |
| Construct Name | ID | NO: | Lucia | (μg/mL) | Lucia | Change | Change |
| CB6-IPN002-HF.F2AL | TAU_ ITR3 | 1992 | 11503.8 | 4.9 | 0.4 | 2.8 | 2.8 |
| | | | 11224.7 | 4.8 | 0.4 | 2.8 | |
| CAG-IPN002-HF.F2AL | TAU_ITR2 | 1991 | 5859.2 | 5.0 | 0.9 | 5.5 | 5.5 |
| | | | 6533.7 | 5.5 | 0.8 | 5.5 | |
| CB6-IPN002-LF2AH | TAU_ITR11 | 2000 | 11627.9 | 15.4 | 1.3 | 8.5 | 7.8 |
| | | | 18215.9 | 20.0 | 1.1 | 7.0 | |
| CAG-IPN002-LF2AH | TAU_ITR9 | 1998 | 10953.3 | 52.3 | 4.8 | 30.1 | 46.9 |
| | | | 3238.4 | 31.8 | 9.8 | 63.1 | |
| CB6-IPN002-HF.T2AL | TAU_ITR4 | 1993 | 18660.5 | 23.6 | 1.3 | 8.1 | 5.8 |
| | | | 15305.7 | 8.3 | 0.5 | 3.5 | |
| CAG-IPN002-HF.T2AL | TAU_ITR1 | 1990 | 13201.9 | 74.4 | 5.6 | 36.2 | 32.7 |
| | | | 9462.1 | 42.9 | 4.5 | 29.1 | |
| CB6-IPN002-LT2AH | TAU_ITR87 | 2137 | 9198.4 | 58.0 | 6.3 | 40.5 | 31.6 |
| | | | 17042.6 | 60.5 | 3.5 | 22.8 | |
| CAG-IPN002-LT2AH | TAU_ITR10 | 1999 | 16716.9 | 90.6 | 5.4 | 34.8 | 36.2 |
| | | | 14401.1 | 84.4 | 5.9 | 37.6 | |
| CB6-SV40-IPN002-LF2AH | TAU_ITR84 | 2073 | 15274.7 | 8.0 | 0.5 | 3.4 | 3.4 |
| CB6-SV40-IPN002-HF.F2AL | TAU_ITR77 | 2066 | 18471.8 | 2.9 | 0.2 | 1 | 1 |

[1330] Samples of supernatant were prepared for analysis by Western blot, as described in Example 6 above. The resultant Western blots were reviewed for the presence of heavy (50 kD) and light chain (25 kD) species, which were evident for all constructs tested.

[1331] Two ELISA assays (PHF-1 IgG1 and anti-eTau), as described in Examples 4 and 5, were also performed to determine antibody production from eight of the constructs. Results are shown in Table 97 below. Cell-free supernatant and anti-tau antibody IPN002 were used as negative and positive controls, respectively.

TABLE 97
ELISA for analysis of antibody production

| | TAU_ITR | SEQ | PHF-1 IgG1 | anti-eTau |
|---|---|---|---|---|
| Construct Name | ID | ID NO: | ELISA: ng/ml | ELISA: ng/ml |
| CB6-IPN002-HF.F2AL | TAU_ITR3 | 1992 | 9.9 | 6.8 |
| CAG-IPN002-HF.F2AL | TAU_ITR2 | 1991 | 9.3 | 7.0 |
| CB6-IPN002-LF2AH | TAU_ITR11 | 2000 | 12.4 | 8.8 |
| CAG-IPN002-LF2AH | TAU_ITR9 | 1998 | 14.9 | 10.8 |
| CB6-IPN002-HF.T2AL | TAU_ITR4 | 1993 | 12.4 | 9.0 |
| CAG-IPN002-HF.T2AL | TAU_ITR1 | 1990 | 18.4 | 12.8 |
| CB6-IPN002-LT2AH | TAU_ITR87 | 2137 | 21.5 | 14.6 |
| CAG-IPN002-LT2AH | TAU_ITR10 | 1999 | 19.6 | 13.4 |
| Ctl supernatant | — | — | 0 | 0 |
| IPN002 ctl | — | — | 16.2 | 14.7 |

[1332] The anti-tau antibody IPN002 expressed from these viral genome constructs binds both phospho- and wild-type tau, based on ELISA.

### VOY101.IPN002 Promoter and Viral Genome Configuration Studies in Rodents

[1333] Four viral genome configurations (HF.T2AL, HF.F2AL, LT2AH, and LF2AH) for the expression of anti-tau antibody IPN002 were matched with each of four promoters (CAG, CB6, GFAP and synapsin), for the generation of 16 viral genome variants as described in Example 2 and outlined in Tables 15-20. To determine the effects of the promoters and viral genome configurations on brain distribution, cellular tropism, and expression levels, the viral genomes were packaged in VOY101 capsids and single stranded AAV particles delivered by intravenous administration to mice.

[1334] First, two intravenous administration routes and associated pharmacokinetics were compared using TAU_ITR1 (SEQ ID NO: 1990) packaged in VOY101 delivered to mice. Overall, the pharmacokinetics and biodistribution patterns were substantially similar if ssAAV particles were delivered via tail vein or retro-orbitally. For the purposes of the present disclosure, when animal studies are described, the term intravenous delivery may refer to any means of intravenous delivery, including, but not limited to, tail vein injection or retro-orbital injection.

### Ubiquitous Promoters for IPN002 Expression

[1335] First, viral genomes TAU_ITR1 (SEQ ID NO: 1990; CAG-HF.T2AL), TAU_ITR10 (SEQ ID NO: 1999; CAG-LT2AH), TAU_ITR4 (SEQ ID NO: 1993; CB6-HF.T2AL), and TAU_ITR87 (SEQ ID NO: 2137; CB6-LT2AH), utilizing ubiquitous CAG or CB6 promoters and HF.T2AL or LT2AH configurations were assessed. These four viral genomes were packaged into VOY101 AAV particles (single stranded) and formulated in PBS and 0.001% F-68. Vehicle PBS with 0.001% F-68 was used as a control. An intravenous bolus at a dose of 1.4×1013 vg/kg was administered via tail vein to two-month old female C57Bl/6 mice (n=4 per group; 20 total mice). Twenty-eight days later, mice were sacrificed by intracardiac perfusion and tissue samples collected from the olfactory bulb, hippocampus, cortex, thalamus, brain stem, spinal cord, spleen, liver, and skeletal muscle and processed for further analysis. Serum samples were collected daily. The study design is shown in Table 98 below.

TABLE 98
ssVOY101.IPN002 CAG/CB6 promoter study design

| | | SEQ | | | | | | End |
|---|---|---|---|---|---|---|---|---|
| Construct | TAU_ITR | ID | | Dose | Dose | | | of |
| Configuration | ID | NO: | μL | (vg/kg) | (vg) | Route | N | study |
| CAG-IPN002-HF.T2AL | TAU_ITR1 | 1990 | 100 | 1.4E13 | 2.8E11 | IV | 4 | D 28 |
| CAG-IPN002-LT2AH | TAU_ITR10 | 1999 | 100 | 1.4E13 | 2.8E11 | IV | 4 | D 28 |
| CB6-IPN002-HF.T2AL | TAU_ITR4 | 1993 | 100 | 1.4E13 | 2.8E11 | IV | 4 | D 28 |
| CB6-IPN002-LT2AH | TAU_ITR87 | 2137 | 100 | 1.4E13 | 2.8E11 | IV | 4 | D 28 |
| PBS with 0.001% F-68 | — | — | 100 | — | — | IV | 4 | D 28 |

[1336] Samples were analyzed by ePHF ELISA or total tau ELISA, immunohistochemistry (NeuN, GFAP, Iba) and/or immunofluorescence or hematoxylin and eosin staining (H&E) and vector genome quantification using droplet digital PCR (ddPCR) normalized to diploid cell number (VG/DC) using the endogenous transferrin receptor gene (TFRC). Secondary readouts included daily cage side observations for 1 week after AAV particle administration and weekly body weight measurements. Steady increases in body weight over the course of the study indicated that no obvious health issues were encountered as a result of treatment. Vector genome quantifications (VG/DC are shown in Table 99 below.

TABLE 99
Vector genome quantification of ssVOY101.IPN002 constructs

| | TAU_ITR1 | TAU_ITR10 | TAU_ITR4 | TAU_ITR87 | Vehicle |
|---|---|---|---|---|---|
| | (CAG-HL) | (CAG-LH) | (CB-HL) | (CB-LH) | (PBS) |
| Hippocampus | 5.0 | 8.1 | 8.7 | 15.3 | 0.0 |
| Cortex | 7.2 | 14.0 | 19.4 | 42.2 | 0.0 |
| Olfactory Bulb | 2.4 | 5.2 | 7.6 | 17.6 | 0.0 |
| Thalamus | 7.9 | 13.9 | 20.4 | 35.7 | 0.0 |
| Brainstem | 8.1 | 14.7 | 21.8 | 36.6 | 0.0 |
| Spinal Cord | 4.9 | 8.0 | 12.6 | 24.8 | 0.0 |
| Liver | 0.5 | 0.9 | 2.0 | 3.1 | 0.0 |
| Skeletal Muscle | 0.1 | 0.2 | 0.5 | 1.7 | 0.0 |
| Spleen | 0.4 | 0.4 | 1.2 | 2.5 | 0.0 |

[1337] In all tissues analyzed, including CNS tissues (hippocampus, cortex, olfactory bulb, thalamus, brainstem and spinal cord), TAU_ITR87 (SEQ ID NO: 2137) with configuration CB6-IPN002-LT2AH showed the highest vector genome quantification per diploid cell. One mouse from this group demonstrated significantly low AAV biodistribution and transduction and these data were removed from the analysis. In peripheral tissues (liver, skeletal muscle and spleen), quantification of vector genome distribution per cell was low for each of the 4 constructs tested. Intravenous administration of ssVOY101.IPN002 particles resulted in markedly higher CNS tissue biodistribution, as compared to in peripheral tissues. Higher vector genome levels were detected when driven by the CB6 promoter as opposed to the CAG promoter.

[1338] Samples of hippocampus, cortex, olfactory bulb, thalamus, brainstem, spinal cord, liver and serum were subjected to analysis by ePHF ELISA to determine IPN002 expression from each of the four IPN002 viral genomes tested. IPN002 antibody expression was then normalized to the viral genome biodistribution (IPN002/VG). Data are shown in Table 100 below as ng/mg protein (or ng/mL for serum samples) and IPN002/vg (shortened to ab/vg). Data for one mouse were omitted since no vector genomes were detected.

TABLE 100
IPN002 expression from ssVOY101.IPN002 constructs (ng/mg protein or mL)

| | TAU_ITR1 | | TAU_ITR10 | | TAU_ITR4 | | TAU_ITR87 | | Vehicle | |
|---|---|---|---|---|---|---|---|---|---|---|
| | (CAG-HL) | | (CAG-LH) | | (CB-HL) | | (CB-LH) | | (PBS) | |
| | ng/mg | ab/vg | ng/mg | ab/vg | ng/mg | ab/vg | ng/mg | ab/vg | ng/mg | ab/vg |
| Hippocampus | 62.7 | 9.7 | 48.0 | 6.6 | 35.9 | 3.8 | 44.2 | 2.9 | 0.0 | 0.0 |
| Cortex | 106.1 | 12.4 | 62.3 | 4.6 | 54.8 | 2.6 | 22.3 | 0.6 | 0.0 | 0.0 |
| Olfactory Bulb | 72.6 | 23.1 | 44.2 | 9.3 | 35.3 | 5.9 | 27.5 | 1.6 | 0.0 | 0.0 |
| Thalamus | 59.0 | 6.6 | 46.7 | 3.3 | 40.1 | 1.8 | 16.0 | 0.4 | 0.0 | 0.0 |
| Brainstem | 138.5 | 14.9 | 126.8 | 11.1 | 111.9 | 5.4 | 60.5 | 1.7 | 0.0 | 0.0 |
| Spinal Cord | 124.3 | 24.3 | 150.3 | 28.6 | 78.7 | 4.6 | 34.0 | 1.4 | 0.0 | 0.0 |
| Liver | 39.5 | 81.0 | 118.2 | 175.9 | 8.9 | 5.5 | 5.7 | 2.1 | 0.0 | 0.0 |
| Serum (ng/mL) | 3295.6 | — | 16209 | — | 4807.6 | — | 3364.5 | — | 0.0 | 0.0 |

[1339] None of the four viral genomes was proven to significantly enhance IPN002 antibody expression, though TAU_ITR4 (SEQ ID NO: 1993; CB6-IPN002-HF.T2AL) showed a trend toward increased IPN002 expression, as compared to expression from the other three viral genomes. Based on IPN002 expression normalized to vector genome data, TAU_ITR1 (SEQ ID NO: 1990; CAG-IPN002-HF.T2AL) showed the highest expression per vector genome.

[1340] Immunofluorescent IgG staining of brain tissue collected from mice treated with an IV injection of ssVOY101.IPN002 AAV particles comprising viral genomes encoding IPN002, driven by CAG or CB6 promoters and one of two viral genome configurations (HF.T2AL or LT2AH). showed greater immunofluorescence (i.e., antibody penetration) in tissue of mice treated with heavy-linker-light chain configuration, as compared to light-heavy-linker configuration with the use of both CAG and CB6 promoters. Comparisons of antibody expression from viral genomes with the same genome configurations but different promoters indicated that the CAG promoter drove higher expression in brain tissues, as measured by immunofluorescence. The highest immunofluorescent signal was observed with TAU_ITR1 (SEQ ID NO: 1990: CAG-IPN002-HF.T2AL), which was consistent with the ePHF tau ELISA results.

[1341] Co-immunostaining (fluorescent) of brain tissues for IPN002 (IgG) and neuronal (NeuN) or astrocytic (GFAP) markers showed co-localization of IPN002 with NeuN in neurons of the hippocampus, cortex and thalamus, as well as with GFAP in astrocytes of the cortex.

[1342] Anti-IgG immunohistochemistry of brain tissue collected from mice 28 days after treatment with an IV bolus injection of ssVOY101.IPN002 AAV particles comprising viral genomes encoding IPN002, driven by CAG or CB6 promoters and one of two viral genome configurations (HF.T2AL or LT2AH), showed broad antibody expression across the mouse CNS, but stronger staining in tissue of mice treated with heavy-linker-light chain configuration, as compared to light-heavy-linker configuration with the use of both CAG and CB6 promoters. Vehicle-treated control animals exhibited low background levels of staining. Expression of IPN002 antibody was observed in a non-cell type specific manner (neurons and astrocytes showed staining) across multiple brain regions, as may be expected when using ubiquitous promoters.

[1343] Immunohistochemistry of brain tissue of mice, treated with an IV bolus injection of ssVOY101.IPN002 AAV particles comprising viral genomes encoding IPN002, driven by CAG or CB6 promoters 28 days prior, for IPN002 (IgG) and astrocytic (S100β) markers showed co-localization of IPN002 with S100β positive cells.

[1344] Together, these data indicate that CAG and CB6 promoters may be used to effectively drive IPN002 expression in brain tissue of mice. Viral genome configuration heavy-linker-light leads to approximately 2-fold greater IPN002 antibody expression and tissue distribution, as compared to the light-linker-heavy viral genome configuration, regardless of whether the CAG or CB6 promoter is used. When CAG and CB6 promoters were compared, the CAG promoter was observed to drive greater expression of IPN002 as compared to CB6, regardless of the viral genome configuration. The highest expression of IPN002, per vector genome, was observed from TAU_ITR1 (SEQ ID NO: 1990; CAG-IPN002-HF.T2AL).

### Ubiquitous Promoters and T2A or F2A Linkers for IPN002 Expression

[1345] In a second study, the effect of using ubiquitous CAG or CB6 promoters for driving expression of IPN002 from two different viral genome configurations (HF.F2AL or LF2AH) was assessed based on measurement of brain distribution, cellular tropism and antibody expression level. Data from this study further enabled comparison of the effects of T2A and F2A cleavage sites on IPN002 antibody expression, distribution and tropism.

[1346] Viral genomes TAU_ITR2 (SEQ ID NO: 1991; CAG-HF.F2AL), TAU_ITR9 (SEQ ID NO: 1998: CAG-LF2AH), TAU_ITR3 (SEQ ID NO: 1992; CB6-HF.F2AL), and TAU_ITR11 (SEQ ID NO: 2000; CB6-LF2AH), were packaged, single stranded, into VOY101 AAV particles an, formulated in PBS and 0.001% F-68. Vehicle PBS with 0.001% F-68 was used as a control. An intravenous bolus at a dose of 1.4×10¹³ vg/kg was administered via tail vein to two-month old female C57Bl/6 mice (n=4 per group; 20 total mice). Twenty-eight days later, mice were sacrificed by intracardiac perfusion and tissue samples collected and processed for further analysis. The right half of the brain (including olfactory bulb) and lumbar spinal cord were post-fixed with 4% PFA for immunohistochemistry. The other half of the brain (dissected into hippocampus, cortex, thalamus, brainstem) and cervical and thoracic spinal cord tissues were processed for use in ELISA assays and vector genome quantification by droplet digital PCR normalized to diploid cell number (VG/DC) using the endogenous transferrin receptor gene (TFRC). Peripheral tissues from spleen, liver and skeletal muscle were also collected. Serum samples were collected at two days prior to dosing, and weekly after dosing on days 7, 14, 21 and 28 (terminal day). CSF samples were collected on the terminal day (D28). The study design is shown in Table 101 below.

TABLE 101
ssVOY101.IPN002 CAG/CB6 promoter and linker study design

| | | SEQ | | | | | | End |
|---|---|---|---|---|---|---|---|---|
| Construct | TAU_ITR | ID | | Dose | Dose | | | of |
| Configuration | ID | NO: | μL | (vg/kg) | (vg) | Route | N | study |
| CAG-HF.F2AL | TAU_ITR2 | 1991 | 100 | 1.4E13 | 2.8E11 | IV | 4 | D 28 |
| CAG-LF2AH | TAU_ITR9 | 1998 | 100 | 1.4E13 | 2.8E11 | IV | 4 | D 28 |
| CB6-HF.F2AL | TAU_ITR3 | 1992 | 100 | 1.4E13 | 2.8E11 | IV | 4 | D 28 |
| CB6-LF2AH | TAU_ITR11 | 2000 | 100 | 1.4E13 | 2.8E11 | IV | 4 | D 28 |
| PBS with 0.001% F-68 | — | — | 100 | — | — | IV | 4 | D 28 |

[1347] CNS, peripheral and serum samples were analyzed by ePHF ELISA. Brain, olfactory bulb and spinal cord tissues were assessed by immunohistochemistry (NeuN, S100β, IgG), immunofluorescence and/or hematoxylin and eosin staining (H&E). Vector genome quantification using droplet digital PCR (ddPCR) was carried out for samples collected from cortex, hippocampus, anterior olfactory bulb, brain stem, thoracic spinal cord, liver and skeletal muscle. Secondary readouts included daily cage side observations for 1 week after AAV particle administration and weekly body weight measurements. Steady increases in body weight over the course of the study indicated that no obvious health issues were encountered as a result of treatment. Vector genome quantifications (VG/DC) are shown in the Table 102 below.

TABLE 102
Vector genome quantification of ssVOY101.IPN002 constructs

| | TAU_ITR2 | TAU_ITR9 | TAU_ITR3 | TAU_ITR11 | Vehicle |
|---|---|---|---|---|---|
| | (CAG-HL) | (CAG-LH) | (CB6-HL) | CB6-LH) | (PBS) |
| Hippocampus | 7.0 | 7.3 | 17.2 | 16.8 | 0.0 |
| Cortex | 17.4 | 13.8 | 23.5 | 36.0 | 0.0 |
| Olfactory Bulb | 7.1 | 6.9 | 10.0 | 12.5 | 0.1 |
| Thalamus | 20.3 | 18.2 | 34.0 | 42.2 | 0.0 |
| Brainstem | 20.5 | 19.9 | 24.8 | 44.2 | 0.1 |
| Spinal Cord | 11.1 | 9.5 | 16.0 | 26.3 | 0.2 |
| Liver | 5.6 | 2.0 | 6.8 | 5.9 | 0.0 |
| Skeletal Muscle | 0.4 | 0.4 | 0.7 | 1.5 | 0.0 |
| Spleen | 1.7 | 1.6 | 4.3 | 4.2 | 0.1 |

[1348] Across the six CNS tissues analyzed, treatment with each of the four viral genome configurations resulted in similar AAV biodistribution, with no statistically significant difference between treatment groups. A trend was seen toward higher AAV genomes per cell in animals treated with CB6 promoter constructs. In peripheral tissues, all 4 viral genome configurations showed low AAV biodistribution, though delivery of viral genomes comprising a CB6 promoter TAU_ITR3 (SEQ ID NO: 1992; CB6-HFF2AL) and TAU_ITR11 (SEQ ID NO: 2000; CB6-LF2AH) exhibited a slight, statistically non-significant trend toward enhanced expression in liver and skeletal muscle. IV administration of each of the four viral genomes tested resulted in greater AAV biodistribution in CNS tissues as compared to peripheral tissues.

[1349] Samples of hippocampus, cortex, olfactory bulb, thalamus, brainstem, spinal cord, liver, spleen, skeletal muscle and serum were subjected to analysis by ePHF ELISA to determine IPN002 expression from each of the four cell-type specific IPN002 viral genomes tested. Control studies were performed to confirm the standard curve and determine that the matrix effect is not observed in this ELISA assay. IPN002 antibody expression was then normalized to the viral genome biodistribution (IPN002/VG). Data are shown in Table 103 below as ng/mg protein (or ng/mL for serum samples) and IPN002/vg (shortened to ab/vg).

TABLE 103
IPN002 expression from ssVOY101.IPN002 constructs (ng/mg protein or mL)

| | TAU_ITR2 | | TAU_ITR9 | | TAU_ITR3 | | TAU_ITR11 | | Vehicle | |
|---|---|---|---|---|---|---|---|---|---|---|
| | (CAG-HL) | | (CAG-LH) | | (CB6-HL) | | (CB6-LH) | | (PBS) | |
| | ng/mg | ab/vg | ng/mg | ab/vg | ng/mg | ab/vg | ng/mg | ab/vg | ng/mg | ab/vg |
| Hippocampus | 7.6 | 1.1 | 10.4 | 1.4 | 1.6 | 0.1 | 6.2 | 0.4 | 0.0 | 0.0 |
| Cortex | 8.6 | 0.5 | 11.6 | 0.8 | 3.7 | 0.2 | 10.0 | 0.3 | 0.0 | 0.0 |
| Olfactory Bulb | 5.0 | 0.6 | 13.6 | 2.1 | 1.1 | 0.1 | 6.3 | 0.5 | 0.0 | 0.0 |
| Thalamus | 8.2 | 0.4 | 14.4 | 0.9 | 4.1 | 0.1 | 9.4 | 0.2 | 0.0 | 0.0 |
| Brainstem | 13.9 | 0.7 | 26.2 | 1.4 | 9.6 | 0.4 | 16.3 | 0.4 | 0.0 | 0.0 |
| Spinal Cord | 23.8 | 2.1 | 14.6 | 1.5 | 7.4 | 0.5 | 11.2 | 0.4 | 0.0 | 0.0 |
| Liver | 9.9 | 3.5 | 14.7 | 11.0 | 3.0 | 0.8 | 0.9 | 0.2 | 0.1 | 0.0 |
| Spleen | 11.5 | 19.3 | 10.1 | 12.1 | 0.2 | 0.0 | 0.9 | 0.6 | 0.0 | 0.0 |
| Muscle | 36.7 | 119.3 | 21.9 | 44.2 | 1.8 | 3.5 | 2.0 | 1.9 | 0.0 | 0.0 |

[1350] IPN002 expression was evident in all CNS tissues tested an limited expression was seen in the peripheral tissues of mice treated with each of the four viral genomes. Comparison of IPN002 expression from viral genomes of the same configuration other than for the promoter (CAG-HF.F2AL vs. CB6-HF.F2AL) showed greater expression driven by the CAG promoter than the CB6 promoter. The trend for greater IPN002 expression when using the CAG promoter was also evident when assessed per viral genome (normalized to viral genome biodistribution; ab/vg).

[1351] In a direct comparison of viral genomes comprising ubiquitous promotors and either a T2A or F2A linker, eight viral genomes were tested (TAU_ITR1 (SEQ ID NO: 1990: CAG-HF.T2AL), TAU_ITR10 (SEQ ID NO: 1999: CAG-LT2AH), TAU_ITR4 (SEQ ID NO: 1993; CB6-HF.T2AL), and TAU_ITR87 (SEQ ID NO: 2137; CB6-LT2AH), TAU_ITR2 (SEQ ID NO: 1991; CAG-HF.F2AL), TAU_ITR9 (SEQ ID NO: 1998: CAG-LF2AH), TAU_ITR3 (SEQ ID NO: 1992; CB6-HF.F2AL), and TAU_ITR11 (SEQ ID NO: 2000: CB6-LF2AH)) by ePHF ELISA (Table 104) for IPN002 antibody expression (ng/mg). Table 105 shows IPN002 antibody expression normalized to viral genome biodistribution (IPN002/VG).

TABLE 104
IPN002 expression from ssVOY101.IPN002 constructs (ng/mg protein)

| | CAG-HL | | CAG-LH | | CB6-HL | |
|---|---|---|---|---|---|---|
| | T2A | F2A | T2A | F2A | T2A | |
| | (TAU_ITR1) | (TAU_ITR2) | (TAU_ITR10) | (TAU_ITR9) | (TAU_ITR4) | |
| SEQ ID NO: | 1990 | 1991 | 1999 | 1998 | 1993 | |
| Hippocampus | 62.7 | 7.6 | 48.0 | 10.4 | 35.9 | |
| Cortex | 106.1 | 8.6 | 62.3 | 11.6 | 54.8 | |
| Olfactory | 72.6 | 5.0 | 44.2 | 13.6 | 35.3 | |
| Bulb | | | | | | |
| Thalamus | 59.0 | 8.2 | 46.7 | 14.4 | 40.1 | |
| Brainstem | 138.5 | 13.9 | 69.6 | 26.2 | 111.9 | |
| Spinal Cord | 124.3 | 23.8 | 150.3 | 14.6 | 78.7 | |
| Serum | 131274 | 87446.7 | 1452.54 | 76889.3 | 26251.2 | |
| (ng/mL) | | | | | | |
| | | CB6-HL | CB6-LH | | | |
| | | F2A | T2A | F2A | Vehicle (PBS) | |
| | | (TAU_ITR3) | (TAU_ITR87) | (TAU_ITR11) | T2A | F2A |
| | SEQ ID NO: | 1992 | 2137 | 2000 | — | — |
| | Hippocampus | 1.6 | 44.2 | 6.2 | 0.0 | 0.0 |
| | Cortex | 3.7 | 22.3 | 10.0 | 0.0 | 0.0 |
| | Olfactory | 1.1 | 27.5 | 6.3 | 0.0 | 0.0 |
| | Bulb | | | | | |
| | Thalamus | 4.1 | 16.0 | 9.4 | 0.0 | 0.0 |
| | Brainstem | 9.6 | 60.5 | 16.3 | 0.0 | 0.0 |
| | Spinal Cord | 7.4 | 34.0 | 11.2 | 0.0 | 0.0 |
| | Serum | 7688.1 | 30185.2 | 1792.3.1 | 0.0 | 0.0 |
| | (ng/mL) | | | | | |

TABLE 105
Normalized IPN002 expression from ssVQY101.IPN002 constructs

| | CAG-HL | | CAG-LH | | CB6-HL | |
|---|---|---|---|---|---|---|
| | T2A | F2A | T2A | F2A | T2A | |
| | (TAU_ITR1) | (TAU_ITR2) | (TAU_ITR10) | (TAU_ITR9) | (TAU_ITR4) | |
| SEQ ID NO: | 1990 | 1991 | 1999 | 1998 | 1993 | |
| Hippocampus | 9.7 | 1.1 | 6.6 | 1.4 | 3.8 | |
| Cortex | 12.4 | 0.5 | 4.6 | 0.8 | 2.6 | |
| Olfactory | 23.1 | 0.6 | 9.3 | 2.1 | 5.9 | |
| Bulb | | | | | | |
| Thalamus | 6.6 | 0.1 | 3.3 | 0.9 | 1.8 | |
| Brainstem | 14.9 | 0.7 | 11.1 | 1.4 | 5.4 | |
| Spinal Cord | 24.3 | 2.1 | 28.5 | 1.5 | 4.6 | |
| | | CB6-HL | CB6-LH | | | |
| | | F2A | T2A | F2A | Vehicle (PBS) | |
| | | (TAU_ITR3) | (TAU_ITR87) | (TAU_ITR11) | T2A | F2A |
| | SEQ ID NO: | 1992 | 2137 | 2000 | — | — |
| | Hippocampus | 0.1 | 2.9 | 0.4 | 0.0 | 0.0 |
| | Cortex | 0.2 | 0.6 | 0.3 | 0.0 | 0.0 |
| | Olfactory | 0.1 | 1.6 | 0.5 | 0.0 | 0.0 |
| | Bulb | | | | | |
| | Thalamus | 0.1 | 0.4 | 0.4 | 0.0 | 0.0 |
| | Brainstem | 0.4 | 1.7 | 0.4 | 0.0 | 0.0 |
| | Spinal Cord | 0.5 | 1.4 | 0.4 | 0.0 | 0.0 |

[1352] In CNS tissues of mice, use of the T2A linker, rather than the F2A, led to higher expression of IPN002 from viral genomes comprising cither a CAG or CB36 promoter and having an HFF2AL or LF2AH configuration, as determined by, ELISA. Analysis based on normalization to viral genome biodistribution demonstrated that IPN002 expression was increased when driven by the CAG, rather than the CB6 promoter, and that the heavy-linker-light configuration yielded higher antibody expression than the light-linker-heavy configuration. These findings were supported by measurement of IPN002 antibody levels in serum samples, by ePHF ELISA, which showed higher levels of IPN002 expression when driven by the CAG promoter than by the CB6 promoter. Delivery of viral genomes comprising a T2A linker, rather than an F2A linker, yielded greater serum levels of IPN002.

[1353] Anti-IgG immunohistochemistry of brain tissue collected from mice 28 days after treatment with an IV bolus injection of ssVOY101.IPN002 AAV particles comprising viral genomes encoding IPN002, driven by either CAG or CB6 promoters and one of two viral genome configurations (HF.F2AL or LF2AH), showed broad antibody expression across the mouse CNS, but stronger staining in tissue of mice treated with heavy chain-linker-light chain configuration, as compared to light-linker-heavy configuration. Vehicle-treated control animals exhibited low background levels of staining. Expression of IPN002 antibody was observed in a non-cell type specific manner (neurons and astrocytes showed staining) across multiple brain regions, as may be expected when using ubiquitous promoters.

[1354] Immunohistochemistry of brain tissue of mice, treated with an IV bolus injection of ssVOY101.IPN102 AAV particles comprising viral genomes encoding IPN002, driven by CAG or CB6 promoters 28 days prior, for IPN002 (IgG) and astrocytic (S100β) markers showed co-localization of IPN002 with S100β positive cells.

[1355] Comparison of IPN002 antibody expression in the brain tissue of mice treated with TAU_ITR2 (SEQ ID NO: 1991: CAG-HF.F2AL) and TAU_ITR9 (SEQ ID NO: 1998; CAG-LF2AH) by immunohistochemistry for IPN002 (IgG) and astrocytes (S100β) showed IPN002 expression in several brain regions of mice treated with TAU_ITR2 (SEQ ID NO: 1991; CAG-HF.F2AL), but very little expression of IPN002 in the brain tissue of mice treated with TAU_ITR9 (SEQ ID NO: 1998; CAG-LF2AH). Co-localization of IPN002 (IgG) and S100β was identified. Comparison of viral genomes differing only by linker sequence (e.g., CAG HFT2AL vs CAG-HFF2AL) showed similar staining patterns when assessed by immunohistochemistry.

[1356] Comparison of IPN002 antibody expression in the brain tissue of mice treated with TAU_ITR3 (SEQ ID NO: 1992; CB6-HF.F2AL) and TAU_ITR11 (SEQ ID NO: 2000; CB6-LF2AH) by immunohistochemistry for IPN002 (IgG) and astrocytes (S100β) showed IPN002 expression in several brain regions of mice treated with TAU_ITR3 (SEQ ID NO: 1992; CB6-HF.F2AL), but very little expression of IPN002 in the brain tissue of mice treated with TAU_ITR11 (SEQ ID NO: 2000: CB6-LF2AH). Co-localization of IPN002 (IgG) and S100β was identified. Comparison of viral genomes differing only by linker sequence (e.g., CAG HFT2AL vs CAG-HFF2AL) showed similar staining patterns when assessed by immunohistochemistry.

[1357] Comparison of IPN002 antibody expression in the brain tissue of mice treated with TAU_ITR2 (SEQ ID NO: 1991; CAG-HF.F2AL) or TAU_ITR3 (SEQ ID NO: 1992: CB6-HF.F2AL) and TAU_ITR1 (SEQ ID NO: 1990: CAG-HT2AL) or TAU_ITR4 (SEQ ID NO: 1993; CB6-HT2AL) by immunohistochemistry for IPN002 (IgG) and astrocytes (S100β) showed enhanced IPN002 expression when driven by the CAG promoter, as opposed to the CB6 promoter.

[1358] Co-localization studies based on immunofluorescent staining for IPN002 and NeuN in cortex, hippocampus and thalamus of mice treated with heavy-linker-light viral genomes showed IPN002 expression in neuronal cells (NeuN positive cells) driven by the CAG or CB6 promoters.

[1359] Immunohistochemical analysis demonstrated strong IPN002 antibody expression in the CNS of mice treated with viral genomes utilizing a ubiquitous CAG or CB6 promoter. Viral genomes with heavy-linker-light configurations showed increased IPN002 expression as compared to light-linker-heavy configurations.

[1360] Taken together, these data indicate that ubiquitous CAG or CB6 promoters may effectively drive IPN002 expression in CNS tissue of mice, with limited concomitant expression in peripheral tissues (e.g., liver, spleen and muscle). High levels of IPN002 were observed in serum samples of treated mice. Expression of IPN002 in CNS and serum, as measured by PHF ELISA was increased when viral genomes comprising the T2A (rather than F2A) linker were used for IPN002 expression.

### Cell-Type Specific Promoters for IPN002 Expression

[1361] The effect of using cell-type specific promoters GFAP or synapsin for driving expression of IPN002 from two different viral genome configurations (HF.T2AL or LT2AH) was assessed based on measurement of brain distribution, cellular tropism and expression level.

[1362] Viral genomes TAU_ITR6 (SEQ ID NO: 1995; GFAP-HF.T2AL), TAU_ITR13 (SEQ ID NO: 2002: GFAP-LT2AH), TAU_ITR8 (SEQ ID NO: 1997: SYN-HF.T2AL), and TAU_ITR15 (SEQ ID NO: 2004; SYN-LT2AH), were packaged into VOY101 AAV particles and formulated in PBS and 0.001% F-68. Vehicle PBS with 0.001% F-68 was used as a control. An intravenous bolus at a dose of 1.4×10¹³ vg/kg was administered via tail vein to two-month old female C57Bl/6 mice (n=4 per group: 20 total mice). Twenty-eight days later, mice were sacrificed by intracardiac perfusion and tissue samples collected and processed for further analysis. The right half of the brain (including olfactory bulb) and lumbar spinal cord were post-fixed with 4% PFA for immunohistochemistry. The other half of the brain (dissected into hippocampus, cortex, thalamus, brainstem) and cervical and thoracic spinal cord tissues were processed for use in ELISA assays and vector genome quantification by droplet digital PCR normalized to diploid cell number (VG/DC) using the endogenous transferrin receptor gene (TFRC). Peripheral tissues from spleen, liver and skeletal muscle were also collected. Serum samples were collected at two days prior to dosing, and weekly after dosing on days 7, 14, 21 and 28 (terminal day). CSF samples were collected on the terminal day (D28). The study design is shown in Table 106 below.

TABLE 106
ssVOY101.IPN002 GFAP/SYN promoter study design

| | | SEQ | | | | | | End |
|---|---|---|---|---|---|---|---|---|
| Construct | TAU_ITR | ID | | Dose | Dose | | | of |
| Configuration | ID | NO: | μL | (vg/kg) | (vg) | Route | N | study |
| GFAP-HF.T2AL | TAU_ITR6 | 1995 | 100 | 1.4E13 | 2.8E11 | IV | 4 | D 28 |
| GFAP-LT2AH | TAU_ITR13 | 2002 | 100 | 1.4E13 | 2.8E11 | IV | 4 | D 28 |
| SYN-HF.T2AL | TAU_ITR8 | 1997 | 100 | 1.4E13 | 2.8E11 | IV | 4 | D 28 |
| SYN-LT2AH | TAU_ITR15 | 2004 | 100 | 1.4E13 | 2.8E11 | IV | 4 | D 28 |
| PBS with 0.001% F-68 | — | — | 100 | — | — | IV | 4 | D 28 |

[1363] CNS, peripheral and serum samples were analyzed by ePHF ELISA. Brain, olfactory bulb and spinal cord tissues were assessed by immunohistochemistry (NeuN. S100b, Iba), immunofluorescence and/or hematoxylin and eosin staining (H&E). Vector genome quantification using droplet digital PCR (ddPCR) was carried out for samples collected from cortex, hippocampus, anterior olfactory bulb, brain stem, thoracic spinal cord, liver and skeletal muscle. Secondary readouts included daily cage side observations for 1 week after AAV particle administration and weekly body weight measurements. Vector genome quantifications (VG/DC) are shown in the Table 107 below.

TABLE 107
Vector genome quantification of ssVOY101.IPN002 constructs

| | TAU_ITR6 | TAU_ITR13 | TAU_ITR8 | TAU_ITR15 | Vehicle |
|---|---|---|---|---|---|
| | (GFAP-HL) | (GFAP-LH) | (SYN-HL) | (SYN-LH) | (PBS) |
| Hippocampus | 8.7 | 21.2 | 13.4 | 10.1 | 0.0 |
| Cortex | 11.6 | 27.0 | 20.0 | 20.5 | 0.0 |
| Olfactory Bulb | 5.5 | 14.2 | 8.4 | 11.6 | 0.0 |
| Thalamus | 14.7 | 40.3 | 23.4 | 20.2 | 0.0 |
| Brainstem | 13.5 | 39.4 | 25.3 | 16.8 | 0.0 |
| Spinal Cord | 7.7 | 22.6 | 13.0 | 13.5 | 0.0 |
| Liver | 0.7 | 6.4 | 3.5 | 2.4 | 0.0 |
| Skeletal Muscle | 0.1 | 0.4 | 0.2 | 0.3 | 0.0 |
| Spleen | 0.3 | 0.7 | 0.2 | 2.0 | 0.0 |

[1364] Across the six CNS tissues analyzed, three (GFAP-HF.T2AL, SYN-HF.T2AL and SYN-LT2AH) of the four viral genome configurations resulted in similar AAV biodistribution. A slight increase in CNS biodistribution was seen with TAU_ITR13 (SEQ ID NO: 2002: GFAP-LT2AH), however this difference was not found to be statistically significant. In peripheral tissues, all 4 viral genome configurations showed low AAV biodistribution.

[1365] Samples of hippocampus, cortex, olfactory bulb, thalamus, brainstem, spinal cord, liver, spleen, skeletal muscle and serum were subjected to analysis by ePHF ELISA to determine IPN002 expression from each of the four cell-type specific IPN002 viral genomes tested. Control studies were performed to confirm the standard curve and determine that the matrix effect is not observed in this ELISA assay. IPN002 antibody expression was then normalized to the viral genome biodistribution (IPN002/VG). Data are shown in Table 108 below as ng/mg protein (or ng/mL for serum samples) and IPN002/vg (shortened to ab/vg). Data for one mouse were omitted since no vector genomes were detected.

TABLE 108
IPN002 expression from ssVOY101.IPN002 constructs (ng/mg protein or mL)

| | TAU_ITR6 | | TAU_ITR13 | | TAU_ITR8 | | TAU_ITR15 | | Vehicle | |
|---|---|---|---|---|---|---|---|---|---|---|
| | (GFAP-HL) | | (GFAP-LH) | | (SYN-HL) | | (SYN-LH) | | (PBS) | |
| | ng/mg | ab/vg | ng/mg | ab/vg | ng/mg | ab/vg | ng/mg | ab/vg | ng/mg | ab/vg |
| Hippocampus | 47.6 | 5.1 | 20.0 | 0.9 | 40.4 | 3.0 | 11.6 | 0.9 | 0.0 | 0.0 |
| Cortex | 66.5 | 5.5 | 32.8 | 1.3 | 64.9 | 3.3 | 21.0 | 1.1 | 0.0 | 0.0 |
| Olfactory Bulb | 118.3 | 21.5 | 63.4 | 4.7 | 104.0 | 9.2 | 26.9 | 2.7 | 0.0 | 0.0 |
| Thalamus | 32.2 | 2.1 | 26.6 | 0.9 | 69.3 | 3.0 | 20.3 | 1.0 | 0.0 | 0.0 |
| Brainstem | 53.3 | 4.0 | 42.0 | 1.1 | 119.5 | 3.5 | 28.6 | 1.9 | 0.0 | 0.0 |
| Spinal Cord | 29.3 | 3.8 | 24.4 | 1.0 | 123.8 | 7.8 | 27 7 | 2.3 | 0.0 | 0.0 |
| Liver | 8.7 | 12.7 | 18.0 | 3.9 | 0.7 | 0.1 | 0.2 | 0.1 | 0.0 | 0.0 |
| Serum (ng/mL) | 40202.8 | — | 86884.3 | — | 6652.4 | — | 5025.3 | — | 0.0 | 0.0 |
| Spleen | 9.8 | 83.3 | 5.2 | 8.7 | 0.7 | 3.6 | 0 | 0 | 0.0 | 0.0 |
| Skeletal muscle | 8.3 | — | 7.5 | — | 0.9 | — | 0.3 | — | 0.0 | 0.0 |

[1366] IPN002 expression was limited in the peripheral tissues in samples collected from mice treated with each of the four viral genomes, as compared to expression in CNS tissues. In all CNS tissues tested, the heavy-linker-light viral genome configuration (TAU_ITR6 and TAU_ITR8) yielded greater IPN002 expression than the light-linker-heavy viral genome configuration (TAU_ITR13 and TAU_ITR15). This result is consistent with the findings of the study comparing ubiquitous CAG and CB6 promoters.

[1367] Comparison of IPN002 antibody expression in the brain tissue of mice treated with TAU_ITR6 (SEQ ID NO: 1995; GFAP-HF.T2AL) and TAU_ITR13 (SEQ ID NO: 2002; GFAP-LT2AH) by immunohistochemistry for IPN002 (IgG) and astrocytes (S100β) showed IPN002 expression in several brain regions of mice treated with TAU_ITR6 (SEQ ID NO: 1995; GFAP-HF.T2AL), but very little expression of IPN002 in the brain tissue of mice treated with TAU_ITR13 (SEQ ID NO: 2002; GFAP-LT2AH). Co-localization of IPN002 (IgG) and S100β was identified.

[1368] Immunohistochemical staining for IPN002 (IgG) and S100β in brain tissue of mice treated with TAU_ITR8 (SEQ ID NO: 1997; SYN-HF.T2AL), and TAU_ITR15 (SEQ ID NO: 2004; SYN-LT2AH), showed IPN002 expression in several brain regions of mice treated with TAU_ITR8 (SEQ ID NO: 1997; SYN-HF.T2AL), with IPN002 predominantly expressed in cells with neuronal morphology in the hippocampus, cortex and thalamus. Limited IPN002 expression was evident in brain tissue of mice treated with TAU_ITR15 (SEQ ID NO: 2004; SYN-LT2AH). No co-localization of IPN002 and S100β in these samples was identified.

[1369] Immunofluorescence staining of samples collected from mice treated with each of the four vectors confirmed findings that IPN002 expression was readily detected in the tissue of mice treated with TAU_ITR6 (SEQ ID NO: 1995; GFAP-HF.T2AL) or TAU_ITR8 (SEQ ID NO: 1997; SYN-HF.T2AL), but not in tissue of mice treated with TAU_ITR13 (SEQ ID NO: 2002; GFAP-LT2AH) or TAU_ITR15 (SEQ ID NO: 2004; SYN-LT2AH), indicating the importance of a heavy-linker-light viral genome when matched with a cell-type specific promoter such as GFAP or synapsin.

[1370] Co-localization studies based on immunofluorescent staining for IPN002 and NeuN showed IPN002 expression in neuronal cells in the tissue of mice treated with heavy-linker-light viral genomes driven by the synapsin promoter. IPN002 expressed from heavy-linker-light viral genomes driven by the GFAP promoter was present in cells with astrocytic morphology.

[1371] Immunohistochemical analysis demonstrated strong and appropriate cell specificity of GFAP and synapsin promoters in the brain tissue of treated mice. Further, immunohistochemical results were consistent with those observed by ELISA assay.

[1372] Taken together, these data indicate that GFAP and synapsin promoters may effectively drive IPN002 expression in brain tissue of mice and support the previous finding that use of the vector genome configuration HF.T2AL can lead to approximately 2-fold greater IPN002 expression than configuration LT2AH.

### Cell-Type Specific Promoters and 72A or F2A Linkers for IPN002 Expression

[1373] In a second study, the effect of using cell-type specific promoters GFAP or synapsin for driving expression of IPN002 from two different viral genome configurations (HF.F2AL or LF2AH) was assessed based on measurement of brain distribution, cellular tropism and antibody expression level. Data from this study further enabled comparison of the effects of T2A and F2A cleavage sites on IPN002 antibody expression, distribution and tropism.

[1374] Viral genomes TAU_ITR5 (SEQ ID NO: 1994; GFAP-HF.F2AL), TAU_ITR12 (SEQ ID NO: 2001; GFAP-LF2AH), TAU_ITR7 (SEQ ID NO: 1996; SYN-HF.F2AL), and TAU_ITR14 (SEQ ID NO: 2003; SYN-LF2AH), were packaged, single stranded, into VOY101 AAV particles and formulated in PBS and 0.001% F-68. Vehicle PBS with 0.001% F-68 was used as a control. An intravenous bolus at a dose of 1.4×10¹³ vg/kg was administered via tail vein to two-month old female C57Bl/6 mice (n=4 per group; 20 total mice). Twenty-eight days later, mice were sacrificed by intracardiac perfusion and tissue samples collected and processed for further analysis. The right half of the brain (including olfactory bulb) and lumbar spinal cord were post-fixed with 4% PFA for immunohistochemistry. The other half of the brain (dissected into hippocampus, cortex, thalamus, brainstem) and cervical and thoracic spinal cord tissues were processed for use in ELISA assays and vector genome quantification by droplet digital PCR normalized to diploid cell number (VG/DC) using the endogenous transferrin receptor gene (TFRC). Peripheral tissues from spleen, liver and skeletal muscle were also collected. Serum samples were collected at two days prior to dosing, and weekly after dosing on days 7, 14, 21 and 28 (terminal day). CSF samples were collected on the terminal day (D28). The study design is shown in Table 109 below.

TABLE 109
ssVOY101.1PN002 GFAP/SYN promoter and linker study design

| | | SEQ | | | | | | End |
|---|---|---|---|---|---|---|---|---|
| Construct | TAU_ITR | ID | | Dose | Dose | | | of |
| Configuration | ID | NO: | μL | (vg/kg) | (vg) | Route | N | study |
| GFAP-HF.F2AL | TAU_ITR5 | 1994 | 100 | 1.4E13 | 2.8E11 | IV | 4 | D 28 |
| GFAP-LF2AH | TAU_ITR12 | 2001 | 100 | 1.4E13 | 2.8E11 | IV | 4 | D 28 |
| SYN-HF.F2AL | TAU_ITR7 | 1996 | 100 | 1.4E13 | 2.8E11 | IV | 4 | D 28 |
| SYN-LF2AH | TAU_ITR14 | 2003 | 100 | 1.4E13 | 2.8E11 | IV | 4 | D 28 |
| PBS with 0.001% F-68 | — | — | 100 | — | — | IV | 4 | D 28 |

[1375] CNS, peripheral and serum samples were analyzed by ePHF ELISA. Brain, olfactory bulb and spinal cord tissues were assessed by immunohistochemistry (NeuN, S100β, IgG), immunofluorescence and/or hematoxylin and eosin staining (H&E). Vector genome quantification using droplet digital PCR (ddPCR) was carried out for samples collected from cortex, hippocampus, anterior olfactory bulb, brain stem, thoracic spinal cord, liver and skeletal muscle. Secondary readouts included daily cage side observations for 1 week after AAV particle administration and weekly body weight measurements. Vector genome quantifications (VG/DC) are shown in the Table 110 below.

TABLE 110
Vector genome quantification of ssVOY101.IPN002 constructs

| | TAU_ITR5 | TAU_ITR12 | TAU_ITR7 | TAU_ITR14 | Vehicle |
|---|---|---|---|---|---|
| | (GFAP-HL) | (GFAP-LH) | (SYN-HL) | (SYN-LH) | (PBS) |
| Hippocampus | 8.4 | 11.3 | 14.7 | 17.0 | 0.0 |
| Cortex | 17.7 | 22.8 | 29.2 | 32.1 | 0.0 |
| Olfactory Bulb | 5.8 | 9.8 | 11.8 | 13.7 | 0.0 |
| Thalamus | 20.1 | 25.9 | 31.8 | 28.5 | 0.0 |
| Brainstem | 21.4 | 22.1 | 32.1 | 36.8 | 0.0 |
| Spinal Cord | 12.0 | 15.5 | 18.9 | 19.1 | 0.0 |
| Liver | 1.8 | 1.4 | 1.1 | 4.9 | 0.0 |
| Skeletal Muscle | 0.6 | 0.9 | 0.8 | 1.0 | 0.0 |
| Spleen | 0.3 | 0.4 | 0.6 | 1.2 | 0.0 |

[1376] Across the six CNS tissues analyzed, treatment with each of the four viral genome configurations resulted in similar AAV biodistribution, with no statistically significant difference between treatment groups. In peripheral tissues, all 4 viral genome configurations showed low AAV biodistribution, though delivery of TAU_ITR14 (SEQ ID NO: 2003; SYN-LF2AH) exhibited a slight, statistically non-significant trend toward enhanced expression in liver and skeletal muscle. IV administration of each of the four viral genomes tested resulted in greater AAV biodistribution in CNS tissues as compared to peripheral tissues.

[1377] Samples of hippocampus, cortex, olfactory bulb, thalamus, brainstem, spinal cord, liver, spleen, skeletal muscle and serum were subjected to analysis by ePHF ELISA to determine IPN002 expression from each of the four cell-type specific IPN002 viral genomes tested. Control studies were performed to confirm the standard curve and determine that the matrix effect is not observed in this ELISA assay. IPN002 antibody expression was then normalized to the viral genome biodistribution (IPN002/VG). Data are shown in Table 111 below as ng/mg protein (or ng/mL for serum samples) and IPN002/vg (shortened to ab/vg).

TABLE 111
IPN002 expression from ssVOY101.IPN002 constructs (ng/mg protein or inL)

| | TAU_ITR5 | | TAU_ITR12 | | TAU_ITR7 | | TAU_ITR14 | | Vehicle | |
|---|---|---|---|---|---|---|---|---|---|---|
| | (GFAP-HL) | | (GFAP-LH) | | (SYN-HL) | | (SYN-LH) | | (PBS) | |
| | ng/mg | ab/vg | ng/mg | ab/vg | ng/mg | ab/vg | ng/mg | ab/vg | ng/mg | ab/vg |
| Hippocampus | 1.6 | 0.2 | 9.8 | 0.8 | 20.5 | 1.5 | 17.5 | 1.1 | 0.0 | 0.0 |
| Cortex | 1.8 | 0.1 | 8.0 | 0.4 | 5.7 | 0.2 | 7.4 | 0.2 | 0.0 | 0.0 |
| Olfactory Bulb | 1.8 | 0.2 | 10.4 | 0.8 | 14.9 | 1.1 | 19.6 | 1.5 | 0.0 | 0.0 |
| Thalamus | 1.4 | 0.0 | 9.5 | 0.3 | 10.7 | 0.3 | 19.9 | 0.7 | 0.0 | 0.0 |
| Brainstem | 2.7 | 0.1 | 11.3 | 0.5 | 16.7 | 0.6 | 20.1 | 0.6 | 0.0 | 0.0 |
| Spinal Cord | 4.2 | 0.3 | 7.0 | 0.4 | 20.7 | 1.2 | 12.6 | 0.7 | 0.0 | 0.0 |
| Liver | 1.1 | 1.0 | 2.0 | 2.2 | 0.0 | 0.0 | 0.2 | 0.0 | 0.0 | 0.0 |
| Serum (ng/mL) | 4563.8 | — | 28318 | — | 994.2 | — | 2445.4 | — | 0.0 | 0.0 |
| Spleen | 1.9 | 2.4 | 6.0 | 5.9 | 0.0 | 0.0 | 0.0 | 0.0 | 0.0 | 0.0 |
| Skeletal muscle | 3.0 | 10.6 | 6.5 | 15.6 | 0.2 | 0.3 | 0.2 | 0.3 | 0.0 | 0.0 |

[1378] IPN002 expression was evident in all CNS tissues tested and limited expression was seen in the peripheral tissues of mice treated with each of the four viral genomes. In this study, there was no clear pattern for enhanced antibody expression with one particular viral genome configuration as compared to the others, as was seen in the prior experiment using a T2A cleavage site.

[1379] In a direct comparison of viral genomes comprising cell-specific promotors and either a T2A or F2A linker, eight viral genomes were tested (TAU_ITR6 (SEQ ID NO: 1995; GFAP-HF.T2AL), TAU_ITR13 (SEQ ID NO: 2002; GFAP-LT2AH) TAU_ITR8 (SEQ ID NO: 1997; SYN-HF.T2AL), and TAU_ITR1 (SEQ ID NO: 2004 SYN-LT2AH), TAU_ITR5 (SEQ ID NO: 1994; GFAP-HF.F2AL) TAU_ITR12 (SEQ ID NO: 2001; GFAP-LF2AH) TAU_ITR7 (SEQ ID NO: 1996m SYN-HF.F2AL), and TAU_ITR14 (SEQ ID NO: 2003. SYN-LF2AH)) by IgG (Table 112) and ePHF ELISA (Table 113) for IPN002 antibody expression (ng/mg). Table 114 shows IPN002 antibody expression normalized to viral genome biodistribution (IPN002/VG)

TABLE 112
IPN002 expression from ssVOY101.IPN002 constructs (ng/mg protein)

| | GFAP-HL | | GFAP-LH | | SYN-HL |
|---|---|---|---|---|---|
| | T2A | F2A | T2A | F2A | T2A |
| | (TAU_ITR6) | (TAU_ITR5) | (TAU_ITR13) | (TAU_ITR12) | (TAU_ITR8) |
| SEQ ID NO: | 1995 | 1994 | 2002 | 2001 | 1997 |
| Hippocampus | 90.5 | 16.0 | 128.5 | 22.4 | 98.2 |
| Cortex | 112.0 | 15.8 | 67.5 | 24.8 | 71.5 |
| Olfactory | 150.7 | 30.1 | 123.9 | 58.0 | 161.1 |
| Bulb | | | | | |

| | SYN-HL | SYN-LH | | Vehicle | |
|---|---|---|---|---|---|
| | F2A | T2A | F2A | (PBS) | |
| | (TAU_ITR7) | (TAU_ITR15) | (TAU_ITR14) | T2A | F2A |
| SEQ ID NO: | 1996 | 2004 | 2003 | — | — |
| Hippocampus | 30.3 | 66.5 | 28.1 | 0.0 | 0.0 |
| Cortex | 17.6 | 46.5 | 26.3 | 10.9 | 4.3 |
| Olfactory | 48.5 | 17.2 | 51.3 | 0.0 | 7.9 |
| Bulb | | | | | |

TABLE 113
IPN002 expression from ssVOY101.IPN002 constructs (ng/mg protein)

| | GFAP-HL | | GFAP-LH | | SYN-HL |
|---|---|---|---|---|---|
| | T2A | F2A | T2A | F2A | T2A |
| | (TAU_ITR6) | (TAU_ITR5) | (TAU_ITR13) | (TAU_ITR12) | (TAU_ITR8) |
| SEQ ID NO: | 1995 | 1994 | 2002 | 2001 | 1997 |
| Hippocampus | 47.6 | 1.6 | 20.0 | 9.8 | 30.3 |
| Conex | 66.5 | 1.8 | 32.9 | 8.0 | 48.7 |
| Olfactory | 118.3 | 1.8 | 63.4 | 10.4 | 78.0 |
| Bulb | | | | | |
| Thalamus | 32.2 | 1.4 | 26.6 | 9.5 | 60.0 |
| Brainstem | 53.3 | 2.7 | 42.0 | 11.3 | 89.6 |
| Spinal Cord | 29.3 | 4.2 | 24.2 | 1.5 | 92.9 |
| Serum | 39769.8 | 4563.8 | 94211.6 | 28318 | 5861.8 |
| (ng/mL) | | | | | |

| | SYN-HL | SYN-LH | | Vehicle | |
|---|---|---|---|---|---|
| | F2A | T2A | F2A | (PBS) | |
| | (TAU_ITR7) | (TAU_ITR15) | (TAU_ITR14) | T2A | F2A |
| SEQ ID NO: | 1996 | 2004 | 2003 | — | — |
| Hippocampus | 20.5 | 11.6 | 17.5 | 0.0 | 0.0 |
| Conex | 5.7 | 21.0 | 7.4 | 0.0 | 0.0 |
| Olfactory | 14.9 | 26.9 | 19.6 | 0.0 | 0.0 |
| Bulb | | | | | |
| Thalamus | 10.7 | 20.3 | 19.9 | 0.0 | 0.0 |
| Brainstem | 16.7 | 28.6 | 20.1 | 0.0 | 0.0 |
| Spinal Cord | 20.7 | 27.7 | 12.6 | 0.0 | 0.0 |
| Serum | 994.2 | 456.3.3 | 2445.4 | 0.0 | 0.0 |
| (ng/mL) | | | | | |

TABLE 114
Normalized IPN002 expression from ssVOY101.IPN002 constructs

| | GFAP-HL | | GFAP-LH | | SYN-HL |
|---|---|---|---|---|---|
| | T2A | F2A | T2A | F2A | T2A |
| | (TAU_ITR6) | (TAU_ITR5) | (TAU_ITR13) | (TAU_ITR12) | (TAU_ITR8) |
| SEQ ID NO: | 1995 | 1994 | 2002 | 2001 | 1997 |
| Hippocampus | 5.1 | 0.2 | 0.9 | 0.8 | 3.0 |
| Cortex | 5.5 | 0.1 | 1.3 | 0.4 | 3.7 |
| Olfactory | 21.5 | 0.2 | 4.7 | 0.8 | 9.2 |
| Bulb | | | | | |
| Thalamus | 2.1 | 0.0 | 0.9 | 0.3 | 2.4 |
| Brainstem | 4.0 | 0.1 | 1.1 | 0.5 | 3.5 |
| Spinal Cord | 3.8 | 0.3 | 1.0 | 0.4 | 5.9 |

| | SYN-HL | SYN-LH | | Vehicle | |
|---|---|---|---|---|---|
| | F2A | T2A | F2A | (PBS) | |
| | (TAU_ITR7) | (TAU_ITR15) | (TAU_ITR14) | T2A | F2A |
| SEQ ID NO: | 1996 | 2004 | 2003 | — | — |
| Hippocampus | 1.5 | 0.9 | 1.1 | 0.0 | 0.0 |
| Cortex | 0.2 | 1.1 | 0.2 | 0.0 | 0.0 |
| Olfactory | 1.1 | 2.7 | 1.5 | 0.0 | 0.0 |
| Bulb | | | | | |
| Thalamus | 0.3 | 1.0 | 0.7 | 0.0 | 0.0 |
| Brainstem | 0.6 | 1.9 | 0.6 | 0.0 | 0.0 |
| Spinal Cord | 1.2 | 1.0 | 0.7 | 0.0 | 0.0 |

[1380] In general, use of the T2A linker, rather than the F2A, led to higher expression of IPN002 from viral genomes comprising either a GFAP or synapsin promoter and having an HFF2AL or LF2AH configuration, as determined by ELISA. Serum levels of IPN002 antibody were greater with use of the GFAP promoter rather than the synapsin promoter and were greater when the T2A linker, rather than F2A linker, was used.

[1381] Comparison of IPN002 antibody expression in the brain tissue of mice treated with TAU_ITR5 (SEQ ID NO: 1994; GFAP-HF.F2AL) and TAU_ITR12 (SEQ ID NO: 2001; GFAP-LF2AH) by immunohistochemistry for IPN002 (IgG) and astrocytes (S100β) showed IPN002 expression in several brain regions of mice treated with TAU_ITR5 (SEQ ID NO: 1994; GFAP-HF.F2AL), but very little expression of IPN002 in the brain tissue of mice treated with TAU_ITR12 (SEQ ID NO: 2001; GFAP-LF2AH). Co-localization of IPN002 (IgG) and S100β was identified. These findings are very similar to those seen with the use of a T2A linker, above.

[1382] Immunohistochemical staining for IPN002 (IgG) and S100β in brain tissue of mice treated with TAU_ITR7 (SEQ ID NO: 1996; SYN-HF.F2AL), and TAU_ITR14 (SEQ ID NO: 2003; SYN-LF2AH), showed IPN002 expression in several brain regions of mice treated with TAU_ITR7 (SEQ ID NO: 1996; SYN-HF.F2AL), with IPN002 predominantly expressed in cells with neuronal morphology in the hippocampus, cortex and thalamus. Limited IPN002 expression was evident in brain tissue of mice treated with TAU_ITR14 (SEQ ID NO: 2003; SYN-LF2AH). No co-localization of IPN002 and S100β in these samples was identified. These findings are very similar to those seen with the use of a T2A linker, above.

[1383] Co-localization studies based on immunofluorescent staining for IPN002 and NeuN in cortex, hippocampus (CA subfields) and thalamus of mice treated with heavy-linker-light viral genomes showed IPN002 expression in neuronal cells driven by the synapsin promoter. IPN002 expressed from heavy-linker-light viral genomes driven by the GFAP promoter was present in cells with astrocytic morphology.

[1384] Immunohistochemical analysis demonstrated strong and appropriate cell specificity of GFAP and synapsin promoters in the brain tissue of treated mice. Viral genomes with heavy-linker-light configurations showed a trend toward increased IPN002 expression as compared to light-linker-heavy configurations.

[1385] Taken together, these data indicate that GFAP and synapsin promoters may effectively drive IPN002 expression in CNS tissue of mice, with limited concomitant expression in peripheral tissues (e.g., liver, spleen and muscle). Cell-type specific promoters (GFAP or synapsin) resulted in IPN002 expression levels comparable to those seen when expression was driven by ubiquitous promoters. High levels of IPN002 were observed in serum samples, particularly in serum of mice treated with ssVOY101.IPN002 using the GFAP promoter, as opposed to synapsin promoter. Expression of IPN002 in CNS and serum, as measured by PHF ELISA was increased when viral genomes comprising the T2A (rather than F2A) linker were used for IPN002 expression.

### Testing of IPN002 Viral Genomes in Primary Neurons

[1386] Primary neuronal cultures were used for testing cell specificity, transduction efficiency and expression of IPN002 using the viral genomes outlined above, encapsulated in Voy101. For preparation of primary cultures, brain tissue was removed from CD1 mice at embryonic day 17 (E17) and meninges removed. The hippocampi and cortices were dissected out and digested with papain. Cells were counted and plated (17,500 cells/well) accordingly.

[1387] On the 4^{th} day in vitro (DIV4) cells were transduced with AAV particles (3E6, 1E6, 3.33E5, 1.11E5, 3.7E4 VG/cell) comprising the IPN002 encoding viral genomes or Voy101-GFP as a positive control. Untransduced neurons served as the negative control.

[1388] Constructs shown in the table below (Table 115), with IPN002 expression driven by ubiquitous or cell-type specific promoters were tested.

TABLE 115
IPN002 Constructs for in vitro testing in primary cultures

| | SEQ | |
|---|---|---|
| Construct ID | ID NO: | Configuration |
| TAU_ITR1 | 1990 | CAG-IPN002-HFT2AL |
| TAU_ITR10 | 1999 | CAG-IPN002-LT2AH |
| TAU_ITR2 | 1991 | CAG-IPN002-HFF2AL |
| TAU_ITR9 | 1998 | CAG-IPN002-LF2AH |
| TAU_ITR4 | 1993 | CBA-IPN002-HFT2AL |
| TAU_ITR87 | 2137 | CBA-IPN002-LT2AH |
| TAU_ITR11 | 2000 | CBA-IPN002-LF2AH |
| TAU_ITR3 | 1992 | CBA-IPN002-HFF2AL |
| TAU_ITR5 | 1994 | GFAP-IPN002-HFF2AL |
| TAU_ITR12 | 2001 | GFAP-IPN002-LF2AH |
| TAU_ITR6 | 1995 | GFAP-IPN002-HFT2AL |
| TAU_ITR13 | 2002 | GFAP-IPN002-LT2AH |
| TAU_ITR7 | 1996 | SYN-IPN002-HFF2AL |
| TAU_ITR14 | 2003 | SYN-IPN002-LF2AH |
| TAU_ITR8 | 1997 | SYN-IPN002-HFT2AL |
| TAU_ITR15 | 2004 | SYN-IPN002-LT2AH |

[1389] Cultures were confirmed to be approximately 60-70% neuronal as measured by NeuN staining, with 5-10% of cells staining positive for GFAP (astrocytes).

[1390] On DIV7, the supernatant was collected for analysis by mouse IgG ELISA and the cells fixed with (4% PFA and 4% sucrose in PBS for 15 min, followed by 3 PBS washes) for immunocytochemical experiments. Cells were stained by first blocking with 3% BSA and 0.05% saponin in PBS for 1 hour at room temperature. Primary antibodies for IgG, GFAP, and NeuN were incubated overnight at 4 C in blocking buffer then washed with four PBS washes. Secondary antibodies (1:1000 in blocking buffer) were incubated for 1 hour at room temperature then followed by four washes in PBS. Hoecsht was applied at 1:1000 in PBS at room temperature for 15 min to stain nuclei, then washed four times with PBS. Imaging was done on a BioTek Cytation 5.

[1391] As expected, cell-type specific promoters drove expression of IPN002 in the appropriate cell type, meaning that the synapsin promoter drove expression in neuronal cells while the GFAP promoter drove expression in astrocytes. These results are consistent with those of the in vivo studies described above.

[1392] The supernatant collected on DIV7 (3 days after transduction) was used with IgG1 mouse uncoated ELISA kit (ThermoFisher) for quantification of antibody/mL (ms IgG ng/mL). Of the viral genomes tested wherein a CAG promoter drove expression of IPN002, use of configuration CAG-IPN002-HFT2AL (TAU_ITR1; SEQ ID NO: 1990) resulted in the greatest expression. Similarly, testing of viral genomes wherein a CBA promoter drove expression of IPN002, use of configuration CBA-IPN002-HFT2AL (TAU_ITR4; SEQ ID NO: 1993) resulted in the greatest expression. These ELISA results were consistent with quantification of the immunocytochemistry for number of cells expressing IPN002/total number of cells. Direct comparison of configurations HFT2AL and LT2AH driven by CAG and CBA promoters, by ELISA and quantification of immunocytochemistry demonstrated the CAG promoter to drive greater expression of IPN002 in cells in primary culture and supported the findings that the HFT2AL configuration resulted in greater expression. Analysis of viral genome constructs wherein IPN002 expression is driven by a synapsin promoter by ELISA and quantification of immunocytochemistry again indicated enhanced expression from the HFT2AL configuration, as compared to LT2AH, HFF2AL and LF2AH configurations.

[1393] Studies in primary neuronal cultures supported the findings wherein CAG promoters, heavy-linker-light configurations and T2A linkers each contributed to more robust expression of IPN002 as compared to their correlate, i.e., CB6 promoters, light-linker-heavy configurations and F2A linkers, respectively.

### Testing of PT3 Viral Genomes in Primary Culture

[1394] Viral genomes encoding anti-tau antibody PT3 with configuration HFT2AL and one of CAG, CBA, GFAP or synapsin promoters were tested in primary neuronal cultures for testing cell specificity, transduction efficiency and expression of PT3. The viral genome constructs shown in Table 116 below were encapsulated in AAV Voy101 and used to transduce primary neuronal cultures as described above.

TABLE 116
PT3 Constructs for in vitro testing in primary cultures

| | SEQ | |
|---|---|---|
| Construct ID | ID NO: | Configuration |
| TAU_ITR111 | 2161 | CBA-PT3-HFT2AL |
| TAU_ITR112 | 2162 | CAG-PT3-HFT2AL |
| TAU_ITR113 | 2163 | GFAP-PT3-HFT2AL |
| TAU_ITR114 | 2164 | SYN-PT3-HFT2AL |

[1395] As expected, cell-type specific promoters drove expression of PT3 in the appropriate cell type, meaning that the synapsin promoter drove expression in neuronal cells while the GFAP promoter drove expression in astrocytes.

[1396] Studies of viral genomes expressing PT3 demonstrated that IV dosing using a blood brain barrier penetrant capsid (e.g., VOY101) resulted in widespread vector genome biodistribution and expression of vectorized anti-tau antibody in mouse CNS, using each of the constructs tested. The incorporation of cell-type specific promoters targeted the antibody expression to a cellular subgroup. Use of a synapsin promoter was shown to drive PT3 expression in neuronal cells, while use of a GFAP promoter was shown to drive PT3 expression in astrocytes.

[1397] Antibody expression levels were shown to be influenced by the promoter choice and by the configuration of the viral genome. Heavy-linker-light configurations yielded greater PT3 antibody expression than light-heavy-linker configurations. Overall, these studies have shown that IV dosing of ssAAVVOY101.PT3 can effectively deliver vectorized antibody to the CNS of mice for both ubiquitous and cell-type specific antibody expression.

### Viral Genomes for PHF1 Antibody Expression

[1398] Five viral genome variants were prepared to assess ITR to ITR and payload configuration effects on PHF1 antibody expression. Promoters, introns and heavy and light chain 5′ to 3′ order were assessed. Constructs tested included TAU_ITR86 (PHF-1 LF2AH), TAU_ITR85 (PHF-1 HF.F2AL), and TAU_ITR70 (PHF-1 LF2AH).

[1399] ExpiCHO cells were transfected with each of the PHF1 antibody expressing viral genome constructs to generate an antibody-rich supernatant. Samples of supernatant were prepared for analysis by Western blot, as described in Example 6 above. The resultant Western blots were reviewed for the presence of heavy (50 kD) and light chain (25 kD) species. Two of the three constructs yielded bands representing both heavy and light chain species. TAU_ITR85 gave no evidence of antibody expression, lacking bands at both 50 kD and 25 kD. TAU_ITR70 showed the greatest antibody expression, followed by TAU_ITR86, based on Western blot analysis.

[1400] Direct comparison of TAU_ITR70 and TAU_ITR86, comprising different intronic regions, indicated greater antibody expression with the use of human beta-globin intronic segments (TAU_ITR70) as compared to an SV40 intron (TAU_ITR86).

[1401] Two ELISA assays (PHF-1 IgG1 and anti-eTau) were also performed to determine antibody production from each of the three constructs. Results are shown in Table 17 below.

TABLE 117
ELISA for analysis of antibody production

| | PHF-1 IgG1 Elisa: | anti-eTau Elisa: |
|---|---|---|
| Construct Name | ng/ml | ng/ml |
| TAU_ITR86 | 15273.0 | 1526.5 |
| TAU_ITR85 | 191.0 | 18.8 |
| TAU_ITR70 | 25678.0 | 4285.0 |

### Example 9. rAAV Production of Anti-Tau Antibodies Using HEK293T Cells

[1402] HEK293 cells were transfected with three vectors simultaneously: anti-tau antibody encoding viral genomes; vectors expressing rep and cap genes; and a helper vector to generate rAAV9 products. Vector production was the greatest (highest AAV titer vg/mL) when using MC1LF2AH (TAU_ITR79) and MC1HF.F2AL (TAU_ITR72) viral genomes. These two formats were then utilized to generate rAAV9 particles encoding anti-tau antibodies PHF1 and IPN002.

TABLE 118
Vector production in HEK293T cells (vg/mL)

| | 1st | 2nd | Average |
|---|---|---|---|
| AAV9.LIRESH | 2.23E+10 | 3.00E+10 | 2.62E+10 |
| AAV9.LF2AH | 9.12E+10 | 2.69E+11 | 1.80E+11 |
| AAV9.HF.F2AL | 2.32E+10 | 1.24E+11 | 7.35E+10 |
| AAV9.LF.F2AH | 2.00E+10 | 1.15E+10 | 1.57E+10 |
| AAV9.HF.P2AL | 1.70E+10 | 2.63E+10 | 2.16E+10 |

### Example 10. Construction of Viral Genomes for Expression of Antibody Fragments

[1403] Full-length antibodies have certain disadvantages in terms of incorporation into AAV viral genomes and particles, immunogenicity and blood brain barrier penetration, that can be overcome by encoding an antibody fragment instead of the full-length antibody. Antibody fragments (e.g., F(ab′)2, Fab and scFv) can be advantageous in several ways. While retaining their antigen-binding capacity, the smaller size of antibody fragments may allow for better tissue penetration and/or have increased solubility. Use of antibody fragments may also provide the opportunity to engage epitopes which may be hidden. As compared to fill-length antibodies, antibody fragments may have reduced immunogenicity and effector effects. Further, antibody fragments are typically straightforward to modify or engineer to one with skill in the art and may be more amenable to incorporation in AAV viral genomes and particles.

[1404] Antibody fragments were designed for incorporation into viral genomes and AAV particles. F(ab′)2, Fab and scFv fragments were designed. Fragments were sequence confirmed and tested in vitro for expression patterns. Western blotting was used for semi-quantitation, followed by ePHF ELISA and wild-type tau441 ELISA for further characterization. Based on these results, lead fragment constructs were selected, incorporated into viral genome constructs and packaged into AAV particles, then tested in vivo.

### Viral Genomes for the Expression of PHF1 Fragments

[1405] Four constructs were generated for the expression of PHF-1 single chain variable fragments (scFv). Two viral genome configurations (light-linker-heavy and heavy-linker-light) and human growth hormone-2 (Signal1; SEQ ID NO: 2106) and PHF1 antibody heavy chain (Ab2; SEQ ID NO: 1741) signal sequences were tested for effects on the expression of PHF1 scFv and evaluated by western blot analysis as described in Example 6. These viral genomes encoded a His tag (TAG4; SEQ ID NO: 2121) which was used for labeling with anti-his HRP (1:5000 dilution) in Western blot experiments.

[1406] Each of the 4 constructs (TAU_ITR42 (LG4S3H-hGH2sig), TAU_ITR44 (LG4S3H-VLsig), TAU_ITR38 (HG4S3L-hGH2sig) and TAU_ITR40 (HG4S3L-VHsig) was transfected into Expi293 and ExpiCHO cells. Supernatants were collected and analyzed by Western blot. Four replicates were run for each construct. TAU_ITR42 and TAU_ITR40 each had one sample that showed no antibody expression based on Western blot analysis, while each of the other samples yielded a single prominent band indicating scFv expression. TAU_ITR38 and TAU_ITR40 (HG4S3L configuration) showed slightly elevated scFv expression, based on Western blot results.

[1407] Supernatants from transfected ExpiCHO and Expi293 cells were also tested for binding affinity to PHF tau, using the ePHF tau ELISA as described in Example 4. An anti-His HRP (1:5000) was used for detection. Untransfected ExpiCHO and Expi293 supernatants were used as control. OD450 data are shown below, in Table 119.

TABLE 119
PHF Tau ELISA: OD450 data

| | Expi293 | | | | ExpiCHO |
|---|---|---|---|---|---|
| dilution | TAU_ITR42 | TAU_ITR44 | TAU_ITR38 | TAU_ITR40 | TAU_ITR42 |
| 1 | 1.4 | 1.5 | 2.9 | 3.0 | 1.3 |
| 4 | 0.5 | 0.6 | 2.7 | 2.7 | 0.7 |
| 16 | 0.3 | 0.3 | 2.1 | 2.1 | 0.4 |
| 64 | 0.2 | 0.2 | 1.6 | 1.5 | 0.2 |
| 256 | 0.1 | 0.1 | 0.8 | 0.7 | 0.1 |
| 1024 | 0.1 | 0.1 | 0.4 | 0.3 | 0.1 |
| 4096 | 0.1 | 0.0 | 0.1 | 0.1 | 0.1 |
| 16384 | 0.1 | 0.0 | 0.1 | 0.1 | 0.0 |
| 65536 | 0.0 | 0.0 | 0.0 | 0.0 | 0.0 |
| 262144 | 0.0 | 0.0 | 0.0 | 0.0 | 0.0 |
| 1048576 | 0.0 | 0.0 | 0.0 | 0.0 | 0.0 |
| 4194304 | 0.1 | 0.0 | 0.0 | 0.0 | 0.0 |

| | | | | Controls | |
|---|---|---|---|---|---|
| | ExpiCHO | | | Expi293 | ExpiCHO |
| dilution | TAU_ITR44 | TAU_ITR38 | TAU_ITR40 | CTL | CTL |
| 1 | 1.4 | 3.1 | 3.0 | 0.0 | 0.1 |
| 4 | 0.7 | 2.9 | 2.8 | 0.0 | 0.0 |
| 16 | 0.4 | 2.6 | 2.5 | 0.0 | 0.0 |
| 64 | 0.3 | 2.1 | 2.0 | 0.0 | 0.0 |
| 256 | 0.1 | 1.4 | 1.3 | 0.0 | 0.0 |
| 1024 | 0.1 | 0.6 | 0.6 | 0.0 | 0.0 |
| 4096 | 0.1 | 0.2 | 0.3 | 0.0 | 0.0 |
| 16384 | 0.0 | 0.1 | 0.1 | 0.0 | 0.0 |
| 65536 | 0.0 | 0.1 | 0.1 | | |
| 262144 | 0.0 | 0.0 | 0.0 | | |
| 1048576 | 0.0 | 0.0 | 0.0 | | |
| 4194304 | 0.0 | 0.0 | 0.0 | | |

[1408] PHF1 scFvs generated from TAU_ITR38 and TAU_ITR40 viral genome constructs (both heavy-linker-light configuration) showed greater affinity for ePHF tau than scFvs generated from TAU_ITR42 and TAU_ITR44 viral genome constructs (both light-linker-heavy configuration), based on ePHF tau ELISA assay.

### Viral Genomes for the Expression of IPN002 Fragments

[1409] Eighteen viral genomes were designed for the expression of anti-tau antibody IPN002 Fab, F(ab′)2, extended Fab, or scFv fragments, with components as outlined in Table 120 below. One of two promoters, CAG or CBA, was selected. Three configurations were tested (HF.T2AL, LT2AH, scFv), using each of the two promoters. For F(ab′)2 constructs one of two hinge components was also introduced. ScFv constructs alternated heavy chain or light chain first when read 5′ to 3′ and relied upon G4S linkers (“G4S” disclosed as SEQ ID NO: 4535) of variable lengths.

TABLE 120
Viral genomes for IPN002 fragment expression

| | Intron/exon | | | | SEQ |
|---|---|---|---|---|---|
| Promoter | region | Configuration | Description | Construct ID | ID NO: |
| CBA | hGbin | HF.T2AL | F(ab′)2_hIgG3_2hinge | TAU_ITR121 | 2171 |
| | | | F(ab′)2_hIgG3_3hinge | TAU_ITR122 | 2172 |
| | | | Fab | TAU_ITR123 | 2173 |
| | | | Fab_ext | TAU_ITR124 | 2174 |
| CAG | — | HF.T2AL | F(ab′)2_hIgG3_2hinge | TAU_ITR125 | 2175 |
| | | | F(ab′)2_hIgG3_3hinge | TAU_ITR126 | 2176 |
| | | | Fab | TAU_ITR127 | 2177 |
| | | | Fab_ext | TAU_ITR128 | 2178 |
| CBA | hGbin | LT2AH | Fab_ext | TAU_ITR129 | 2179 |
| CAG | — | LT2AH | Fab_ext | TAU_ITR130 | 2180 |
| CBA | hGbin | scFv-HA | H(G4S)3L | TAU_ITR133 | 2183 |
| | | | H(G4S)L | TAU_ITR131 | 2181 |
| | | | L(G4S)3H | TAU_ITR146 | 2196 |
| | | | L(G4S)H | TAU_ITR144 | 2194 |
| CAG | — | scFv-HA | H(G4S)3L | TAU_ITR139 | 2189 |
| | | | H(G4S)L | TAU_ITR137 | 2187 |
| | | | L(G4S)3H | TAU_ITR152 | 2202 |
| | | | L(G4S)H | TAU_ITR150 | 2200 |

[1410] Anti-HA western blot of IPN002 scFv-HA viral genome constructs demonstrated bands at approximately 30 kd for each of the 8 constructs tested. Quantification data from anti-HA western blot and wtTau ELISA data are shown in the Table 121 below.

TABLE 121
IPN002 scFv-HA screening results

| | | | | | SEQ | Anti-HA | wtTau |
|---|---|---|---|---|---|---|---|
| | Intron/exon | Config- | | Construct | ID | WS | ELISA |
| Promoter | region | uration | Description | ID | NO: | μg/mL | EC₅₀ |
| CBA | hGbin | scFv-HA | H(G4S)3L | TAU_ITR133 | 2183 | 7.0 | 74.5 |
| | | | H(G4S)L | TAU_ITR131 | 2181 | 2.3 | 423.3 |
| | | | L(G4S)3H | TAU_ITR146 | 2196 | 41.9 | 37.9 |
| | | | L(G4S)H | TAU_ITR144 | 2194 | 2.2 | 93.1 |
| CAG | | scFv-HA | H(G4S)3L | TAU_ITR139 | 2189 | 10.5 | 29.5 |
| | | | H(G4S)L | TAU_ITR137 | 2187 | 3.4 | 56.8 |
| | | | L(G4S)3H | TAU_ITR152 | 2202 | 8.4 | 34.7 |
| | | | L(G4S)H | TAU_ITR150 | 2200 | 4.8 | 232 |

[1411] IPN002 F(ab′)2, Fab and Fab_ext constructs were also assessed by western blot and tau ELISA assays. Western blot analysis of the 16 constructs outlined above showed a 30 kD band for all but two constructs. Viral genome contracts TAU_ITR121 (SEQ ID NO: 2171) and TAU_ITR125 (SEQ ID NO: 2175) showed no expression due to a mutation in the antibody encoding sequences. The remaining IPN002 F(ab′)2, Fab and Fab_ext viral genome constructs were assessed by tau ELISA and the results are shown in Tables 122 and 123 below.

TABLE 122
IPN002 HF.T2AL-Fab screening results

| | | | | | SEQ | wtTau | PHF Tau |
|---|---|---|---|---|---|---|---|
| | Intron/exon | Config- | | Construct | ID | ELISA | ELISA |
| Promoter | region | uration | Description | ID | NO: | EC₅₀ | EC₅₀ |
| CBA | hGbin | HF.T2AL | Fab | TAU_ITR123 | 2173 | 0.5 | 0.1 |
| | | | Fab_ext | TAU_ITR124 | 2174 | 0.5 | 0.2 |
| CAG | | HF.T2AL | Fab | TAU_ITR127 | 2177 | 0.5 | 0.1 |
| | | | Fab_ext | TAU_ITR128 | 2178 | 0.6 | 0.1 |
| Cells | — | — | — | — | — | 0.2 | 0.0 |
| IPN002 | — | — | — | — | — | 0.3 | 0.0 |

TABLE 123
IPN002 LT2AFl-Fab screening results

| | | | | | SEQ | wtTau | PHF Tau |
|---|---|---|---|---|---|---|---|
| | Intron/exon | Config- | | Construct | ID | ELISA | ELISA |
| Promoter | region | uration | Description | ID | NO; | EC₅₀ | EC₅₀ |
| CBA | hGbin | LT2AH | Fab_ext | TAU_ITR129 | 2179 | 0.3 | 0.1 |
| CAG | — | LT2AH | Fab_ext | TAU_ITR130 | 2180 | 0.3 | 0.1 |
| Cells | — | — | — | — | — | 65.1 | 11.2 |
| IPN002 | — | — | — | — | — | 0.2 | 0.0 |

[1412] These preliminary data indicate that viral genomes designed for expression of IPN002 Fab fragments, generate IPN002 Fabs that have affinity to and bind tau.

[1413] IPN002 F(ab)2 constructs were assessed in vitro by western blotting and ELISA. Under non-reduced conditions, each of the four IPN002 F(ab′)2 constructs outlined above, showed bands at approximately 150 kd based on western blot of 293 cell supernatant. In reduced conditions, all four constructs tested demonstrated a band between 25-30 kD. IPN002 F(ab′)2 constructs driven by CBA promoter were then tested by PHF-tau and wild-type tau ELISA, with data shown in the Table 124 below.

TABLE 124
IPN002 CBA-F(ab′)2 screening results

| | | | | | SEQ | wtTau | PHF Tau |
|---|---|---|---|---|---|---|---|
| | Intron/exon | | | Construct | ID | ELISA | ELISA |
| Promoter | region | Config. | Description | ID | NO: | EC₅₀ | EC₅₀ |
| CBA | hGbin | HF.T2AL | F(ab′)2_hIgG3_2hinge | TAU_ITR121 | 2171 | 109.1 | 48.9 |
| | | | F(ab′)2_hIgG3_3hinge | TAU_ITR122 | 2172 | 116.7 | 64.3 |

[1414] IPN002 Fab constructs were assessed in vitro by western blotting and ELISA. Under non-reduced conditions, all of the IPN002 Fab constructs tested showed bands at approximately 23 kd based on western blot of 293 cell supernatant. In reduced conditions, all constructs tested demonstrated a band between 25-30 kD. IPN002 Fab constructs were then tested by PHF-tau and wild-type tau ELISA, with data shown in the Table 125 below.

TABLE 125
IPN002 Fab screening results

| | | | | | SEQ | wtTau | PHF Tau |
|---|---|---|---|---|---|---|---|
| | Intron/exon | Config- | | Construct | ID | ELISA | ELISA |
| Promoter | region | uration | Description | ID | NO: | EC₅₀ | EC₅₀ |
| CBA | hGbin | HF.T2AL | Fab | TAU_ITR123 | 2173 | 18.8 | 14.0 |
| | | | Fab_ext | TAU_ITR124 | 2174 | 18.7 | 15.3 |
| CAG | — | HF.T2AL | Fab | TAU_ITR127 | 2177 | 22.9 | 17.0 |
| | | | Fab_ext | TAU_ITR128 | 2173 | 28.6 | 23 |
| CBA | hGbin | LT2AH | Fab_ext | TAU_ITR129 | 2179 | 30.2 | 21.35 |
| CAG | — | LT2AH | Fab_ext | TAU_ITR130 | 2180 | 23.1 | 18.6 |

[1415] Results of ELISA assays of IPN002 Fab and F(ab′)2 fragments indicate that both are able to bind wild-type and pathological tau.

[1416] Twenty-five IPN002 scFv constructs were made using one of two promoters (CBA-hGbin or CAG), alternating antibody sequence configurations (heavy-linker-light (HL) vs light-linker-heavy (LH)) and flexible G4S linkers (“G4S” disclosed as SEQ ID NO: 4535) of different lengths. The construct design is shown in Table 126 below. In the table below, the amino acid sequence of the linker are: G4S is SEQ ID NO: 4535, (G4S)2 is SEQ ID NO: 4539, (G4S)3 is SEQ ID NO: 4537, (G4S)4 is SEQ ID NO: 4540, (G4S)5 is SEQ ID NO: 4538, (G4S)6 is SEQ ID NO: 4541, and (G4S)8 is SEQ ID NO: 4542.

TABLE 126
IPN002 scFv construct design

| | | | | | | SEQ |
|---|---|---|---|---|---|---|
| Construct | | | Config- | | Construct | ID |
| No. | Promoter | Antibody | uration | Linker | ID | NO: |
| 1 | CBA-hGbin | IPN002 | HL | G4S | TAU_ITR131 | 2181 |
| 2 | CBA-hGbin | IPN002 | HL | (G4S)2 | TAU_ITR132 | 2182 |
| 3 | CBA-hGbin | IPN003 | HL | (G4S)3 | TAU_ITR133 | 2183 |
| 4 | CBA-hGbin | IPN008 | HL | (G4S)4 | TAU_ITR134 | 2184 |
| 5 | CBA-hGbin | IPN004 | HL | (G4S)5 | TAU_ITR135 | 2185 |
| 6 | CBA-hGbin | IPN0011 | HL | (G4S)6 | TAU_ITR136 | 2186 |
| 7 | CAG | IPN002 | HL | G4S | TAU_ITR137 | 2187 |
| 8 | CAG | IPN002 | HL | (G4S)2 | TAU_ITR138 | 2188 |
| 9 | CAG | IPN003 | HL | (G4S)3 | TAU_ITR139 | 2189 |
| 10 | CAG | IPN008 | HL | (G4S)4 | TAU_ITR140 | 2190 |
| 11 | CAG | IPN0010 | HL | (G4S)5 | TAU_ITR141 | 2191 |
| 12 | CAG | IPN0011 | HL | (G4S)6 | TAU_ITR142 | 2192 |
| 13 | CAG | IPN0012 | HL | (G4S)8 | TAU_ITR143 | 2193 |
| 14 | CBA-hGbin | IPN005 | LH | G4S | TAU_ITR144 | 2194 |
| 15 | CBA-hGbin | IPN005 | LH | (G4S)2 | TAU_ITR145 | 2195 |
| 16 | CBA-hGbin | IPN006 | LH | (G4S)3 | TAU_ITR146 | 2196 |
| 17 | CBA-hGbin | IPN007 | LH | (G4S)4 | TAU_ITR147 | 2197 |
| 18 | CBA-hGbin | IPN0012 | LH | (G4S)5 | TAU_ITR148 | 2198 |
| 19 | CBA-hGbin | IPN0013 | LH | (G4S)6 | TAU_ITR149 | 2199 |
| 20 | CAG | IPN004 | LH | G4S | TAU_ITR150 | 2200 |
| 21 | CAG | IPN004 | LH | (G4S)2 | TAU_ITR151 | 2201 |
| 22 | CAG | IPN005 | LH | (G4S)3 | TAU_ITR152 | 2202 |
| 23 | CAG | IPN006 | LH | (G4S)4 | TAU_ITR153 | 2203 |
| 24 | CAG | IPN007 | LH | (G4S)5 | TAU_ITR154 | 2204 |
| 25 | CAG | IPN0014 | LH | (G4S)6 | TAU_ITR155 | 2205 |

[1417] Viral genome constructs for IPN002 scFv expression driven by a CAG promoter (TAU_ITR137 to TAU_ITR143; SEQ ID NO: 2187-2193 and TAU_ITR150 to TAU_ITR155; SEQ ID NO: 2200-2205, in the Table above) were tested in vitro. Western blot of 293 cell supernatant demonstrated bands (25-30 kd) for each construct tested, though the bands observed for TAU_ITR137 (SEQ ID NO: 2187), TAU_ITR138 (SEQ ID NO: 2188), TAU_ITR150 (SEQ ID NO: 2200) and TAU_ITR151 (SEQ ID NO: 2201) were light and difficult to resolve. At greater exposure, bands for these constructs became more evident. CAG-promoter scFv constructs were further tested by PHF and wild-type tau ELISA. Data are shown in Table 127 below.

TABLE 127
IPN002 scFv screening results

| | | | | wtTau | PHF Tau |
|---|---|---|---|---|---|
| Construct | | | SEQ | ELISA | ELISA |
| No. | Construct Description | Construct ID | ID NO: | EC₅₀ | EC₅₀ |
| 7 | CAG-IPN002-HL-G4S | TAU_ITR137 | 2187 | 3.0 | 1.2 |
| 8 | CAG-IPN002-HL-G4S2 | TAU_ITR138 | 2188 | 5.4 | 2.1 |
| 9 | CAG-IPN003-HL-G4S3 | TAU_ITR139 | 2189 | 2.5 | 1.1 |
| 10 | CAG-IPN008-HL-G4S4 | TAU_ITR140 | 2190 | 3.4 | 3.5 |
| 11 | CAG-IPN0010-HL-G4S5 | TAU_ITR141 | 2191 | 7.3 | 7.2 |
| 12 | CAG-IPN0011-HL-G4S6 | TAU_ITR142 | 2192 | 8.7 | 20.6 |
| 20 | CAG-IPN004-LH-G4S | TAU_ITR150 | 2200 | 4.9 | 6.0 |
| 21 | CAG-IPN004-LH-G4S2 | TAU_ITR151 | 2201 | 8.1 | 5.3 |
| 22 | CAG-IPN005-LH-G4S3 | TAU_ITR152 | 2202 | 4.6 | 8.0 |
| 23 | CAG-IPN006-LH-G4S4 | TAU_ITR153 | 2203 | 7.2 | 18.7 |
| 24 | CAG-IPN007-LH-G4S5 | TAU_ITR154 | 2204 | 7.0 | 10.0 |
| 25 | CAG-IPN0014-LH-G4S6 | TAU_ITR155 | 2205 | 5.2 | 11.3 |

[1418] A second set of ELISA assays were conducted to compare CAG-IPN0011-HL-G4S6 and CAG-IPN0012-HL-G4S8, and these data are shown below (Table 128).

TABLE 128
IPN002 scFv screening results

| | | | | wtTau | PHF Tau |
|---|---|---|---|---|---|
| Construct | | | SEQ | ELISA | ELISA |
| No. | Construct Description | Construct ID | ID NO: | EC₅₀ | EC₅₀ |
| 12 | CAG-IPN0011-HL-G4S6 | TAU_ITR142 | 2192 | 9.2 | 3.6 |
| 13 | CAG-IPN0012-HL-G4S8 | TAU_ITR143 | 2193 | 8.0 | 4.0 |

[1419] Data from these studies indicate that for scFv expression, the length of the linker between the antibody chains is important and effects the expression of the IPN002 scFv. Results of the ELISA assays indicate that the expressed IPN002 scFvs bind both wild-type and PHF tau.

### Viral Genomes for the Expression of PT3 Fragments

[1420] Twenty-four PT3 scFv constructs (TAU_ITR156 to TAU_ITR179: SEQ ID NO: 2206-2229) were made using one of three promoters (CAG, GFAP or synapsin), alternating PT3 antibody sequence configurations (heavy-linker-light (HL) vs light-linker-heavy (LH)) and flexible G4S linkers (“G4S” disclosed as SEQ ID NO: 4535) of different lengths. In three of these constructs, an alternate signal sequence (Glue100LP, hGhormone, pSec) was incorporated into the viral genome (TAU_ITR176 to TAU_ITR178; SEQ ID NO: 2226-2228), while in the others a heavy chain or light chain signal sequence was used. Each of the constructs included an HA tag, a rabbit globin poly(A) sequence, and 5′ and 3′ ITRs.

[1421] Expression of PT3 scFv fragments was tested in HEK293 cells followed by Western blot and binding affinity for ePHF tau of the expressed antibody was assessed by ELISA. As compared to TAU_ITR112 (SEQ ID NO: 2162; PT3-CAG-HT2AL), scFv fragments generally showed lower affinity to ePHF tau.

[1422] Eight viral genomes were designed for the expression of PT3 Fab fragments, using a CAG promoter, alternating PT3 antibody sequence configurations (heavy-linker-light (HL) vs light-linker-heavy (LH)), a T2A or F2A linker, rabbit globin poly(A) sequence, and 5′ and 3′ ITRs. As above, these constructs were tested for antibody expression in HEK293 cells followed by Western blot and for binding affinity for ePHF tau by ELISA. Each of the PT3 Fab constructs tested showed ability to bind ePHF tau.

### Viral Genomes for the Expression of C10.2 Fragments

[1423] Viral genomes for expression of C10.2 fragments (Fab, F(ab′)2, scFv) were generated and tested in vitro for expression and quantitation by Western blot/ELISA and for binding affinity to ePHF tau and concentration, also by ELISA.

[1424] First, four Fab and two F(ab′)2 constructs were designed using a CAG promoter and alternating antibody sequence configurations (heavy-linker light and light-linker-heavy). A T2A linker was used in each of the six viral genomes. Expression of C10.2 antibody fragments from these viral genomes was tested in vitro in 293 cells and the supernatant collected for western blot analysis. Concentration and binding affinity for tau of C10.2 F(ab′)2 and Fab was determined by ELISA.

[1425] Next, eight C10.2 scFv constructs were prepared using a CAG promoter, alternating C10.2 antibody sequence configurations (heavy-linker-light (HL) vs light-linker-heavy (LH)) and flexible G4S linkers (“G4S” disclosed as SEQ ID NO: 4535) of different lengths. Each of the constructs further included an HA tag, a poly(A) sequence, and 5′ and 3′ ITRs. Western blot analysis of 293 cell supernatant was used to test expression of C10.2 scFv and concentration and binding affinity for tau determined by ELISA.

[1426] One viral genome (CAG-C10.2 scFv HL-G4S3) was selected for further testing of 14 different signal peptides. Each of the fourteen signal peptides was cloned into a viral genome and the viral genomes tested for expression of C10.2 scFv in vitro.

[1427] Viral genomes for cell-specific expression of C10.2 Fab, F(ab′)2 and scFv fragments were generated using GFAP or synapsin promoters. Each of the 8 scFv constructs utilized the light-linker-heavy antibody sequence configuration with flexible G4S linkers (“G4S” disclosed as SEQ ID NO: 4535) of different lengths.

[1428] Taken together, ELISA assays indicate that C10.2 F(ab′)2 fragments bind pathological tau with an affinity similar to that seen with full C10.2 antibody, whereas C10.2 Fab fragments demonstrate a reduced affinity for pathological tau.

### Example 11. Identification of Antibody Epitopes

[1429] Anti-tau antibody PT3 is known to bind PHF-tau while not binding wild-type (441 amino acids: tau441; SEQ ID NO: 2127; NP_005901.2). Affinity for PHF-tau was measured at 18 pM, however, the specific epitope remains unknown, ePHF tau ELISA assay (EC₅₀ of 7.6) and SDS-PAGE showed that PT3 binds to ePHF tau.

[1430] Purified recombinant phospho-tau proteins were generated to simulate the mixture of abnormal hyperphosphorylated oligomeric tau that comprises ePHF tau and used in experiments to determine the antigen binding site for anti-tau antibody PT3. Recombinant phospho-tau proteins were phosphorylated in vitro by protein kinases Glycogen synthase kinase 3 beta (GSK3β), Protein Kinase A (PKA), Tau tubulin kinase 1 (TTBK1), Dual specificity tyrosine phosphorylation regulated kinase 1A (DYRK1A), BR serine/threonine-protein kinase 2 (BRSK2), Ca²⁺/Calmodulin-dependent protein kinase II (CAMK2), BR serine/threonine-protein kinase 1 (BRSK1), Phosphorylase kinase catalytic subunit gamma 2 (PHKG2). PHF tau was used as a control. Phospho-tau ELISA assay and Western blot analyses showed that PT3 binds recombinant phospho-tau. Results indicated that PT3 bound with greatest affinity to tau protein phosphorylated by DYRK1A, as compared to those phosphorylated by other kinases.

[1431] Protein kinase DYRK1A has serine/threonine/tyrosine protein kinase activity and has been shown to play a role in regulation of cell growth, division and differentiation. DYRK1A is important in the development of the nervous system and has been identified in formation and maturation of dendritic spines. DYRK1A has been shown to be over-expressed in Down Syndrome and has been associated with early onset of AD-type pathology, Down Syndrome and Autism Spectrum Disorders. Previous studies (Wegiel, J. et al., 2011, FEBS J 278(2):236-45, the contents of which are herein incorporated by reference in their entirety) indicate that DYRK1A phosphorylates human tau at 11 threonine (pThr) and serine (pSer) sites.

[1432] Tau441 was incubated in vitro with DYRK1A for 0, 5, 10, 20, 45, 82 or 120 minutes and then analyzed by western blot using PT3. Binding of PT3 to phospho-tau was increased with each increase in incubation time, with the greatest binding evident at 120 minutes.

[1433] Twelve recombinant tau mutant proteins were generated, based on phosphorylation sites of Tau441 by DYRK1A, having mutations at T181, S199, S202, T205, T212, T217, T231, S396, S400, S404 and S422. Amino acids at these positions were mutated to Alanine and a his tag was added as a tag or selectable marker.

[1434] Western blot of the 12 tau441 mutants and wild-type tau441 using anti-tau antibody PT3 showed no binding to recombinant tau proteins with mutations at T212 or T217, even though western blot using anti-his antibody showed recombinant tau441 protein present in each of these lanes. Semi-quantitative analyses of these western blots indicated substantially equivalent recombinant tau protein present based on anti-his staining. PT3 binding was more variable with greatest signal for recombinant tau 441 with a mutation at S422. Further quantification of PT3 signal normalized to anti-his signal indicated greatest binding of PT3 to recombinant tau441 with a mutation at S199 and then with decreasing binding for each of recombinant tau441 proteins with mutations at S422, T205, S400, S404, T181, S396, T231, wild-type tau441, S202, respectively.

[1435] ELISA was performed using PT3 as the immobilized antibody and DYRK1A phosphorylated tau proteins or recombinant tau mutant proteins in the applied solution (333 ng/mL). Data are shown in Table 129 below.

TABLE 129
PT3, Tau and Tau mutant ELISA

| Tau variant | OD450-570 |
|---|---|
| Phospho_Tau441 | 0.5 |
| Tau441 | 0.0 |
| Phospho_Tau441_T212A | 0.0 |
| Tau441_T212A | 0.0 |
| Phospho_Tau441_T202A | 0.6 |
| Tau441_T202A | 0.0 |
| Phospho_Tau441_S404A | 0.6 |
| Tau441_S404A | 0.0 |
| Phospho_Tau441_T181A | 0.4 |
| Tau441_T181A | 0.0 |
| Phospho_Tau441_S199A | 0.7 |
| Tau441_S199A | 0.0 |
| Phospho_Tau441_T205A | 0.4 |
| Tau441_T205A | 0.0 |
| Phospho_Tau441_T217A | 0.0 |
| Tau441_T217A | 0.0 |
| Phospho_Tau441_T231A | 0.3 |
| Tau441_T231A | 0.0 |
| Phospho_Tau441_S396A | 0.5 |
| Tau441_S396A | 0.0 |
| Phospho_Tau441_S400A | 0.3 |
| Tau441_S400A | 0.0 |
| Phospho_Tau441_S422A | 0.3 |
| Tau441_S422A | 0.1 |

[1436] As by western blot analysis, results again indicated poor binding of anti-tau antibody PT3 to tau with mutations at T212 or T217.

[1437] Six additional recombinant tau mutant proteins were generated to further elucidate the PT3 epitope (tau441−S214A, tau441−T212A+S214A, tau441−T212A+T217A, tau441−T217A+T231A, tau441−T212A+T231A, tau441−T212A+T217A+T231A). Western blot of these six additional tau441 mutants and wild type tau441 using PT3 showed no binding to recombinant tau proteins with mutations at T212 or T217, even though western blot using anti-his antibody showed recombinant tau441 protein present in each of these lanes.

[1438] PT3 ELISA using 210 ng/mL of phospho-Tau variants gave results as shown in the Table below (see Table 130) and confirmed the findings of the western blot analyses, wherein binding of PT3 was eliminated with recombinant tau proteins with mutations at T212 or T217.

TABLE 130
PT3 and phosphoTau ELISA

| Tau variant | OD450-570 |
|---|---|
| Wild-type Tau441 | 1.7 |
| Tau441-T212A | 0.0 |
| Tau441-S214A | 1.5 |
| Tau441-T217A | 0.0 |
| Tau441-T231A | 2.0 |
| Tau441-T212A + S214A | 0.1 |
| Tau441-T212A + T217A | 0.0 |
| Tau441-T217A + T231A | 0.1 |
| Tau441-T212A + T231A | 0.1 |
| Tau441-T212A + T217A + T231A | 0.0 |
| Tau441_no phos | 0.0 |
| Tau441-T212A-no phos | 0.0 |

[1439] A series of nine new phospho-tau peptides were synthesized as indicated in Table 131 below, where “p” indicates a phosphorylation site and tested by PT3 ELISA.

TABLE 131
Phospho Tau Peptides

| | | | SEQ | |
|---|---|---|---|---|
| Tau | | | ID | |
| ID | Description | Sequence | NO: | EC₅₀ |
| Tau1 | pT212 | SPGTPGSRSRpTPSLP | 2128 | — |
| | | TPP | | |
| Tau2 | pT217 | SRTPSLPpTPPTREPK | 2129 | 17.8 |
| Tau3 | pT231 | KKVAVVRpTPPKSPSS | 2130 | — |
| Tau4 | pT212 + | TPGSRSRpTPSLPpTP | 2131 | 13.6 |
| | pT217 | PTREPK | | |
| Tau5 | pT217 + | SRTPSLPpTPPTREPK | 2132 | 15.6 |
| | pT231 | KVAVVRpTPPKSPSS | | |
| Tau6 | pT212 + | TPGSRSRpTPSLPpTP | 2133 | 12.0 |
| | pT217 + | PTREPKKVAVVRpTPP | | |
| | pT231 | KSPSS | | |
| Tau7 | wt tau | TPGSRSRTPSLPTPPT | 2134 | — |
| | | REPKKVAVVRTPPKSP | | |
| | | SS | | |
| Tau8 | pT212 + | TPGSRSRpTPSLPTPP | 2135 | — |
| | pT231 | TREPKKVAVVRpTPPK | | |
| | | SPSS | | |
| Tau9 | wt tau | TPPSSGEPPKSGDRSG | 2136 | — |
| | | YSSPGSPGTPGSRSRT | | |
| | | PSLPTPPTREPKKVAV | | |
| | | V | | |

[1440] Further analysis of the Tau1 peptide by PT3 or AT100 ELISA or ELISA using a series of pT212 commercial antibodies confirmed that the Tau1 peptide was indeed phosphorylated at pT212.

[1441] Together, the data above indicate that PT3 binds tau phosphorylated at two sites, pT212 and pT217. A follow-up PT3 ELISA using peptides Tau1 (pT212), Tau2 (pT217), Tau4 (pT212+pT217) and Tau7 (wt tau) yielded EC₅₀ values of 83.6 and 17.2 for Tau2 (pT217) and Tau4 (pT212+pT217) peptides respectively. A PT3 competition ELISA using Tau1-6, Tau9 and DYRK1A phosphorylated Tau441 supported these findings. Based on these findings, a hypothetical model of PT3 binding was developed, wherein PT3 binds pT212 tau very weakly and pT217 with greater affinity (approximately 1,000× stronger). Tau phosphorylated at both pT212 and pT217 shows the greatest binding by PT3, with an affinity higher than that of PT3 to either phospho-site on its own. It was noted that PT3 binds wild type tau441 weakly as well.

### Example 12. Engineering of Antibody Variants

### Intrabodies

[1442] Viral genomes for expressing anti-tau intrabodies are engineered to test the effect of intracellular antibody expression. Secretory signal peptides are removed to retain the intrabody within the cell. Constructs are tested with the assays (ELISA and Western blot) described above. Intrabodies are not expected to be present in the cell supernatant, but are expected to be abundant in the cell lysate.

### Nanobodies

[1443] Viral genomes for expressing anti-tau nanobodies are developed and tested using the assays described above. Nanobodies may demonstrate better permeability in tissues, greater stability, higher solubility, shorter plasma half-life, and enhanced binding to hidden targets.

### Bispecific Antibodies

[1444] Viral genomes for expressing bispecific antibodies, bispecific nanobodies or bispecific scFvs are engineered and tested using the assays described above or any appropriate qualitative or quantitative assay known to one with skill in the art.

### Example 13. Intramuscular Expression of Antibodies

### Engineering for Enhanced Muscle Tropism

[1445] AAV particles comprising viral genomes encoding anti-tau antibodies are modified for enhanced transduction to muscular tissue. The AAV capsid is engineered to increase tropism to muscle. In one embodiment, AAV9 is modified to increase muscle tropism. In another embodiment, AAV2 and/or AAV3 are modified to increase muscle tropism. AAV particles may be delivered directly to muscle via intramuscular delivery or may be administered systemically, but still target muscular tissues.

### In Vivo Intramuscular Dosing Studies for Expression of Anti-Tau Antibodies

[1446] AAV1, AAV2 or VOY101 AAV particles comprising viral genomes encoding an anti-tau antibody (e.g., IPN002, PT3, C10.2, PHF1, MC1, CP13) are provided to subject (e.g., mouse, rat, rabbit, guinea pig, pig, ferret, dog, cat, non-human primate, or human) in a single intramuscular dose or in three intramuscular doses (1e12, 3e11, or 1e11) to the gastrocnemius muscle at a volume of 30-50 μL/site. The AAV particles will be formulated in PBS with 0.001% F-68. The subject may be wild-type, diseased, or model a disease or indication. Serum, CSF and/or tissue samples (hippocampus, cortex, thalamus, brain stem, spinal cord, liver, skeletal muscle) are collected for quantification of anti-tau antibody levels, with repeated sample collection for monitoring antibody presence over time. Serum will be collected at −2, 7, 14, 21, 28, 35, 42 and 43 days, as counted from day of administration of AAV particles, passive immunization or control composition. Antibody levels will be quantified using Tau-ELISA or ePHF ELISA, as described above. It is expected that administration of AAV particles, especially at the highest dose, will lead to detectable IPN002 antibody expression in serum samples. Vector genome quantification will be determined for a subset of tissues, such as for muscle, brain, and/or peripheral tissue (e.g., liver). Passive immunization with an anti-tau antibody (60 mg/kg) will be used as a control. Study designs are shown in Tables 132 and 133 below.

TABLE 132
AAV1.IPN002 IM study design

| | | SEQ | | | | | | End |
|---|---|---|---|---|---|---|---|---|
| Construct | TAU_ITR | ID | | Dose | Dose | | | of |
| Configuration | ID | NO: | μL | (vg/kg) | (vg) | Route | N | study |
| CAG-IPN002- | TAU_ITR1 | 1990 | 4 × 40 | 5E13 | 1E12 | IM | 6 | D 43 |
| HF.T2AL | | | | | | | | |
| CAG-IPN002- | TAU_ITR1 | 1990 | 2 × 40 | 1.5E13 | 3E11 | IM | 6 | D 43 |
| HF.T2AL | | | | | | | | |
| CAG-IPN002- | TAU_ITR1 | 1990 | 1 × 40 | 5E12 | 1E11 | IM | 6 | D 43 |
| HF.T2AL | | | | | | | | |
| Passive | — | — | | 60 | — | i.p. | 6 | D 43 |
| immunization | | | | mg/kg | | | | |
| with IPN002 | | | | weekly | | | | |
| PBS with | — | — | 100 | — | — | IM | 4 | D 43 |
| 0.001% F-68 | | | | | | | | |

TABLE 133
AAV2.IPN002 IM study design

| | | SEQ | | | | | | End |
|---|---|---|---|---|---|---|---|---|
| Construct | TAU_ITR | ID | | Dose | Dose | | | of |
| Configuration | ID | NO: | μL | (vg/kg) | (vg) | Route | N | study |
| CAG-IPN002-HF.T2AL | TAU_ITR1 | 1990 | 4 × 40 | 4E13 | 8E11 | IM | 6 | D 43 |
| CAG-IPN002-HF.T2AL | TAU_ITR1 | 1990 | 2 × 40 | 1.5E13 | 3E11 | IM | 6 | D 43 |
| CAG-IPN002-HF.T2AL | TAU_ITR1 | 1990 | 1 × 40 | 5E12 | 1E11 | IM | 6 | D 43 |

[1447] Secondary readouts include cage-side observations for the first week and weekly body weight checks. No adverse side effects are anticipated.

### Example 14. Intramuscular Dosing of Anti-Tau Antibody AAV Particles

[1448] To assess anti-tau antibody levels in serum, CSF or CNS tissue of mice after bilateral intramuscular delivery of vector, a viral genome (TAU_ITR112; SEQ ID NO: 2162; PT3-CAG-HT2AL) was packaged into AAV1, AAV2 or VOY101 capsids. AAV particles were formulated in PBS with 0.001% F-68 and provided at a dose of 4.65×10¹³ vg/kg across four intramuscular injection sites in the gastrocnemius and thigh muscle of C57Bl/6 mice. Forty-two days after administration, mice were sacrificed by intracardiac perfusion and CSF and/or tissue samples (hippocampus, cortex, thalamus, brain stem, spinal cord, olfactory bulb, liver, skeletal muscle) were collected for analysis. Serum samples were collected at −2, 7, 14, 21, 28, 35, 42 and 43 days, as counted from day of administration of AAV particles, passive immunization or vehicle control (PBS and 0.001% F-68). Passive immunization with an anti-tau antibody (30 mg/kg) was used as a control. Study design is shown in Table 134 below.

TABLE 134
PT3 IM study design

| | | SEQ | | | | | | End |
|---|---|---|---|---|---|---|---|---|
| | TAU_ITR | ID | | Dose | Dose | | | of |
| AAV Particle | ID | NO: | μL | (vg/kg) | (vg) | Route | N | study |
| AAV1.CAG-PT3-HF.T2A L | TAU_ITR112 | 2162 | 4 × 40 | 4.65E13 | 1E12 | IM | 8 | D 43 |
| AAV2.CAG-PT3-HF.T2AL | TAU_ITR112 | 2162 | 4 × 40 | 4.65E13 | 1E12 | IM | 8 | D 43 |
| VOY101.CAG-PT3-HF.T2AL | TAU_ITR112 | 2162 | 4 × 40 | 4.65E13 | 1E11 | IM | 8 | D 43 |
| Passive immunization with | — | — | | 30 | — | i.p. | 8 | D 43 |
| PT3 | | | | mg/kg | | | | |
| | | | | weekly | | | | |
| PBS with 0.001% F-68 | — | — | 100 | — | — | IM | 4 | D 43 |

[1449] Vector genome quantification was determined for a subset of tissues, such as for muscle (injection/non-injection sites), brain, and/or peripheral tissue (e.g., liver) by droplet digital PCR and normalized per diploid cell (VG/DC). Antibody levels in the hippocampus, cortex, spinal cord, liver, serum, gastrocnemius and CSF were quantified using ePHF ELISA, as described above. Secondary readouts included cage-side observations for one week after AAV particle administration and weekly body weight measurements. Vector genome biodistribution quantifications (VG/DC) are shown in Table 135 below.

TABLE 135
Vector genome quantification of ssVOY101.PT3 constructs

| | | | | Passive | Vehicle |
|---|---|---|---|---|---|
| | AAV1.PT3 | AAV2.PT3 | VOY101.PT3 | Immunization | (PBS) |
| Hippocampus | 0.1 | 0.3 | 8.6 | 0.0 | 0.0 |
| Cortex | 0.1 | 0.0 | 14.8 | 0.0 | 0.0 |
| Olfactory Bulb | 0.0 | 0.0 | 11.5 | 0.0 | 0.0 |
| Thalamus | 0.2 | 0.0 | 21.7 | 0.0 | 0.0 |
| Brainstem | 0.2 | 0.0 | 19.1 | 0.0 | 0.0 |
| Spinal Cord | 0.3 | 0.0 | 10.9 | 0.0 | 0.0 |
| Gastrocnemius | 61.0 | 27.5 | 6.7 | 0.0 | 0.0 |
| Left Bicep | 1.0 | 8.4 | 0.3 | 0.0 | 0.0 |
| Right Thigh | 71.3 | 8.9 | 4.2 | 0.0 | 0.0 |
| Spleen | 2.8 | 1.9 | 1.0 | 0.0 | 0.0 |
| Liver | 12.6 | 0.1 | 1.8 | 0.0 | 0.0 |

[1450] Subsequent to bilateral intramuscular delivery of TAU_ITR112 (SEQ ID NO: 2162; PT3-CAG-HT2AL) in AAV1, AAV2 or VOY101 very low biodistribution in CNS tissues was observed with AAV1 and AAV2 vectors. VOY101.PT3 showed higher viral genome levels per diploid cell across all tested CNS tissues.

[1451] In peripheral tissues, AAV1, AAV2 and VOY101 delivery of PT3 resulted in detectable biodistribution at the site of the injection (gastrocnemius and thigh skeletal muscle), but presence of viral genomes in distant tissues from the injection site (e.g., left bicep), was scare. In skeletal muscle, AAV1 particles showed a trend for increased biodistribution as compared to AAV2 and VOY101, after IM administration. Viral genome quantifications indicate that, in gastrocnemius and thigh tissue, AAV1 was the most efficient at delivering PT3 encoding viral genomes, while VOY101 was least efficient in these peripheral tissues.

[1452] ePHF ELISA was used to assess PT3 antibody expression in tissues collected after IM injection of AAV1, AAV2, or VOY101 particles. Samples of hippocampus, cortex, spinal cord, serum, liver and gastrocnemius were analyzed. Data are shown in Table 136 below as ng/mg protein.

TABLE 136
PT3 expression from AAV1, AAV2, or VOY101 particles (ng/mg protein)

| | | | | Passive | Vehicle |
|---|---|---|---|---|---|
| | AAV1.PT3 | AAV2.PT3 | VOY101.PT3 | Immunization | (PBS) |
| | ng/mg | ng/mg | ng/mg | ng/mg | ng/mg |
| Hippocampus | 3.9 | 0.0 | 47.3 | 0.0 | 0.0 |
| Cortex | 1.6 | 0.0 | 104.9 | 0.0 | 0.0 |
| Spinal Cord | 0.0 | 0.0 | 27.6 | 0.5 | 0.0 |
| Liver | 165.0 | 34.6 | 56.8 | 24.3 | 0.0 |
| Gastrocnemius | 1233.0 | 353.0 | 563.7 | 58.0 | 0.0 |
| Serum (μg/mL) | 1900.0 | 247.5 | 689.0 | 315.0 | 0.0 |

[1453] Based on PT3 antibody expression quantification as determined by ePHF ELISA, VOY101 was the only one of the three capsids to deliver detectable levels of PT3 to tissues of the CNS after IM dosing. Passive immunization and administration of vehicle resulted in substantially no detectable PT3 expression in tissue collected from the hippocampus, cortex and spinal cord. In peripheral tissues, PT3 antibody expression was detectable in liver and injected muscle (gastrocnemius) in all groups, other than vehicle, with the highest expression seen with delivery using AAV1, followed by VOY101 and AAV2, respectively. These results are consistent with the vector genome quantification (VG/DC) determined by ddPCR, above.

[1454] In serum collected on the terminal day, quantification of PT3 antibody expression demonstrated enhanced expression of PT3 when delivered with AAV1, as compared to AAV2, VOY101 and passive immunization. Whilst not wishing to be bound by theory, one might have expected approximately 200-400 μg/mL of antibody to be present in the serum of mice dosed with 30 mg/kg. In serum samples collected prior to the terminal day (at days 7, 14, 21, 28, 35, and 42 days), an abundance of PT3 antibody was detected in each of the samples and these levels were largely sustained throughout the entirety of the experiment. PT3 antibody levels in serum, delivered by AAV1 and VOY101 were higher than antibody levels evident after passive immunization, while AAV2 delivery of PT3 encoding viral genomes resulted in PT3 antibody levels in serum similar to those seen with passive immunization.

[1455] Cerebrospinal fluid samples collected on the terminal day were also assessed for PT3 expression after IM delivery with one of AAV1, AAV2, VOY101 or passive immunization. When delivered by passive immunization, PT3 antibody levels in the CSF were approximately 0.05% of the levels seen in serum samples. Whilst not wishing to be bound by theory, this finding is consistent with what might be expected by one with skill in the art. Data for PT3 antibody expression in CSF and serum samples is shown in Table 137 below.

TABLE 137
PT3 expression from AAV1, AAV2, or VOY101 particles (ng/mg protein)

| | | | | Passive | Vehicle |
|---|---|---|---|---|---|
| | AAV1.PT3 | AAV2.PT3 | VOY101.PT3 | Immunization | (PBS) |
| | ng/mg | ng/mg | ng/mg | ng/mg | ng/mg |
| Serum (μg/mL) | 2471.0 | 229.0 | 689.0 | 342.0 | 0.0 |
| CSF (ng/mL) | 851.0 | 174.8 | 886.0 | 157.5 | 0.0 |
| % CSF/Serum | 0.0 | 0.1 | 0.1 | 0.0 | 0.0 |

[1456] PT3 antibody expression in CSF was highest when delivered by AAV1 or VOY101, followed by AAV2 and passive immunization. Vectored delivery, regardless of capsid, resulted in greater CSF PT3 antibody expression than seen with passive immunization.

[1457] Taken together, these data indicate that intramuscular delivery of VOY101 can result in antibody expression in CNS tissues, while use of AAV1 leads to higher expression of antibody in peripheral tissues.

### Example 15. Evaluation of Anti-Tau Antibody Constructs in Non-Human Primates

[1458] Adult Rhesus macaque monkeys, pre-screened for low anti-AAV antibody levels, will receive intraparenchymal (IPa; e.g., thalamus and/or putamen), intracisternal (CM), intravenous (IV) or intramuscular (IM) administration of anti-tau antibody AAV particles to assess expression, distribution and therapeutic potential.

[1459] Anti-tau antibody AAV particles will be formulated in a solution comprising 180 mM sodium chloride, 10 mM sodium phosphate, and 0.001% Pluronic Acid. Dosing concentrations will be determined based on route of administration. For IPa administration, two animals will each receive bilateral infusions into two brain regions (e.g., the thalamus and putamen) by convection enhanced delivery device guided by MRI. An additional three animals will each receive a single 1 mL bolus injection into the CSF via the cisterna magna. Intravenous administration will be delivered via injection to the saphenous vein, or other readily accessible vein of the superior leg. Intramuscular injections will be administered in at least one, but up to four sites, of the same or of different muscles, such as the gastrocnemius muscle. One group of animals will receive passive immunization with the antibody constructs of interest. Animals will be monitored post-injection(s) for 28 days, with weekly body weight measurements and daily cage-side behavioral, mortality and morbidity checks serving as secondary readouts. Serum and CSF samples will be collected pre-dose and prior to necropsy.

[1460] On day 29, animals will be transcardially perfused with PBS, tissues will be collected and drop fixed in paraformaldehyde for histological analyses or flash frozen for biochemical assay. Tissues processed for histological analysis will be sectioned and immunostained with HRP-labeled mouse IgG1 for presence of tau antibodies. Further, these samples will be co-immunostained with NeuN, Iba1 or GFAP to identify cell-type. Samples snap frozen for biochemical analyses will be utilized for PCR to detect vector genomes and mRNA, ELISA to detect antibodies and MS to determine protein levels. Blood and CSF samples will be assessed for antibody and AAV levels.

### Example 16. Treatment of Tau-Associated Disease

[1461] AAV particles comprising viral genomes for delivery of an anti-tau antibody or fragment thereof are administered to a patient who has been diagnosed with a tau associated disease, disorder or condition. The purpose of the treatment may be aimed to manage the disease, prevent or slow the progression of the disease, treat the symptoms associated with the disease and/or cure the disease.

[1462] The AAV particles are administered to a subject by IM, IV, ICV, IPa or IT administration. The administration may include one or more injections over a period of time. The level and distribution of AAV particles and antibody expression is monitored by standard diagnostic techniques known in the art. Such diagnostic techniques include e.g. (e.g. from blood, urine, or saliva), cerebrospinal fluid (CSF) testing, or any other testing useful for monitoring antibody levels in the body.

[1463] Additionally, the progression of the disease and the health of the patient is monitored by standard diagnostic techniques known in the art. Such techniques may include diagnostic imaging (e.g. X-ray, MRI scans, Ultrasound scans, PET scans, Nuclear scans, mammography), biopsy, laboratory tests (e.g. from blood, urine, or saliva), cerebrospinal fluid (CSF) testing, vital signs, clinical tests (cognitive, motor or reflex tests) and other relevant techniques. Treatment with the AAV particles may result in cure of the tau-associated disease, slowing down or stabilizing the progression of the disease, or have no effect on the progression of the disease. Additionally, the treatment may reduce severity of one or more symptoms associated with the disease, eliminate one or more symptoms associated with the disease or have no effect on the symptoms.

### Example 17. Affinity of a Panel of Anti-Tau Antibodies to ePHF or Wild-Type Tau

[1464] A panel of eight BioLegend (San Diego, Calif.) monoclonal murine anti-tau antibodies were tested for their affinity to ePHF tau and wild-type tau (Tau441), using an ELISA assay as described in Example 4 (Tau441 immobilized on the 96-well plate for the wild-type tau assay, instead of ePHF tau). The panel of BioLegend antibodies included clones Tau5 (anti-tau, 210-230; cat #806401), Tau12 (anti-tau, 6-18; cat #806501), Tau46 (anti-tau, 404-421; cat #806601), 43D (anti-tau, 1-100; cat #816601), 2G9.F10 (anti-tau, 157-168; cat #824601), PHF-6 (anti-tau phospho Th231; cat #828901), PHF-13 (anti-tau phospho Ser396; cat #829001) and Tau-13 (anti-tau, 20-35; cat #835201), with PHF-1 used as a control antibody.

[1465] As described above, the ePHF were first immobilized on a 96-well plate overnight by pre-coating with 1500× of the concentrated PHF tau at 4° C., washed 3 times with PBS then blocked with 3% BSA for 2 hrs at room temperature or overnight at 4° C. Anti-tau antibodies were diluted in 3% BSA and loaded onto the plates. Plates were then incubated for 2 hrs at room temperature. Wells were washed 5 times with TBS/0.5% Tween 20 wash buffer, then incubated with 1:5000 dilution of anti-mouse antibody labeled with HRP (Thermo Fisher Scientific, Waltham, Mass.) for 30 min. Plates were then developed by incubating with one-step TMB substrate (Thermo Fisher Scientific, Waltham. Mass.) for 30 min. stopped by 2N H₂SO₄ and read using a BioTek Synergy H1 hybrid reader (BioTek, Winooski, Vt.) at 450 nm. The concentration of anti-tau antibodies, and their affinity for ePHF tau, was determined using a standard curve. The data are shown in Table 138 below.

TABLE 138
BioLegend antibody PHF Tan ELISA (OD450 data)

| ng/ML | Tau5 | | Tau12 | | Tau46 | | 43D | | 2G9.F10 | | PHF-6 | | PHF-13 | | Tau-13 | | PHF-1 | |
|---|---|---|---|---|---|---|---|---|---|---|---|---|---|---|---|---|---|---|
| 1000.0 | 3.2 | 3.2 | 3.2 | 3.1 | 2.8 | 2.9 | 3.2 | 3.1 | 3.1 | 3.1 | 3.2 | 3.1 | 1.9 | 2.0 | 3.2 | 3.2 | 2.1 | 2.2 |
| 333.3 | 3.2 | 3.2 | 3.2 | 3.1 | 2.3 | 2.6 | 3.2 | 3.1 | 2.9 | 3.0 | 3.0 | 3.1 | 1.2 | 1.2 | 3.2 | 3.2 | 1.5 | 1.6 |
| 111.1 | 3.2 | 3.2 | 3.2 | 3.2 | 1.7 | 2.0 | 3.2 | 3.2 | 2.4 | 2.8 | 2.7 | 2.9 | 0.6 | 0.7 | 3.2 | 3.2 | 1.2 | 1.3 |
| 37.0 | 2.6 | 2.9 | 3.2 | 3.2 | 0.9 | 1.0 | 3.2 | 3.2 | 1.6 | 2.0 | 1.9 | 2.3 | 0.3 | 0.3 | 3.2 | 3.2 | 0.8 | 0.9 |
| 12.3 | 1.7 | 2.1 | 3.2 | 3.2 | 0.4 | 0.4 | 3.0 | 3.1 | 0.7 | 0.9 | 1.1 | 1.3 | 0.1 | 0.1 | 2.8 | 3.1 | 0.5 | 0.5 |
| 4.1 | 0.8 | 0.9 | 2.2 | 2.4 | 0.2 | 0.1 | 1.7 | 1.9 | 0.3 | 0.3 | 0.4 | 0.5 | 0.1 | 0.0 | 1.4 | 1.8 | 0.2 | 0.2 |
| 1.4 | 0.4 | 0.4 | 1.0 | 1.0 | 0.1 | 0.0 | 0.7 | 0.8 | 0.1 | 0.1 | 0.2 | 0.2 | 0.0 | 0.0 | 0.6 | 0.7 | 0.1 | 0.1 |
| 0.5 | 0.1 | 0.1 | 0.4 | 0.4 | 0.0 | 0.0 | 0.3 | 0.3 | 0.0 | 0.0 | 0.1 | 0.0 | 0.0 | 0.0 | 0.2 | 0.2 | 0.1 | 0.1 |

[1466] PHF-13 showed the lowest affinity for ePHF tau, while all other BioLegend antibodies demonstrated greater affinity for ePHF tau than control antibody PHF-1. EC₅₀ values are shown in Table 139 below.

TABLE 139
EC₅₀ values for anti-tau antibodies

| Antibody | EC₅₀ |
|---|---|
| Tau5 | 9.3 |
| Tau12 | 2.2 |
| Tau46 | 79 |
| 43D | 3.3 |
| 2G9.F10 | 29.2 |
| PHF-6 | 20 |
| PHF-13 | 36542 |
| Tau-13 | 4.1 |
| PHF-1 | 1888 |

[1467] The same panel of antibodies was then tested for affinity to wild-type tau (Tau441) using an ELISA assay in which Tau441 was immobilized to the plate instead of ePHF tau as described above. All other aspects of the assay remained the same. OD450 and EC₅₀ data are shown in Tables 140 and 141 below. Phospho-tau specific antibodies PHF-6, PHF-13 and PHF-1 showed little to no affinity to Tau441, as expected.

TABLE 140
BioLegend antibody Tan 441 ELISA (OD450 data)

| Ng/ML | Tau5 | Tau12 | Tau46 | 43D | 2G9.F10 | PHF-6 | PHF-13 | Tau-13 | PHF-1 |
|---|---|---|---|---|---|---|---|---|---|
| 1000.0 | 3.3 | 3.3 | 3.2 | 3.2 | 2.2 | 0.1 | 0.1 | 3.2 | 0.1 |
| 333.3 | 3.3 | 3.3 | 3.2 | 3.3 | 1.6 | 0.0 | 0.1 | 3.2 | 0.1 |
| 111.1 | 3.3 | 3.3 | 3.0 | 3.2 | 0.9 | 0.0 | 0.1 | 3.1 | 0.1 |
| 37.0 | 2.6 | 3.1 | 2.0 | 3.0 | 0.5 | 0.0 | 0.0 | 2.3 | 0.1 |
| 12.3 | 1.2 | 2.0 | 1.0 | 2.0 | 0.2 | 0.0 | 0.1 | 1.2 | 0.1 |
| 4.1 | 0.6 | 0.9 | 0.4 | 0.9 | 0.1 | 0.0 | 0.0 | 0.5 | 0.1 |
| 1.4 | 0.2 | 0.4 | 0.2 | 0.4 | 0.1 | 0.1 | 0.0 | 0.2 | 0.1 |
| 0.0 | 0.1 | 0.0 | 0.1 | 0.0 | 0.0 | 0.0 | 0.0 | 0.0 | 0.1 |

TABLE 141
EC₅₀ values for anti-tau antibodies

| Antibody | EC₅₀ |
|---|---|
| Tau5 | 18.1 |
| Tau12 | 8.5 |
| Tau46 | 25.5 |
| 43D | 9.0 |
| 2G9.F10 | 235.3 |
| PHF-6 | 1.9 |
| PHF-13 | 481.8 |
| Tau-13 | 18.9 |
| PHF-1 | 1.4 |

### Example 18. Vectorized PT3 and IPN002 Expression in Primary Hippocampal Neurons

[1468] Primary neuronal cultures were used to test cell specificity, transduction efficiency and expression of PT3 & IPN002 using viral genomes listed in Table 142, encapsulated in Voy101. For preparation of primary cultures, brain tissue was removed from CDI mice at embryonic day 17 (E17) and meninges removed. The hippocampi and cortices were dissected out and digested with papain. Cells were counted and plated (17,500 cells/well) accordingly.

[1469] On day 4, in vitro (DIV4), cells were transduced with (3E6, 1E6, 3.33E5, 1.11E5, 3.7E4 VG/cell) AAV particles comprising the PT3 or IPN002 encoding viral genomes or VOY101-GFP as a positive control. Untransduced neurons served as the negative control.

[1470] Constructs shown in Table 142 with PT3 or IPN002 expression driven by ubiquitous or cell-type specific promoters were tested.

TABLE 142
PT3 & IPN002 Constructs for in vitro testing in primary cultures

| | SEQ | |
|---|---|---|
| Construct ID | ID NO: | Configuration |
| TAU_ITR104 | 2154 | CAG PT3 F2a HL |
| TAU_ITR108 | 2158 | CAG PTS F2a LH |
| TAU_ITR112 | 2162 | CAG PT3 T2A HL |
| TAU_ITR116 | 2166 | CAG PT3 T2a LH |
| TAU_ITR103 | 2153 | CBA PT3 F2a HL |
| TAU_ITR107 | 2157 | CBA PT3 F2a LH |
| TAU_ITR111 | 2161 | CBA PT3 T2A HL |
| TAU_ITR115 | 2165 | CBA PT3 T2a LH |
| TAU_ITR105 | 2155 | GFAP PT3 F2a HL |
| TAU_ITR109 | 2159 | GFAP PT3 F2A LH |
| TAU_ITR113 | 2163 | GFAP PT3 T2A HL |
| TAU_ITR117 | 2167 | GFAP PT3 T2A LH |
| TAU_ITR106 | 2156 | Syn PT3 F2a HL |
| TAU_ITR110 | 2160 | Syn PT3 F2a LH |
| TAU_ITR114 | 2164 | Syn PT3 T2A HL |
| TAU_ITR118 | 2168 | Syn PT3 T2a LH |
| TAU_ITR1 | 1990 | CAG.IPN002.HC.T2A.LC |
| TAU_ITR10 | 1999 | CAG.IPN002.LC.T2A.HC |
| TAU_ITR4 | 1993 | CBA.IPN002.HC.T2A.LC |
| TAU_ITR87 | 2137 | CBA.IPN002.LC.T2A.HC |
| TAU_ITR2 | 1991 | CAG.IPN002.HC.F2A.LC |
| TAU_ITR9 | 1998 | CAG.IPN002.LC.F2A.HC |
| TAU_ITR3 | 1992 | CBA.IPN002.HC.F2A.LC |
| TAU_ITR11 | 2000 | CBA.IPN002.LC.F2A.HC |

[1471] Cultures were confirmed to be approximately 60-70% neuronal as measured by NeuN staining. On DIV7, cells were fixed in 4% paraformaldehyde and 4% sucrose in PBS for 15 minutes followed by four PBS washes and used for immunocytochemical experiments. Cells were blocked with 3% BSA and 0.05% saponin in PBS for 1 hour at room temperature. Cells were stained with primary antibodies for IgG, GFAP, and NeuN and incubated overnight at 4 C in blocking buffer, then washed with four PBS washes. Cells were stained in secondary antibodies (1:1000 in blocking buffer) and incubated for 1 hour at room temperature followed by four washes in PBS. Höechst was applied at 1:1000 in PBS at room temperature for 15 minutes to stain nuclei, then washed four times with PBS. Imaging was performed using a BioTek Cytation 5. When transduced at 1E4 to 3E6 vg/cell, viral genomes comprising a GFAP-promoter, namely TAU_ITR109 (SEQ ID NO: 2159) TAU_ITR113 (SEQ ID NO:2163): TAU_ITR117 (SEQ ID NO: 2167) showed exclusive expression in GFAP positive astrocytes whereas viral genomes comprising a synapsin promoter, namely TAU_ITR106 (SEQ ID NO: 2156); TAU_ITR110 (SEQ ID NO: 2160); TAU_ITR114 (SEQ ID NO: 2164); TAU_ITR118 (SEQ ID NO: 2168), showed exclusive expression in NeuN positive neurons.

[1472] The percentage PT3 positive cells obtained by immunocytochemistry are shown in Table 143.

TABLE 143
% PT3 positive cells

| | Vg/cell | | |
|---|---|---|---|
| ITR ID | 3.33E+05 | 1.00E+06 | 3.00E+06 |
| TAU_ITR104 | 51.15 | 71.58 | 52.4 |
| | 56.31 | 69.06 | 57.72 |
| TAU_ITR108 | 60.94 | 73.51 | 81.1 |
| | 57.39 | 73.21 | 77.94 |
| TAU_ITR112 | 78.7 | 66.12 | 55.97 |
| | 62.31 | 57.62 | 59.5 |
| TAU_ITR116 | 30.28 | 52.03 | 71.06 |
| | 25.12 | 55.21 | 61.07 |
| TAU_ITR103 | 42.05 | 58.82 | 69.26 |
| | 53.65 | 64.46 | 68.38 |
| TAU_ITR107 | 31.7 | 51.4 | 82.18 |
| | 35.18 | 56.07 | 69.55 |
| TAU_ITR111 | 52.14 | 60.63 | 74.48 |
| | 56.23 | 59.93 | 51.03 |
| TAU_ITR115 | 22.54 | 45.92 | 57.17 |
| | 20 | 43.56 | 47.05 |

[1473] Among the CAG and CBA promoter driven constructs, higher percentage of PT3 positive cells was observed when the vg/cell concentration was increased. Some variations in the percentage PT3 positive cells was observed at the 3.33E+05 vg/cell concentration. But higher vg/cell concentrations showed similar % PT3 cells across the different constructs.

[1474] The percentage IPN002 positive cells obtained by immunocytochemistry are shown in Table 144.

TABLE 144
% IPN002 positive cells (ng/ml)

| | Vg/cell | | |
|---|---|---|---|
| ITR ID | 3.33E+05 | 1.00E+06 | 3.00E+06 |
| TAU_ITR1 | 25.17 | 38.95 | 56.4 |
| (CAG.IPN002.HC.T2A.LC) | 22 | 31 | 55.16 |
| TAU_ITR10 | 7.66 | 23.36 | 40.83 |
| (CAG.IPN002.LC.T2A.HC) | 7.33 | 20.96 | 35.51 |
| TAU_ITR2 | 1.31 | 9.72 | 21.45 |
| (CAG.IPN002.HC.F2A.LC) | 0.64 | 6.62 | 17.65 |
| TAU_ITR9 | 4.85 | 16.4 | 27.13 |
| (CAG.IPN002.LC.F2A.HC) | 3.34 | 13.42 | 26.57 |
| TAU_ITR4 | 10.82 | 23.65 | 38.77 |
| (CBA.IPN002.HC.T2A.LC) | 9.01 | 21.59 | 31.08 |
| TAU_ITR87 | 1.9 | 7.85 | 21.61 |
| (CBA.IPN002.LC.T2A.HC) | 1.38 | 6.34 | 15.31 |
| TAU_ITR3 | 3.2 | 7.94 | 20.58 |
| (CBA.IPN002.HC.F2A.LC) | 2.65 | 6.33 | 17.48 |
| TAU_ITR11 | 5.45 | 14.96 | 23.64 |
| (CBA.IPN002.LC.F2A.HC) | 3.49 | 10.49 | 20.4 |

[1475] Among the CAG and CBA promoter driven constructs, higher percentage of IPN002 positive cells was observed when the vg/cell concentration was increased. Some variations in the percentage PT3 positive cells was observed at the 3.33E+05 vg/cell concentration. In all three vg/cell concentrations tested TAU_ITR1 (CAG.IPN002.HC.T2A.LC) showed the highest percentage of IPN002 expression.

[1476] The supernatant collected on DIV7 (3 days after transduction) was used along with IgG1 mouse uncoated ELISA kit (ThermoFisher) for quantification of antibody/mL (ms IgG ng/mL). Comparison between the CAG promoter driven constructs (TAU_ITR112, TAU_ITR116, TAU_ITR104, TAU_ITR108) and CBA promoter driven constructs (TAU_ITR111, TAU_ITR115, TAU_ITR103, TAU_ITR107) comprising either a T2A cleavage site or F2A cleavage site showed that the CBA promoter provides more robust expression of PT3 when combined with T2A, as compared to CBA promoter driven PT3 expression combined with a T2A cleavage site. Further, viral genomes comprising a CAG or CBA promoter and a T2A cleavage site provided more robust PT3 expression than viral genomes comprising an F2A linker.

[1477] PT3 expression data are shown in Table 145.

TABLE 145
PT3 expression

| | Vg/cell | | |
|---|---|---|---|
| ITR ID | 3.33E+05 | 1.00E+06 | 3.00E+06 |
| TAU_ITR104 | 7.69 | 8.578 | 7.29 |
| | 7.657 | 8.289 | 6.681 |
| TAU_ITR108 | 10.03 | 11.05 | 12.58 |
| | 9.30 | 12.30 | 13.79 |
| TAU_ITR112 | 39.92 | 30.24 | 22.68 |
| | 37.07 | 29.00 | 21.74 |
| TAU_ITR116 | 17.16 | 28.18 | 34.44 |
| | 19.14 | 27.62 | 37.22 |
| TAU_ITR103 | 8.55 | 9.65 | 7.56 |
| | 7.18 | 11.58 | 9.23 |
| TAU_ITR107 | 6.32 | 9.02 | 9.06 |
| | 7.21 | 9.04 | 8.92 |
| TAU_ITR111 | 31.16 | 29.70 | 30.65 |
| | 34.09 | 39.55 | 38.47 |
| TAU_ITR115 | 14.70 | 20.02 | 21.02 |
| | 17.12 | 22.13 | 24.07 |

[1478] Among the constructs tested, TAU_ITR112 (CAG PT3 T2A HL), TAU_ITR111 (CBA PT3 T2A HL) with T2A.HL format showed comparatively higher PT3 expression levels than the other constructs tested. TAU_ITR115 with CBA PT3 T2A LH also showed high PT3 expression at the 1.00E+06 vg/cell concentration.

[1479] The PT3 expression (ng/ml) in primary hippocampal neurons when comprising a T2A cleavage site was higher than when an F2A cleavage site was used. A similar observation was made in vivo in the hippocampus and CSF of mice transduced with AAV particles comprising PT3 encoding viral genomes.

[1480] As a comparison, PT3 expression levels obtained by ELISA were compared to IPN002 antibody expression levels (ng/ml) and are shown in Table 146.

TABLE 146
IPN002 expression (ng/ml)

| | Vg/cell | | |
|---|---|---|---|
| ITR ID | 3.33E+05 | 1.00E+06 | 3.00E+06 |
| TAU_ITR1 | 25.17 | 38.95 | 56.4 |
| (CAG.IPN002.HC.T2A.LC) | 22 | 31 | 55.16 |
| TAU_ITR10 | 7.66 | 23.36 | 40.83 |
| (CAG.IPN002.LC.T2A.HC) | 7.33 | 20.96 | 35.51 |
| TAU_ITR2 | 1.31 | 9.72 | 21.45 |
| (CAG.IPN002.HC.F2A.LC) | 0.64 | 6.62 | 17.65 |
| TAU_ITR9 | 4.85 | 16.4 | 27.13 |
| (CAG.IPN002.LC.F2A.HC) | 3.34 | 13.42 | 26.57 |
| TAU_ITR4 | 10.82 | 23.65 | 38.77 |
| (CBA.IPN002.HC.T2A.LC) | 9.01 | 21.59 | 31.08 |
| TAU_ITR87 | 1.9 | 7.85 | 21.61 |
| (CBA.IPN002.LC.T2A.HC) | 1.38 | 6.34 | 15.31 |
| TAU_ITR3 | 3.2 | 7.94 | 20.58 |
| (CBA.IPN002.HC.F2A.LC) | 2.65 | 6.33 | 17.48 |
| TAU_ITR11 | 5.45 | 14.96 | 23.64 |
| (CBA.IPN002.LC.F2A.HC) | 3.49 | 10.49 | 20.4 |

[1481] In general, an increase in vg/cell concentrations resulted in higher IPN002 expression levels. The CAG promoter based constructs showed higher IPN002 expression when compared to CBA promoter driven expression.

[1482] The IPN002 expression (ng/ml) in primary hippocampal neurons when comprising a T2A cleavage site was higher than when an F2A cleavage site was used. A similar observation was made in vivo in the hippocampus and CSF of mice transduced with AAV particles comprising the IPN002 encoding viral genomes.

[1483] Taken together these data suggest that viral genomes comprising a T2A cleavage site may contribute to greater antibody expression than when an F2A cleavage site is used.

### Example 19. Expression and Distribution of scFv Based Anti-Tau Antibody Constructs

[1484] Testing of IPN002 scFv Viral Genomes In Vivo in Mice

[1485] To study anti-tau scFv antibody expression driven by CAG promoter in serum, CSF and/or CNS tissue of mice after intravenous delivery of AAV particles, viral genomes TAU_ITR139 (SEQ ID NO. 2189) and TAU_ITR152 (SEQ ID NO. 2202) were each packaged into VOY101 capsids. AAV particles were formulated in PBS and provided intravenously at a dose of 1.4×10¹³ vg/kg to 2 month-old female C57Bl/6 mice. 28 days after administration, mice were euthanized and CSF and/or tissue samples (hippocampus, cortex, thalamus, brain stem, spinal cord, olfactory bulb, liver, skeletal muscle) were collected for analysis. Study design is shown in Table 147.

TABLE 147
IPN002 IV study design

| | | SEQ | | | | | | End |
|---|---|---|---|---|---|---|---|---|
| | TAU_ITR | ID | | Dose | Dose | | | of |
| AAV Particle | ID | NO: | μl | (vg/kg) | (vg) | Route | N | study |
| IPN002.scFv.CAG.HL.G4S-3 | TAU_ITR139 | 2189 | 100 | 1.4 × 10¹³ | 2.8 × 10¹¹ | IV | 6 | Day 28 |
| IPN002.scFv.CAG.LH.G4S-3 | TAU_ITR152 | 2202 | 100 | 1.4 × 10¹³ | 2.8 × 10¹¹ | IV | 6 | Day 28 |
| PBS | — | — | 100 | — | — | IV | 4 | Day 28 |

[1486] Vector genome was quantified for a subset of tissues, such as for brain, CSF, and/or peripheral tissue (e.g. liver) by droplet digital PCR and normalized per diploid cell (VG/DC). Antibody levels in the hippocampus, cortex, olfactory bulb, brainstem, spinal cord, liver, serum, and CSF were quantified using ePHF ELISA, as described above. Vector genome biodistribution quantification (VG/DC) is shown in Table 148.

TABLE 148
Vector genome quantification of VOY101.IPN002
constructs (AAV genomes/cell)

| TAU_ITR ID | | | Olfactory | | | Spinal |
|---|---|---|---|---|---|---|
| (SEQ ID NO.) | Hippocampus | Cortex | bulb | Thalamus | Brainstem | Cord |
| TAU_ITR139 | 33.49 | 24.86 | 34.14 | 47.33 | 59.68 | 38.72 |
| (SEQ ID NO. | 37.06 | 23.72 | 63.95 | 58.46 | 71.12 | 141.68 |
| 2189) | 14.34 | 22.12 | 33.61 | 35.87 | 62.59 | 49.55 |
| | 11.32 | 19.52 | 55.37 | 33.25 | 48.86 | 36.27 |
| | 34 | 31.09 | 58.12 | 46.73 | 61.29 | 37.2 |
| | 20.28 | 33 | 50.18 | 48.68 | 83.83 | 106.23 |
| Average | 25.08 | 25.72 | 49.23 | 45.05 | 64.56 | 68.28 |
| TAU_ITR152 | 23.08 | 15.86 | 30.25 | 59.11 | 52.76 | 79.12 |
| (SEQ ID NO. | 2.78 | 3.38 | 10.85 | 6.84 | 9.77 | 12.14 |
| 2202) | 17.73 | 24.05 | 14.82 | 28.73 | 38.81 | 28.67 |
| | 32.01 | 25.15 | 43.66 | 73.5 | 79.95 | 116.56 |
| | 17.37 | 21.38 | 28.08 | 33.4 | 51.58 | 42.41 |
| | 3.46 | 8.82 | 7.33 | 11.04 | 16.31 | 10.79 |
| Average | 16.07 | 16.44 | 22.50 | 35.44 | 41.53 | 48.28 |
| Vehicle (PBS) | 0 | 0 | 0 | 0 | 0 | 0 |

[1487] Subsequent to intravenous delivery of IPN002-scFv VOY101 particles, biodistribution was observed in all CNS tissue noted in Table 148. Higher viral genome levels per diploid cell were observed with TAU_ITR139 (SEQ ID NO. 2189) with the IPN002.scFv.CAG.HL.G4S-3 (heavy-linker-light) configuration compared to TAU_ITR152 (SEQ ID NO. 2202) with the IPN002.scFv.CAG.LH.G4S-3 (light-linker-heavy) configuration.

[1488] ePHF ELISA was used to assess IPN002 antibody expression in tissues collected after intravenous injection of IPN002-scFv VOY101 particles. Samples of hippocampus, cortex, olfactory bulb, thalamus, brain stem and spinal cord were analyzed. Data are shown in Table 149 and Table 150 as ng/mg of protein and as normalized sFv/vg respectively.

TABLE 149
IPN002 expression in the CNS

| | Hippocampus | | Cortex | | Olfactory bulb | |
|---|---|---|---|---|---|---|
| TAU_ITR ID | ng/mg | | ng/mg | | ng/mg | |
| (SEQ ID NO.) | protein | scFv/Vg | protein | scFv/Vg | protein | scFv/Vg |
| TAU_ITR139 | 352.56 | 10.53 | 590.74 | 23.76 | 1096.45 | 32.12 |
| (SEQ ID NO. | 422.05 | 11.39 | 578.91 | 24.41 | 1147.95 | 17.95 |
| 2189) | 446.11 | 31.11 | 714.68 | 32.30 | 1011.01 | 30.08 |
| | 400.01 | 35.34 | 580.23 | 29.72 | 660.91 | 11.94 |
| | 448.99 | 13.20 | 629.62 | 20.25 | 1197.19 | 20.60 |
| | 505.11 | 24.90 | 757.7 | 22.96 | 1126.88 | 22.46 |
| Average | 429.14 | 21.08 | 641.98 | 25.57 | 1040.07 | 22.53 |
| TAU_ITR152 | 194.52 | 8.43 | 358.57 | 22.61 | 465.66 | 15.39 |
| (SEQ ID NO. | 24.19 | 8.69 | 33.18 | 9.81 | 44.32 | 4.08 |
| 2202) | 74.93 | 4.23 | 138.41 | 5.76 | 225.37 | 15.20 |
| | 233.75 | 7.30 | 454.64 | 18.08 | 599.41 | 13.73 |
| | 292.5 | 16.84 | 464.74 | 21.74 | 772.8 | 27.52 |
| | 57.63 | 16.66 | 95.61 | 10.84 | 190.22 | 25.93 |
| Average | 146.25 | 10.36 | 257.53 | 14.81 | 382.96 | 16.98 |
| Vehicle (PBS) | 0 | 0 | 0 | 0 | 0 | 0 |

TABLE 150
IPN002 expression in CNS and spinal cord

| TAU_ITR | Thalamus | | Brainstem | | Spinal Cord | |
|---|---|---|---|---|---|---|
| ID (SEQ ID | ng/mg | scFv/V | ng/mg | | ng/mg | |
| NO.) | protein | g | protein | scFv/Vg | protein | scFv/Vg |
| TAU_ITR139 | 639.27 | 13.51 | 639.49 | 10.71 | 883.76 | 22.82 |
| (SEQ ID NO. | 808.44 | 13.83 | 1296.27 | 18.23 | 836.37 | 5.90 |
| 2189) | 700.65 | 19.54 | 887.67 | 14.18 | 879.74 | 17.75 |
| | 763.33 | 22.96 | 1043.87 | 21.37 | 870.09 | 23.99 |
| | 786.91 | 16.84 | 675.48 | 11.02 | 986.58 | 26.52 |
| | 913.07 | 18.76 | 1128.73 | 13.46 | 744.17 | 7.01 |
| Average | 768.61 | 17.57 | 945.25 | 14.83 | 866.79 | 17.33 |
| TAU_ITR152 | 553.21 | 9.36 | 505.81 | 9.59 | 793.3 | 10.03 |
| (SEQ ID NO. | 54.94 | 8.04 | 78.31 | 8.01 | 99.97 | 8.23 |
| 2202) | 223.88 | 7.79 | 214.98 | 5.54 | 458.31 | 15.99 |
| | 522.09 | 7.10 | 656.5 | 8.21 | 900.14 | 7.72 |
| | 702.19 | 21.02 | 645.19 | 12.51 | 486.98 | 11.48 |
| | 161.88 | 14.66 | 266.84 | 16.35 | 202.79 | 18.79 |
| Average | 369.70 | 11.33 | 394.61 | 10.03 | 490.25 | 12.04 |
| Vehicle (PBS) | 0 | 0 | 0 | 0 | 0 | 0 |

[1489] High levels of IPN scFv were observed in the hippocampus, cortex and olfactory bulb of the mice dosed with IPN scFv vectors. Higher IPN scFv levels were observed with TAU_ITR139 (SEQ ID NO. 2189) with the IPN002.scFv.CAG.HL.G4S-3 viral genome configuration as compared to TAU_ITR152 (SEQ ID NO. 2202) with the IPN002.scFv.CAG.LH.G4S-3 viral genome configuration.

[1490] In serum and CSF samples collected on the terminal day, quantification of the IPN002 antibody expression demonstrated enhanced expression of IPN002 when delivered with VOY101 and driven by the CAG promoter. Consistent with other tissues, higher IPN scFv levels were observed with TAU_ITR139 (SEQ ID NO. 2189) with the IPN002.scFv.CAG.HL.G4S-3 configuration as compared to TAU_ITR152 (SEQ ID NO. 2202) with the IPN002.scFv.CAG.LH.G4S-3 configuration. These results are shown in Table 151.

TABLE 151
IPN002 expression in CSF and Serum

| TAU_ITR ID | CSF | | Serum | |
|---|---|---|---|---|
| (SEQ ID NO.) | ng/ml | nM scFv | ng/ml | nM scFv |
| TAU_ITR139 | 11926.1 | 477.04 | 54921 | 2196.84 |
| (SEQ ID NO. 2189) | 9711.8 | 388.47 | 119105 | 4764.20 |
| | 9993.2 | 399.73 | 59057 | 2362.28 |
| | 9846.95 | 393.88 | 28863.5 | 1154.54 |
| | 11596.75 | 463.87 | 59741.5 | 2389.66 |
| | — | — | 124490.5 | 4979.62 |
| Average | 10614.96 | 424.60 | 74363.08 | 2974.52 |
| TAU_ITR152 | 4702.4 | 188.10 | 9443.8 | 377.75 |
| (SEQ ID NO. 2202) | 1034.7 | 41.39 | 1083.95 | 43.36 |
| | 9470.5 | 378.82 | 844.85 | 33.79 |
| | 10020.6 | 400.82 | 3451.05 | 138.04 |
| | 3368.35 | 134.73 | 5346.7 | 213.87 |
| | — | — | 1351.75 | 54.07 |
| Average | 5719.31 | 228.77 | 3587.017 | 143.48 |
| Vehicle (PBS) | 0 | 0 | 0 | 0 |

[1491] Liver samples collected on the terminal day, showed low IPN002 antibody expression and biodistribution of AAV genomes when delivered with VOY101. The results are shown in Table 152.

TABLE 152
Vector genome quantification and IPN002 expression in Liver

| Construct | Genome/cell | scFv/mg |
|---|---|---|
| TAU_ITR139 | 7.50 | 222.83 |
| (SEQ ID NO. 2189) | 19.36 | 332.41 |
| | 9.18 | 289.83 |
| | 4.62 | 169.14 |
| | 7.79 | 256.53 |
| | 13.16 | 349.19 |
| Average | 10.27 | 269.99 |
| TAU_ITR152 | 7.99 | 127.28 |
| (SEQ ID NO. 2202) | 0.36 | 12.55 |
| | 0.22 | 9.41 |
| | 2.87 | 42.79 |
| | 3.13 | 90.54 |
| | 0.59 | 19.05 |
| Average | 2.53 | 50.27 |
| vehicle | 0 | 0 |

[1492] Consistent with other tissues, the liver demonstrated higher IPN scFv levels with delivery of TAU_ITR139 (SEQ ID NO. 2189) with the IPN002.scFv.CAG.HL.G4S-3 configuration as compared to with delivery of TAU_ITR152 (SEQ ID NO. 2202) with the IPN002.scFv.CAG.LH.G4S-3 configuration.

[1493] Brain tissue samples were collected on the terminal day and fixed with 4% PFA for immunohistochemistry. Anti-IgG immunohistochemistry of brain tissue collected from mice injected with VOY101.IPN002-scFv AAV particles driven by CAG promoters and one of viral genome configurations (HL or LH) showed broad antibody expression across mouse CNS, but stronger staining in tissue of mice treated with HL configuration as compared to the LH configuration. Vehicle-treated control animals exhibited low background levels of staining. Expression of IPN002 antibody was observed in a non-cell type specific manner (neurons and astrocytes showed staining) across multiple brain regions, as may be expected when using ubiquitous promoters. Expression of IPN002 was also observed in the spinal cord.

[1494] Taken together, these data indicate that the ubiquitous CAG promoter may effectively drive IPN002 expression in CNS tissue of mice, with limited concomitant expression in peripheral tissues, such as the liver.

[1495] The IPN002 scFv expression levels in the hippocampus and cortex were compared to expression levels of full-length PT3 antibody, IPN002 Fab fragment and IPN002 F(ab′)2 fragment. Both the heavy chain-linker-light chain format as well as the light chain-linker-heavy chain format was considered for this analysis. Comparison of the expression levels showed that the scFv format resulted in higher expression in both the hippocampus and the cortex as compared to the other formats (e.g., full length antibody, Fab or F(ab′)2 fragment). PT3 expression levels of the full-length antibody in the heavy-linker-light chain format was higher than IPN002 expression from Fab or F(ab′)2 fragments.

Testing of PT3 scFv Viral Genomes In Vivo in Mice

[1496] To study anti-tau antibody PT3 scFv levels in serum, CSF and/or CNS tissue of mice after intravenous delivery of vector, viral genomes TAU_ITR162 (SEQ ID NO: 2212). TAU_ITR168 (SEQ ID NO: 2218); TAU_ITR165 (SEQ ID NO: 2215) were packaged into VOY101 capsids. AAV particles were formulated in PBS and provided intravenously at a dose of 1.4×10¹³ vg/kg into 2 month-old female C57Bl/6 mice. Twenty-eight days after administration, mice were sacrificed and CSF and/or tissue samples (hippocampus, cortex, thalamus, brain stem, spinal cord, olfactory bulb, liver, spleen) were collected for analysis. Study design is shown in Table 153.

TABLE 153
PT3 IV study design

| | | SEQ | | | | | | End |
|---|---|---|---|---|---|---|---|---|
| | TAU_ITR | ID | | Dose | Dose | | | of |
| AAV Particle | ID | NO: | μL | (vg/kg) | (vg) | Route | N | study |
| ssAAV CAG PT3 VL G4S-3 | TAU_ITR162 | 2212 | 100 | 1.4 × 10¹³ | 2.8 × 10¹¹ | IV | 6 | Day 28 |
| VH HA rBGpA | | | | | | | | |
| ssAAV SYN PTS VL G4S-3 | TAU_ITR168 | 2218 | 100 | 1.4 × 10¹³ | 2.8 × 10¹¹ | IV | 6 | Day 28 |
| VH HA rBGpA | | | | | | | | |
| ssAAV GFAP PT3 VL G4S-3 | TAU_ITP165 | 2215 | 100 | 1.4 × 10¹³ | 2.8 × 10¹¹ | IV | 6 | Day 28 |
| VH HA rBGpA | | | | | | | | |
| PBS | — | — | 100 | — | — | IV | 4 | Day 28 |

[1497] Vector genome distribution was quantified for a subset of tissues, such as for brain, CSF, and/or peripheral tissue (e.g. liver and spleen) by droplet digital PCR and normalized per diploid cell (VG/DC). Antibody levels in the hippocampus, cortex, olfactory bulb, brainstem, spinal cord, liver, serum, and CSF were quantified using ePHF ELISA, as described above. Vector genome biodistribution quantification (VG/DC) is shown in Table 154.

TABLE 154
Biodistribution of PT3-scFv viral genomes (AAV genomes/cell)

| | | | Olfactory | | | Spinal |
|---|---|---|---|---|---|---|
| Construct | Hippocampus | Cortex | bulb | Thalamus | Brainstem | Cord |
| TAU_ITR168 | 10.40 | 8.63 | 12.60 | 32.13 | 20.31 | 9.53 |
| | 17.99 | 28.95 | 23.63 | 23.19 | 18.93 | 19.91 |
| | 9.20 | 6.32 | 20.24 | 21.44 | 23.49 | 31.58 |
| | 10.05 | 7.93 | 42.50 | 22.96 | 26.33 | 37.08 |
| | 13.67 | 8.67 | 12.63 | 29.11 | 33.83 | 20.46 |
| | 2.17 | 2.02 | 2.05 | 2.85 | 5.32 | 2.27 |
| | 11.58 | — | 18.11 | 23.05 | 45.04 | 66.61 |
| Average | 10.72 | 10.42 | 18.82 | 22.10 | 24.75 | 26.78 |
| TAU_ITR165 | 34.22 | 35.57 | 24.41 | 37.06 | 36.65 | 52.59 |
| | 5.89 | 13.29 | 6.17 | 9.49 | 9.98 | 23.06 |
| | 9.99 | 4.37 | 6.47 | 22.11 | 13.10 | 24.12 |
| | 32.62 | 46.88 | 63.20 | 79.94 | 80.27 | 84.26 |
| | 46.54 | 33.49 | 55.83 | 50.40 | 57.67 | 72.87 |
| | 33.88 | 15.20 | 62.29 | 74.33 | 72.13 | 121.54 |
| Average | 27.19 | 24.80 | 36.40 | 45.56 | 44.97 | 63.07 |
| TAU_ITR162 | 6.27 | 5.58 | 6.14 | 11.32 | 21.80 | 20.95 |
| | 13.76 | 13.39 | 14.91 | 21.34 | 44.88 | 57.40 |
| | 15.32 | 14.09 | 19.04 | 21.52 | 19.58 | 13.56 |
| | 14.26 | 12.43 | 26.25 | 61.08 | 49.97 | 142.85 |
| | 3.45 | 3.13 | 4.94 | 13.09 | 15.98 | 14.07 |
| | 9.22 | 9.15 | 41.04 | 17.63 | 38.43 | 22.21 |
| Average | 10.38 | 9.63 | 18.72 | 24.33 | 31.77 | 45.17 |
| Vehicle (PBS) | 0 | 0 | 0 | 0 | 0 | 0 |

[1498] Subsequent to intravenous delivery of PT3-scFv VOY101 particles, biodistribution was observed in all tissues noted in Table 154. Higher viral genome levels per diploid cell were observed in hippocampus, cortex, olfactory bulb and thalamus with TAU_ITR165 with the ssAAV GFAP PT3 VL G4S-3 VH HA rBGpA configuration compared to the other two constructs.

[1499] ePHF ELISA was used to assess PT3 antibody expression in tissues collected after intravenous injection of VOY101 particles. Samples of hippocampus, cortex, olfactory bulb, thalamus, brain stem and spinal cord were analyzed. Data are shown in Table 155 and Table 156 as ng/mg of protein and as normalized scFv/vg.

TABLE 155
PT3 expression in the CNS

| | Hippocampus | | Cortex | | Olfactory bulb | |
|---|---|---|---|---|---|---|
| | ng/mg | | ng/mg | | ng/mg | |
| Construct | protein | scFv/Vg | protein | scFv/Vg | protein | scFv/Vg |
| TAU_ITR168 | 0 | 0.00 | 3.63 | 0.42 | 3.69 | 0.29 |
| | 0 | 0.00 | 3.04 | 0.11 | 3.75 | 0.16 |
| | 0 | 0.00 | 2.50 | 0.40 | — | 0.00 |
| | 0.98 | 0.10 | 2.74 | 0.35 | 2.48 | 0.06 |
| | 0 | 0.00 | 3.66 | 0.42 | 8.17 | 0.65 |
| | 0 | 0.00 | 2.68 | 1.33 | — | 0.00 |
| | — | 0.00 | 2.64 | — | 1 | 0.06 |
| Average | 0.16 | 0.01 | 2.98 | 0.50 | 3.82 | 0.17 |
| TAU_ITR165 | 4.03 | 0.12 | 25.74 | 0.72 | 47.4 | 1.94 |
| | 0 | 0.00 | 2.95 | 0.22 | 1.14 | 0.18 |
| | 0 | 0.00 | 2.50 | 0.57 | 4.69 | 0.72 |
| | 2.26 | 0.07 | 16.53 | 0.35 | 39.03 | 0.62 |
| | 8.12 | 0.17 | 22.94 | 0.69 | 119.67 | 2.14 |
| | 0.99 | 0.03 | 5.36 | 0.35 | 28.34 | 0.45 |
| Average | 2.57 | 0.07 | 12.67 | 0.48 | 40.05 | 1.01 |
| TAU_ITR162 | 1.8 | 0.29 | 7.67 | 1.37 | 22.36 | 3.64 |
| | 5.35 | 0.39 | 15.81 | 1.18 | 53.01 | 3.56 |
| | 17.84 | 1.16 | 46.60 | 3.31 | 83.61 | 4.39 |
| | 18.15 | 1.27 | 67.42 | 5.42 | 146.79 | 5.59 |
| | 0.97 | 0.28 | 5.64 | 1.80 | 16.3 | 3.30 |
| | 8.47 | 0.92 | 53.74 | 5.87 | 119.46 | 2.91 |
| Average | 8.76 | 0.72 | 32.81 | 3.16 | 73.59 | 3.90 |
| Vehicle (PBS) | 0 | 0 | 0 | 0 | 0 | 0 |

TABLE 156
PT3 expression CNS and Spinal Cord

| | Thalamus | | Brainstem | | Spinal cord | |
|---|---|---|---|---|---|---|
| | ng/mg | | ng/mg | | ng/mg | |
| Construct | protein | scFv/Vg | protein | scFv/Vg | protein | scFv/Vg |
| TAU_ITR168 | 43.31 | 1.35 | 10.96 | 0.54 | 45.01 | 4.72 |
| | 6.8 | 0.29 | 84.36 | 4.46 | 101.41 | 5.09 |
| | 5.41 | 0.00 | 9.93 | 0.00 | 20.4 | 0.00 |
| | 8.68 | 0.38 | 40.66 | 1.54 | 46.43 | 1.25 |
| | 9.39 | 0.32 | 70.55 | 2.09 | 151.37 | 7.40 |
| | 0.18 | 0.06 | 1.18 | 0.22 | 0.78 | 0.34 |
| | 0.47 | 0.02 | 4.53 | 0.10 | 10.41 | 0.16 |
| Average | 10.61 | 0.35 | 31.74 | 1.28 | 53.69 | 2.71 |
| TAU_ITR165 | 4.74 | 0.13 | 25.21 | 0.69 | 47.53 | 0.90 |
| | 0.46 | 0.05 | — | 0.00 | 0.75 | 0.03 |
| | 0.31 | 0.01 | — | 0.00 | 1.16 | 0.05 |
| | 2.02 | 0.03 | 53.61 | 0.67 | 41.26 | 0.49 |
| | 7.38 | 0.15 | 30.78 | 0.53 | 42.07 | 0.58 |
| | 1.66 | 0.02 | 17.33 | 0.24 | 12.04 | 0.10 |
| Average | 2.76 | 0.06 | 31.73 | 0.35 | 24.14 | 0.36 |
| TAU_ITR162 | 8.5 | 0.75 | 29.97 | 1.37 | 63.13 | 3.01 |
| | 9.7 | 0.45 | 108.83 | 2.43 | 60 | 1.05 |
| | 52.26 | 2.43 | 119.14 | 6.08 | 91.33 | 6.73 |
| | 34.43 | 0.56 | 86.61 | 1.73 | 102.92 | 0.72 |
| | 11.48 | 0.88 | 25.31 | 1.58 | 58.59 | 4.16 |
| | 26.63 | 1.51 | 108.26 | 2.82 | 61.24 | 2.76 |
| | — | — | 29.97 | — | — | — |
| Average | 23.83 | 1.10 | 79.69 | 2.67 | 72.87 | 3.07 |
| Vehicle (PBS) | 0 | 0 | 0 | 0 | 0 | 0 |

[1500] PT3 scFv was observed in the hippocampus, cortex, olfactory bulb, thalamus, brainstem and spinal cord tissue of the mice dosed with PT3 scFv vectors. Higher PT3 scFv levels were observed with TAU_ITR62 with the ssAAV CAG PT3 VL G4S-3 VH HA rBGpA format as compared to the other two constructs.

[1501] In the serum and CSF samples collected on the terminal day, quantification of the PT3 antibody expression demonstrated enhanced expression of PT3 when delivered with VOY101. Consistent with other tissues, higher PT3 scFv levels were observed with TAU_ITR162 with the ssAAV CAG PT3 VL G4S-3 VH HA rBGpA as compared to the other two constructs. These results are shown in Table 157.

TABLE 157
PT3 expression in CSF and Serum

| | |
|---|---|
| CSF | Serum |

| Constructs | ng/ml | nM scFv | ng/ml | nM scFv |
|---|---|---|---|---|
| TAU_ITR168 | 41.65 | 1.67 | 0 | 0.00 |
| | 60.35 | 2.41 | — | 0.00 |
| | 53.1 | 2.12 | — | 0.00 |
| | 65.8 | 0.26 | — | 0.00 |
| | 6.4 | — | — | |
| Average | 45.46 | 1.62 | 0 | 0 |
| TAU_ITR165 | 79.75 | 3.19 | 120.25 | 4.81 |
| | 19.5 | 0.78 | 89.00 | 3.56 |
| | 85.2 | 3.41 | 22.20 | 0.89 |
| | — | — | 81.75 | 3.27 |
| Average | 61.48 | 2.46 | 78.30 | 3.13 |
| TAU_ITR162 | 66.3 | 2.65 | 78.15 | 3.13 |
| | 151.8 | 6.07 | 63.80 | 2.55 |
| | 166.1 | 6.64 | 111.15 | 4.45 |
| | 97.55 | 3.90 | 202.10 | 8.08 |
| | 227.35 | 9.09 | 127.90 | 5.12 |
| | — | — | 147.50 | 5.9 |
| Average | 141.82 | 5.67 | 121.80 | 4.87 |
| Vehicle (PBS) | 0 | 0 | 0 | 0 |

[1502] Liver and spleen samples collected on the terminal day, showed low PT3 antibody expression and biodistribution of AAV genomes when delivered with VOY101. The results are shown in Table 158.

TABLE 158
Vector genome quantification and
PT3 expression in Liver & Spleen

| | Liver | | Spleen | |
|---|---|---|---|---|
| Construct | Genome/cell | scFv ng/mg | Genome/cell | scFv/mg |
| TAU_ITR168 | 1.05 | 2.95 | 1.42 | 1.55 |
| | 1.75 | 2.51 | 7.70 | 1.62 |
| | 0.09 | 1.90 | 2.35 | 1.6 |
| | 0.77 | 1.90 | 4.07 | 2.11 |
| | 1.06 | 1.64 | 22.68 | 1.73 |
| | 0.02 | 2.37 | 0.52 | 2.65 |
| | 0.05 | 2.24 | 18.72 | — |
| Average | 0.68 | 2.22 | 8.21 | 1.88 |
| TAU_ITR165 | 5.31 | 16.11 | 59.87 | 1.56 |
| | 0.07 | 2.66 | 8.09 | 2.01 |
| | 0.57 | 4.25 | 4.40 | 1.85 |
| | 1.94 | 4.28 | 34.42 | 2.86 |
| | 1.50 | 5.54 | 76.93 | 1.41 |
| | 1.34 | 4.85 | 14.45 | 1.79 |
| Average | 1.79 | 6.28 | 33.03 | 1.91 |
| TAU_ITR162 | 1.50 | 5.87 | 16.52 | 2.37 |
| | 0.76 | 6.64 | 2.43 | 1.73 |
| | 2.44 | 12.15 | 2.69 | 2.12 |
| | 3.54 | 24.34 | 4.68 | 1.96 |
| | 2.85 | 19.20 | 2.60 | 2.12 |
| | 2.68 | 13.63 | 8.39 | 1.87 |
| | — | — | — | 0.97 |
| Average | 2.29 | 13.64 | 6.22 | 1.88 |
| Vehicle | 0 | 2.29 | 0 | 1.48 |
| | — | 1.78 | — | 1.6 |
| | — | 2.22 | — | 1.53 |
| | — | 1.77 | — | 1.19 |
| Average | 0 | 2.02 | 0 | 1.45 |

[1503] In comparison to CNS tissues, significantly lower AAV biodistribution was seen in peripheral tissues such as liver and spleen.

[1504] Brain tissue samples were collected on the terminal day and fixed with 4% PFA for immunohistochemistry. Anti-IgG immunohistochemistry of brain tissue collected from mice injected with VOY101.PT3 scFv AAV particles driven by CAG, GFAP or Syn promoters showed broad antibody expression across mouse CNS, but stronger and broader staining pattern was observed in the tissue of mice treated with VOY101.PT3 AAV particles driven by CAG promoter. Vehicle-treated control animals exhibited low background levels of staining. Expression of PT3 was also observed in the spinal cord.

[1505] Taken together, this study shows that PT3 is expressed in CNS tissues of all the experimental groups, with highest expression driven by the CAG promoter and cell-specific expression when driven by GFAP or synapsin promoters.

[1506] The PT3 antibody expression levels in the brain (hippocampus and cortex) and the CSF obtained with an scFv (light chain-linker-heavy chain) were compared to the full length PT3 antibody (light chain-linker-heavy chain). The PT3 levels in the cortex of mice dosed with full length antibody was similar to mice dosed with PT3 scFv. In the CSF, PT3 levels were higher in mice dosed with the full-length antibody as compared to the scFv. These observations were consistent across the different promoters tested i.e. CAG, SYN, and GFAP.

[1507] The PT3 antibody expression levels in the brain (hippocampus and cortex) and the CSF obtained with an scFv (light chain-linker-heavy chain) were compared to the full length PT3 antibody (heavy chain-linker-light chain). The PT3 expression levels in the brain and CSF of mice dosed with full length antibody was higher than the levels in mice dosed with PT3 scFv. In the CSF, PT3 levels were higher in mice dosed with the full-length antibody compared to the scFv. These observations were consistent across the different promoters tested i.e. CAG, SYN, and GFAP.

### Example 20: VOY101.PT3 Promoter and Viral Genome Configuration Studies in Rodents

### Ubiquitous Promoters and T2A or F2 Linkers for PT3 Expression

[1508] To determine the effects of promoters and viral genome configurations on brain distribution, cellular tropism and expression levels of anti-tau antibody PT3 after intravenous delivery, single-stranded viral genomes described in Table 159 were packaged into VOY101 capsid. AAV particles were formulated in 0.001% F-68 and PBS and provided intravenously at a dose of 1.4×10¹³ vg/kg into 2 month-old female C57Bl/6 mice. Twenty-eight days after administration mice were sacrificed, perfused intracardially and CSF, serum, and/or tissue samples (hippocampus, cortex, thalamus, brain stem, spinal cord, olfactory bulb, liver, spleen, skeletal muscle) were collected for analysis. Study design is shown in Table 159 where N=6 for each AAV particle tested.

TABLE 159
PT3 IV study design

| | | SEQ | | | | | End |
|---|---|---|---|---|---|---|---|
| | TAU_ITR | ID | | Dose | Dose | | of |
| AAV Particle | ID | NO: | μL | (vg/kg) | (vg) | Route | study |
| Voy101.CAG.PT3.H.F.T2A.L | TAU_ITR112 | 2162 | 100 | 1.4 × 10¹³ | 2.8 × 10¹¹ | IV | Day 28 |
| Voy101.CAG.PT3.LH.T2 | TAU_ITR116 | 2166 | 100 | 1.4 × 10¹³ | 2.8 × 10¹¹ | IV | Day 28 |
| Voy101.CBA.PT3.H.F.T2A.L | TAU_ITR111 | 2161 | 100 | 1.4 × 10¹³ | 2.8 × 10¹¹ | IV | Day 28 |
| Voy101.CBA.PT3.LH.T2A | TAU_ITR115 | 2165 | 100 | 1.4 × 10¹³ | 2.8 × 10¹¹ | IV | Day 28 |
| Voy101.CAG.PT3.HL.F2 | TAU_ITR104 | 2154 | 100 | 1.4 × 10¹³ | 2.8 × 10¹¹ | IV | Day 28 |
| Voy101.CAG.PT3.LH.F2 | TAU_ITR108 | 2158 | 100 | 1.4 × 10¹³ | 2.8 × 10¹¹ | IV | Day 28 |
| Voy101.CBA.PT3.HL.F2A | TAU_ITR103 | 2153 | 100 | 1.4 × 10¹³ | 2.8 × 10¹¹ | IV | Day 28 |
| Voy101.CBA.PT3.LH.F2A | TAU_ITR107 | 2157 | 100 | 1.4 × 10¹³ | 2.8 × 10¹¹ | IV | Day 28 |

[1509] Vector genome was quantified for a subset of tissues, such as for brain, CSF, and/or peripheral tissue (e.g. liver and spleen) by droplet digital PCR and normalized per diploid cell (VG/DC) using the endogenous mouse transferrin receptor gene (TFRC). Antibody levels in the hippocampus, cortex, olfactory bulb, brainstem, spinal cord, liver, serum, and CSF were quantified using ePHF ELISA with an anti-IgG as the detection antibody, as described above. The VG/DC values for the olfactory bulb (OB), cortex (CTX), hippocampus (HC), thalamus (THL), brainstem (BS), spinal cord (SC), spleen (SPL), liver (LIV) and muscle (MUS) are shown in Table 160. Average vector genome biodistribution quantification (VG/DC) in brain and spinal cord are shown in Table 161 and the peripheral tissues are shown in Table 162.

TABLE 160
Vector genome quantification of VOY101.PT3 constructs (AAV genomes/cell)

| | TAU_ITR112 | TAU_ITR116 | TAU_ITR111 | TAU_ITR115 |
|---|---|---|---|---|
| Tissue | (CAG.HFT2AL) | (CAG.LHT2A) | (CBA.HFT2AL) | (CBA.LHT2A) |
| OB | 11.03 | 25.28 | 11.41 | 15.42 |
| | 6.39 | 11.83 | 27.20 | 11.68 |
| | 11.33 | 20.58 | 36.29 | 18.50 |
| | 17.81 | 14.39 | 14.72 | 20.07 |
| | 8.61 | 17.70 | 46.05 | 14.78 |
| | 5.09 | 27.09 | 12.60 | — |
| | 11.69 | — | 26.53 | — |
| | 11.47 | — | 24.81 | — |
| | 13.20 | — | — | — |
| CTX | 17.56 | 29.89 | 12.05 | 22.36 |
| | 14.16 | 13.84 | 39.46 | 14.14 |
| | 21.45 | 18.43 | 35.00 | 25.34 |
| | 19.58 | 18.94 | 37.14 | 26.28 |
| | 11.55 | 18.12 | 42.07 | 21.75 |
| | 8.47 | 13.02 | 31.06 | — |
| | 14.59 | — | 2.6.68 | — |
| | 12.84 | — | 28.73 | — |
| | 14.91 | — | — | — |
| HC | 13.70 | 19.93 | 7.14 | 15.12 |
| | 27.76 | 17.47 | 20.19 | 25.90 |
| | 10.69 | 19.13 | 19.35 | 25.69 |
| | 20.17 | 11.60 | 18.99 | 23.79 |
| | 10.38 | 14.22 | 21.24 | 15.54 |
| | 14.94 | 17.37 | 16.59 | — |
| | 10.32 | — | 18.77 | — |
| | 13.46 | — | 20.62 | — |
| | 8.39 | — | — | — |
| THL | 25.10 | 38.02 | 14.29 | 43.81 |
| | 23.11 | 37.28 | 50.31 | 38.69 |
| | 15.01 | 57.03 | 42.69 | 62.34 |
| | 26.77 | 43.54 | 52.98 | 64.33 |
| | 40.46 | 30.53 | 42.49 | 29.84 |
| | 19.23 | 24.86 | 20.92 | — |
| | 19.53 | — | 22.68 | — |
| | 26.68 | — | 26.50 | — |
| | 22.20 | — | — | — |
| BS | 24.15 | 68.89 | 19.56 | 60.15 |
| | 26.46 | 45.99 | 60.70 | 34.52 |
| | 74.69 | 47.46 | 64.97 | 87.17 |
| | 26.54 | 43.39 | 66.11 | 43.45 |
| | 9.53 | 50.89 | 45.11 | 44.2.1 |
| | 17.27 | 46.93 | 33.47 | — |
| | 42.60 | — | 39.50 | — |
| | 22.49 | — | 41.19 | — |
| | 22.67 | — | — | — |
| SC | 16.17 | 36.43 | 8.40 | 33.2.1 |
| | 15.00 | 23.51 | 33.91 | 25.42 |
| | 41.81 | 46.00 | 30.21 | 85.83 |
| | 23.25 | 28.88 | 33.69 | 59.40 |
| | 11.11 | 25.02 | 30.41 | 21.07 |
| | 11.43 | 32.08 | 28.01 | — |
| | 15.34 | — | 16.43 | — |
| | 21.09 | — | 35.39 | — |
| | 12.89 | — | — | — |
| Spl | 0.81 | 0.33 | 0.35 | 0.33 |
| | 0.85 | 0.21 | 0.78 | 0.40 |
| | 0.30 | 0.21 | 0.62 | 0.78 |
| | 1.88 | 0.32 | 1.38 | 1.18 |
| | 2.03 | 0.40 | 4.05 | 0.35 |
| | 0.16 | 0.40 | 0.44 | — |
| | 0.00 | — | 0.37 | — |
| | 1.72 | — | 1.20 | — |
| | 0.35 | — | — | — |
| Liv | 2.10 | 4.33 | 10.04 | 5.96 |
| | 3.78 | 1.76 | 7.99 | 1.92 |
| | 3.12 | 4.54 | 6.03 | 2.20 |
| | 3.23 | 2.28 | 42.83 | 4.63 |
| | 2.57 | 3.17 | 27.63 | 2.57 |
| | 0.72 | 3.19 | 8.98 | — |
| | 2.89 | — | 14.96 | — |
| | 3.26 | — | 19.22 | — |
| | 3.00 | — | — | — |
| Mus | 1.39 | 0.45 | 1.09 | 0.58 |
| | 0.84 | 0.44 | 2.80 | 0.58 |
| | 0.72 | 0.46 | 0.74 | 0.54 |
| | 0.62 | 0.64 | 1.98 | 0.59 |
| | 0.23 | 0.43 | 3.56 | 0.35 |
| | 0.30 | 0.34 | 1.94 | — |
| | 0.37 | — | 0.56 | — |
| | 0.85 | — | 0.96 | — |
| | 0.49 | — | — | — |

| | TAU_ITR104 | TAU_ITR108 | TAU_ITR103 | TAU_ITR107 | |
|---|---|---|---|---|---|
| Tissue | (CAG.HLF2A) | (CAG.LHF2A) | (CBA.HLF2A) | (CBA.LHF2A) | PBS |
| OB | 18.95 | 10.14 | 13.81 | 14.12 | 0.00 |
| | 8.90 | 10.56 | 12.24 | 17.31 | 0.00 |
| | 9.60 | 23.73 | 15.78 | 13.45 | 0.00 |
| | 7.80 | 17.21 | 8.70 | 8.02 | 0.02 |
| | 25.44 | 7.90 | 11.72 | 17.90 | 0.00 |
| | 10.44 | 6.16 | 7.72 | 12.12 | 0.00 |
| | — | — | — | — | 0.00 |
| | — | — | — | — | 0.00 |
| | — | — | — | — | 0.00 |
| CTX | 18.27 | 16.27 | 22.98 | 25.81 | 0.00 |
| | 7.86 | 14.10 | 20.93 | 27.91 | 0.00 |
| | 13.77 | 19.27 | 28.47 | 22.83 | 0.00 |
| | 8.64 | 12.47 | 15.52 | 16.17 | 0.00 |
| | 22.10 | 10.96 | 11.53 | 22.20 | 0.00 |
| | 10.2.2 | 16.54 | 14.09 | 13.69 | 0.00 |
| | — | — | — | — | 0.01 |
| | — | — | — | — | 0.01 |
| | — | — | — | — | 0.00 |
| HC | 9.01 | 11.68 | 34.88 | 20.23 | 0.00 |
| | 6.74 | 11.11 | 2.3.17 | 13.35 | 0.00 |
| | 8.95 | 15.29 | 18.13 | 17.42 | 0.00 |
| | 11.38 | 16.42 | 10.82 | 17.67 | 0.00 |
| | 18.88 | 11.06 | 9.66 | 16.64 | 0.00 |
| | 5.98 | 13.97 | 10.95 | 18.70 | 0.09 |
| | — | — | — | — | 0.02 |
| | — | — | — | — | 0.00 |
| | — | — | — | — | 0.00 |
| THL | 43.59 | 39.30 | 43.77 | 44.78 | 0.00 |
| | 18.75 | 25.89 | 52.01 | 36.63 | 0.01 |
| | 22.00 | 41.03 | 60.42 | 49.85 | 0.00 |
| | 15.47 | 32.80 | 25.53 | 29.12 | 0.00 |
| | 37.53 | 22.05 | 25.34 | 62.93 | 0.01 |
| | 16.87 | 24.58 | 28.79 | 32.24 | 0.00 |
| | — | — | — | — | 0.02 |
| | — | — | — | — | 0.00 |
| | — | — | — | — | 0.01 |
| BS | 43.71 | 28.49 | 73.24 | 45.45 | 0.00 |
| | 15.25 | 34.29 | 68.12 | 47.87 | 0.00 |
| | 17.28 | 48.69 | 68.56 | 39.22 | 0.00 |
| | 21.43 | 40.09 | 29.48 | 36.99 | 0.00 |
| | 32.35 | 30.47 | 31.52 | 74.04 | 0.03 |
| | 10.73 | 52.17 | 26.65 | 38.15 | 0.00 |
| | — | — | — | — | 0.00 |
| | — | — | — | — | 0.00 |
| | — | — | — | — | 0.00 |
| SC | 23.05 | 37.25 | 45.50 | 38.44 | 0.00 |
| | 9.35 | 19.61 | 43.86 | 26.11 | 0.00 |
| | 11.31 | 37.19 | 41.01 | 39.45 | 0.01 |
| | 12.65 | 16.30 | 15.14 | 42.35 | 0.01 |
| | 16.74 | 22.23 | 13.53 | 34.78 | 0.00 |
| | 8.51 | 16.52 | 32.74 | 19.93 | 0.00 |
| | — | — | — | — | 0.03 |
| | — | — | — | — | 0.00 |
| | — | — | — | — | 0.00 |
| Spl | 0.43 | 0.32 | 0.46 | 0.44 | 0.00 |
| | 0.14 | 0.34 | 0.38 | 0.28 | 0.00 |
| | 0.28 | 0.63 | 0.79 | 0.43 | 0.00 |
| | 0.82 | 0.16 | 0.29 | 0.26 | 0.00 |
| | 0.15 | 0.22 | 0.29 | 0.79 | 0.00 |
| | 0.23 | 0.16 | 0.25 | 0.35 | 0.00 |
| | — | — | — | — | 0.00 |
| | — | — | — | — | 0.00 |
| | — | — | — | — | 0.00 |
| Liv | 4.29 | 2.17 | 3.64 | 5.39 | 0.00 |
| | 0.64 | 2.34 | 2.75 | 3.29 | 0.00 |
| | 5.36 | 5.37 | 4.58 | 3.00 | 0.00 |
| | 11.75 | 2.55 | 1.30 | 2.62 | 0.00 |
| | 1.81 | 1.11 | 0.95 | 3.86 | 0.00 |
| | 0.63 | 1.38 | 2.39 | 2.89 | 0.00 |
| | — | — | — | — | 0.00 |
| | — | — | — | — | 0.00 |
| | — | — | — | — | 0.00 |
| Mus | 0.62 | 0.25 | 0.66 | 1.54 | 0.00 |
| | 0.25 | 0.19 | 0.45 | 0.70 | 0.00 |
| | 0.22 | 0.53 | 0.67 | 0.58 | 0.00 |
| | 0.14 | 0.48 | 0.48 | 0.23 | 0.00 |
| | 0.50 | 0.18 | 0.34 | 0.47 | 0.00 |
| | 0.19 | 0.17 | 0.28 | 0.33 | 0.00 |
| | — | — | — | — | 0.00 |
| | — | — | — | — | 0.01 |
| | — | — | — | — | 0.00 |

TABLE 161
Average vector genome quantification of VOY101.PT3 constructs (AAV genomes/cell)

| | | | Olfactory | | | Spinal |
|---|---|---|---|---|---|---|
| Construct | Hippocampus | Cortex | bulb | Thalamus | Brainstem | Cord |
| TAU_ITR112 | 14.42 | 15.01 | 10.73 | 24.23 | 29.60 | 18.68 |
| (Voy101.CAG.PT3.H.F.T2A.L) | | | | | | |
| TAU_ITR116 | 16.62 | 18.71 | 19.48 | 38.54 | 50.59 | 31.99 |
| (Voy101.CAG.PT3.LH.T2) | | | | | | |
| TAU_ITR111 | 17.86 | 31.52 | 24.95 | 34.11 | 46.33 | 27.06 |
| (Voy101.CBA.PT3.H.F.T2A.L) | | | | | | |
| TAU_ITR115 | 21.21 | 21.97 | 16.09 | 47.80 | 53.90 | 44.98 |
| (Voy101.CBA.PT3.LH.T2A) | | | | | | |
| TAU_ITR104 | 10.16 | 13.48 | 13.52 | 25.70 | 23.46 | 13.60 |
| (Voy101.CAG.PT3.HL.F2) | | | | | | |
| TAU_ITR108 | 13.26 | 14.93 | 12.62 | 30.94 | 39.03 | 24.85 |
| (Voy101.CAG.PT3.LH.F2) | | | | | | |
| TAU_ITR103 | 17.94 | 18.92 | 11.66 | 39.31 | 49.60 | 31.96 |
| (Voy101.CBA.PT3.HL.F2A) | | | | | | |
| TAU_ITR107 | 17.34 | 21.44 | 13.82 | 42.59 | 46.95 | 33.51 |
| (Voy101.CBA.PT3.LH.F2A) | | | | | | |
| Vehicle (PBS) | 0.009 | 0.002 | 0.002 | 0.005 | 0.003 | 0.009 |

TABLE 162
Average vector genome quantification of VOY101.PT3
constructs (AAV genomes/cell) in peripheral tissues

| | | | Skeletal |
|---|---|---|---|
| Construct | Spleen | Liver | Muscle |
| TAU_ITR112 | 0.90 | 2.74 | 0.65 |
| (Voy101.CAG.PT3.H.F.T2A.L) | | | |
| TAU_ITR116 | 0.31 | 3.21 | 0.46 |
| (Voy101.CAG.PT3.LH.T2A) | | | |
| TAU_ITR111 | 1.15 | 17.21 | 1.71 |
| (Voy101.CBA.PT3.H.F.T2A.L) | | | |
| TAU_ITR115 | 0.61 | 3.46 | 0.53 |
| (Voy101.CBA.PT3.LH.T2A) | | | |
| TAU_ITR104 | 0.34 | 4.08 | 0.32 |
| (Voy101.CAG.PT3.HL.F2A) | | | |
| TAU_ITR108 | 0.31 | 2.49 | 0.30 |
| (Voy101.CAG.PT3.LH.F2A) | | | |
| TAU_ITR103 | 0.41 | 2.60 | 0.48 |
| (Voy101.CBA.PT3.HL.F2A) | | | |
| TAU_ITR107 | 0.42 | 3.51 | 0.64 |
| (Voy101.CBA.PT3.LH.F2A) | | | |
| Vehicle (PBS) | 0.00 | 0.00 | 0.00 |

[1510] As shown in Table 160 Table 161, and Table 162, Voy101 delivery of 8 different formats of PT3 antibody encoding viral genomes comprising CAG or CBA promoters, and T2A or F2A cleavage sites showed biodistribution in all of the 6 tested CNS tissues. Biodistribution (e.g., vector genome levels) in the olfactory bulb, cortex, hippocampus, thalamus, brainstem, and spinal cord was similar for viral genomes comprising a T2A or F2A linker region. Biodistribution of viral genomes comprising a CBA promoter (e.g., CBA.HL and CBA.LH) trended towards slightly higher AAV genomes per cell within tested CNS tissues as compared to other viral genomes comprising CAG promoters. Biodistribution to peripheral tissues (liver, spleen, skeletal muscle) was low in comparison to that of CNS tissues, with the exception of TAU_ITR111 (Voy101.CBA.PT3.H.F.T2A.L).

[1511] Antibody levels in the hippocampus, cortex, olfactory bulb, brainstem, spinal cord, liver, serum, and CSF were quantified using ePHF ELISA, as described above. Samples of hippocampus (HC), cortex (MT), olfactory bulb (OB), thalamus (TH), brain stem (BS) and spinal cord (SC) were analyzed both as ng/mg of protein and as normalized scFv/vg. The results are shown in Table 163 and 164, respectively.

TABLE 163
PT3 expression in the CNS (ng PT3/mg protein)

| | | TAU_ITR112 | TAU_ITR116 | TAU_ITR111 | TAU_ITR115 |
|---|---|---|---|---|---|
| | PBS | (CAG.HFT2AL) | (CAG.LHT2A) | (CBA.HFT2AL) | (CBA.LHT2A) |
| HC | 0 | 44.29 | 23.58 | 121.11 | 8.26 |
| | 0 | 64.60 | 37.20 | 4.91 | 7.98 |
| | 0 | 67.03 | 20.33 | 70.54 | 13.73 |
| | 0 | 41.33 | 16.14 | 25.11 | 24.88 |
| | 0 | 30.86 | 17.78 | 56.28 | 9.11 |
| | 0 | 30.13 | 12.12 | 101.49 | |
| | 0 | 22.61 | 18.39 | 31.12 | — |
| | 0 | 38.08 | — | 35.02 | — |
| | 0 | 40.65 | — | — | — |
| Avg. | 0 | 42.18 | 20.79 | 55.70 | 12.79 |
| CTX | 0 | 162.39 | 36.52 | 36.86 | 20.30 |
| | 0 | 136.13 | 73.90 | 192.78 | 12.00 |
| | 0 | 136.59 | 23.30 | 151.37 | 25.51 |
| | 0 | 94.26 | 44.09 | 140.71 | 30.80 |
| | 0 | 86.71 | 52.79 | 171.14 | 9.03 |
| | 0 | 25.35 | 23.43 | 209.27 | — |
| | 0 | 74.49 | 23.40 | 136.05 | — |
| | 0 | 118.77 | — | 167.23 | — |
| | 0 | 43.03 | — | — | — |
| Avg. | 0 | 97.52 | 39.63 | 150.68 | 19.53 |
| OB | 0 | 105.24 | 38.26 | 76.91 | 28.74 |
| | 0 | 96.03 | 60.60 | 155.09 | 24.62 |
| | 0 | 99.53 | 29.97 | 155.12 | 43.93 |
| | 0 | 103.88 | 51.72 | 149.64 | 39.86 |
| | 0 | 82.33 | 49.53 | 185.73 | 27.87 |
| | 0 | 51.29 | 38.77 | 176.50 | — |
| | 0 | 41.51 | 53.10 | 188.16 | — |
| | 0 | 136.42 | — | 185.63 | — |
| Avg. | 0 | 89.53 | 45.99 | 159.10 | 33.00 |
| TH | 0 | 54.31 | 28.08 | 166.86 | 24.87 |
| | 0 | 114.47 | 21.85 | 58.25 | 6.19 |
| | 0 | 93.00 | 43.95 | 91.59 | 32.54 |
| | 0 | 110.48 | 32.15 | 0.00 | 38.86 |
| | 0 | 80.56 | 29.50 | 191.55 | 31.67 |
| | 0 | 47.57 | 30.58 | 164.90 | — |
| | 0 | 47.56 | 0.00 | 60.75 | — |
| | 0 | 75.94 | — | 67.97 | — |
| | 0 | 19.08 | — | | — |
| Avg. | 0 | 71.44 | 26.59 | 100.23 | 26.83 |
| BS | 0 | 96.35 | 113.27 | 154.88 | 26.64 |
| | 0 | 178.75 | 144.25 | 129.38 | 29.38 |
| | 0 | 150.65 | 71.36 | 175.86 | 70.11 |
| | 0 | 154.01 | 99.21 | 91.46 | 55.75 |
| | 0 | 51.52 | 88.46 | 64.75 | 62.32 |
| | 0 | 81.80 | 60.27 | | — |
| | 0 | 130.97 | 71.52 | 85.86 | — |
| | 0 | 194.08 | — | 141.13 | — |
| | 0 | 121.91 | — | — | — |
| Avg. | 0 | 128.89 | 92.62 | 117.63 | 48.84 |
| SC | 0 | 36.66 | 21.72 | 21.54 | 17.70 |
| | 0 | 60.48 | 42.48 | 58.99 | 6.43 |
| | 0 | 47.93 | 21.91 | 79.29 | 35.65 |
| | 0 | 53.22 | 24.96 | 66.36 | 33.10 |
| | 0 | 27.91 | 18.86 | 79.45 | 13.42 |
| | 0 | 34.85 | 14.87 | 70.11 | — |
| | 0 | 47.83 | 5.48 | 84.88 | — |
| | 0 | 34.29 | 34.29 | 18.70 | — |
| | 0 | 40.89 | 40.89 | — | — |
| Avg. | 0 | 42.67 | 25.05 | 59.91 | 21.26 |
| CSF | 0 | 349.85 | 238.12 | 267.36 | 257.72 |
| | 0 | 603.34 | 329.97 | 787.22 | 340.07 |
| | 0 | 192.86 | 322.85 | 511.96 | 143.44 |
| | 0 | 381.06 | 202.54 | 662.55 | — |
| | 0 | 291.25 | 383.93 | 930.65 | — |
| | 0 | 348.83 | 270.43 | 381.43 | — |
| | 0 | 265.81 | 216.28 | 636.45 | — |
| | 0 | 287.05 | — | — | — |
| | | 325.31 | — | — | — |
| Avg. | 0 | 338.37 | 280.59 | 596.80 | 247.08 |

| | TAU_ITR104 | TAU_ITR108 | TAU_ITR103 | TAU_ITR107 |
|---|---|---|---|---|
| | (CAG.HLF2A) | (CAG.LHF2A) | (CBA.HLF2A) | (CBA.LHF2A) |
| HC | 1.26 | 13.99 | 16.56 | 11.46 |
| | 7.30 | 3.27 | 7.16 | 6.42 |
| | 0.15 | 13.37 | 4.88 | 18.50 |
| | 2.98 | 5.75 | 1.87 | 6.23 |
| | 3.28 | 39.23 | 1.11 | 8.87 |
| | 1.25 | 5.77 | 1.35 | 6.61 |
| | — | — | — | — |
| | — | — | — | — |
| | — | — | — | — |
| Avg. | 2.70 | 13.56 | 5.49 | 9.68 |
| CTX | 3.00 | 20.35 | 17.95 | 18.61 |
| | 17.39 | 13.22 | 6.78 | 18.41 |
| | 3.19 | 21.23 | 7.01 | 15.67 |
| | 7.64 | 14.35 | 4.61 | 12.72 |
| | 5.70 | 4.81 | 2.68 | 12.49 |
| | 11.84 | 10.05 | 3.15 | 7.05 |
| | 4.24 | | | |
| | — | — | — | — |
| | — | — | — | — |
| Avg. | 7.57 | 14.00 | 7.03 | 14.16 |
| OB | 14.85 | 32.68 | 22.55 | 33.63 |
| | 22.39 | 29.97 | 15.84 | 41.39 |
| | 11.39 | 45.36 | 15.39 | 39.07 |
| | 21.82 | 26.57 | 11.62 | 30.94 |
| | 24.33 | 19.15 | 7.12 | 37.23 |
| | 15.41 | 27.89 | 10.54 | 19.54 |
| | — | — | — | — |
| | — | — | — | — |
| Avg. | 18.36 | 30.27 | 13.85 | 33.63 |
| TH | 10.10 | 26.36 | 9.17 | 13.04 |
| | 21.49 | 26.55 | 15.69 | 28.23 |
| | 5.56 | 0.00 | 14.88 | 26.96 |
| | 20.06 | 22.25 | 9.35 | 15.55 |
| | 14.70 | 11.67 | 4.39 | 26.03 |
| | 15.78 | 29.91 | 8.34 | 9.72 |
| | — | — | — | — |
| | — | — | — | — |
| | — | — | — | — |
| Avg. | 14.62 | 19.46 | 10.30 | 19.92 |
| BS | 31.58 | 83.64 | 33.33 | 57.98 |
| | 51.31 | 50.38 | 45.30 | 57.08 |
| | 19.21 | 84.23 | 36.80 | 51.79 |
| | 52.13 | 32.31 | 18.90 | 18.01 |
| | 28.00 | 24.11 | 15.56 | 36.49 |
| | 6.3.16 | 44.78 | 18.15 | 16.59 |
| | — | — | — | — |
| | — | — | — | — |
| | — | — | — | — |
| Avg. | 40.90 | 53.24 | 28.01 | 39.66 |
| SC | 2.67 | 14.41 | 10.24 | 20.56 |
| | 9.28 | 18.99 | 13.38 | 17.82 |
| | 5.19 | 35.21 | 10.18 | 18.76 |
| | 2.09 | 12.01 | 6.87 | 3.45 |
| | 3.94 | 7.50 | 2.60 | 19.14 |
| | 5.34 | 20.52 | 8.43 | 6.16 |
| | — | — | — | — |
| | — | — | — | — |
| | — | — | — | — |
| Avg. | 4.75 | 18.11 | 8.62 | 14.32 |
| CSF | 0.00 | 96.29 | 62.69 | 23.36 |
| | 15.41 | 26.58 | 90.95 | 76.84 |
| | 44.17 | 42.68 | 29.47 | 64.18 |
| | 93.11 | 143.84 | 20.43 | 48.76 |
| | — | 0.00 | 41.20 | 61.42 |
| | — | — | — | 20.98 |
| | — | — | — | — |
| | — | — | — | — |
| | — | — | — | — |
| Avg. | 38.17 | 61.88 | 48.95 | 49.26 |

TABLE 164
Normalized PT3 expression in the CNS (PT3/vg)

| | | | Olfactory | | Brain | Spinal |
|---|---|---|---|---|---|---|
| | Hippocampus | Cortex | Bulb | Thalamus | stem | cord |
| TAU_ITR112 | 3.23 | 9.25 | 9.54 | 2.16 | 3.99 | 2.27 |
| (CAG.HFT2AL) | 2.33 | 9.61 | 15.03 | 4.95 | 6.76 | 4.03 |
| | 6.27 | 6.37 | 8.78 | 6.20 | 2.02 | 1.15 |
| | 2.05 | 4.81 | 5.83 | 4.13 | 5.80 | 2.29 |
| | 2.97 | 7.51 | 9.56 | 1.99 | 5.41 | 2.51 |
| | 2.02 | 2.99 | 10.08 | 2.47 | 4.74 | 3.05 |
| | 2.19 | 5.11 | 3.55 | 2.44 | 3.07 | 3.12 |
| | 2.83 | 9.25 | 11.90 | 2.85 | 8.63 | 1.63 |
| | — | 2.89 | — | 0.86 | 5.38 | 3.17 |
| Avg. | 2.99 | 6.42 | 9.28 | 3.12 | 5.09 | 2.58 |
| TAU_ITR104 | 0.14 | 0.95 | 0.78 | 0.53 | 0.72 | 0.12 |
| (CAG.HLF2A) | 1.08 | 0.41 | 2.52 | 2.42 | 3.37 | 0.99 |
| | 0.02 | 0.55 | 1.19 | 0.58 | 1.11 | 0.46 |
| | 0.26 | 0.66 | 2.80 | 2.57 | 2.43 | 0.16 |
| | 0.17 | 0.54 | 0.96 | 0.58 | 0.87 | 0.24 |
| | 0.21 | 0.41 | 1.48 | 1.51 | 5.89 | 0.63 |
| Avg. | 0.31 | 0.59 | 1.62 | 1.37 | 2.40 | 0.43 |
| TAU_ITR116 | 1.87 | 2.47 | 1.51 | 1.11 | 1.64 | 0.60 |
| (CAG.LHT2A) | 1.16 | 1.68 | 5.12 | 1.85 | 3.14 | 1.81 |
| | 0.84 | 2.39 | 1.46 | 2.14 | 1.50 | 0.48 |
| | 1.53 | 2.79 | 3.59 | 2.23 | 2.29 | 0.86 |
| | 0.85 | 1.29 | 2.80 | 1.67 | 1.74 | 0.75 |
| | 1.06 | 1.80 | 1.43 | 1.13 | 1.28 | 0.46 |
| Avg. | 1.22 | 2.07 | 2.65 | 1.69 | 1.93 | 0.83 |
| TAU_ITR108 | 1.21 | 1.25 | 3.25 | 2.62 | 2.93 | 0.40 |
| (CAG.LHF2A) | 0.29 | 0.90 | 2.84 | 2.52 | 1.52 | 0.98 |
| | 0.88 | 1.10 | 1.91 | 0.00 | 1.76 | 0.93 |
| | 0.36 | 1.15 | 1.54 | 1.29 | 0.79 | 0.70 |
| | 3.25 | 0.43 | 2.44 | 1.48 | 0.80 | 0.31 |
| | 0.42 | 0.59 | 4.78 | 5.13 | 0.90 | 1.25 |
| Avg. | 1.07 | 0.90 | 2.79 | 2.17 | 1.45 | 0.76 |
| TAU_ITR111 | 16.96 | 3.06 | 6.74 | 11.68 | 7.92 | 2.56 |
| (CBA.HFT2AL) | 0.24 | 4.89 | 5.70 | 1.16 | 2.13 | 1.74 |
| | 3.65 | 4.33 | 4.27 | 2.15 | 2.71 | 2.62 |
| | 1.32 | 3.79 | 10.16 | 0.00 | 1.38 | 1.97 |
| | 2.65 | 4.07 | 4.03 | 4.51 | 1.44 | 2.61 |
| | 6.12 | 6.74 | 14.01 | 7.88 | 2.92 | 2.50 |
| | 1.66 | 5.10 | 7.09 | 2.68 | 2.17 | 5.17 |
| | — | 5.82 | 7.48 | 2.57 | 3.43 | 0.53 |
| Avg. | 4.66 | 4.72 | 7.44 | 4.08 | 3.01 | 2.46 |
| TAU_ITR103 | 0.47 | 0.78 | 1.63 | 0.21 | 0.46 | 0.23 |
| (CBA.HLF2A) | 0.31 | 0.32 | 1.29 | 0.30 | 0.67 | 0.31 |
| | 0.27 | 0.25 | 0.98 | 0.25 | 0.54 | 0.25 |
| | 0.17 | 0.30 | 1.34 | 0.37 | 0.64 | 0.45 |
| | 0.11 | 0.23 | 0.61 | 0.17 | 0.49 | 0.19 |
| | 0.12 | 0.22 | 1.37 | 0.29 | 0.68 | 0.26 |
| Avg. | 0.24 | 0.35 | 1.20 | 0.26 | 0.58 | 0.28 |
| TAU_ITR115 | 0.55 | 0.91 | 1.86 | 0.14 | 0.44 | 0.53 |
| (CBA.LHT2A) | 0.31 | 0.85 | 2.11 | 0.84 | 0.85 | 0.25 |
| | 0.53 | 1.01 | 2.37 | 0.62 | 0.80 | 0.42 |
| | 1.05 | 1.17 | 1.99 | 0.49 | 1.28 | 0.56 |
| | 0.59 | 0.42 | 1.89 | 0.00 | — | 0.64 |
| Avg. | 0.60 | 0.87 | 2.04 | 0.42 | 0.85 | 0.48 |
| TAU_ITR107 | 0.57 | 0.72 | 2.38 | 0.29 | 1.28 | 0.53 |
| (CBA.LHF2A) | 0.48 | 0.66 | 2.39 | 0.77 | 1.19 | 0.68 |
| | 1.06 | 0.69 | 2.91 | 0.54 | 1.32 | 0.48 |
| | 0.35 | 0.79 | 3.86 | 0.53 | 0.49 | 0.08 |
| | 0.53 | 0.56 | 2.08 | 0.41 | 0.49 | 0.55 |
| | 0.35 | — | 1.61 | 0.30 | — | 0.31 |
| Avg. | 0.56 | 0.68 | 2.54 | 0.48 | 0.95 | 0.44 |
| Vehicle | 0 | 0 | 0 | 0 | 0 | 0 |
| | 0 | 0 | 0 | 0 | 0 | 0 |
| | 0 | 0 | 0 | 0 | 0 | 0 |
| | 0 | 0 | 0 | 0 | 0 | 0 |
| | 0 | 0 | 0 | 0 | 0 | 0 |
| | 0 | 0 | 0 | 0 | 0 | 0 |
| | 0 | 0 | 0 | 0 | 0 | 0 |
| | 0 | 0 | 0 | 0 | 0 | 0 |
| Avg. | 0.00 | 0.00 | 0.00 | 0.00 | 0.00 | 0.00 |

[1512] Comparing the expression levels in the hippocampus to the expression in the cortex and olfactory bulb: PT3 was higher in the HL.T2A group (i.e. TAU_ITR111 (Voy101.CBA.PT3.H.F.T2A.L) and (TAU_ITR112 (Voy101.CAG.PT3.H.F.T2A.L)) than HL.F2A (TAU_ITR104 (Voy101.CAG.PT3.HL.F2) and (TAU_ITR103 (Voy101.CBA.PT3.HL.F2A)), regardless of whether a CAG or CBA promoter was used to drive expression. Based on the ePHF ELISA data for the cortex and the olfactory bulb, PT3 expression was significantly higher when driven by a CBA promoter rather than a CAG promoter regardless of the configuration of the viral genome (e.g., heavy-linker-light vs light-linker-heavy). No statistically significant differences were observed between PT3 expression driven by CBA or CAG promoter in the other tissues. In the hippocampus, thalamus and the brain stem, PT3 expression (ng/mg) was significantly higher (p value <0.005) when the rodents were transduced with TAU_ITR111 (Voy101.CBA.PT3.H.F.T2A.L) compared to rodents transduced with TAU_ITR115 (Voy101.CBA.PT3.LH.T2A). In the cortex, olfactory bulb and spinal cord, PT3 expression (ng/mg) was significantly higher when the rodents were transduced with TAU_ITR111 (Voy101.CBA.PT3.H.F.T2A.L) compared to rodents transduced with TAU_ITR115 (Voy101.CBA.PT3.LH.T2A) (p value <0.0005) and in rodents transduced with TAU_ITR112 (Voy101.CAG.PT3.H.F.T2A.L) compared to TAU_ITR116 (Voy101.CAG.PT3.LH.T2A) (p value <0.05 in the spinal cord; p value <0.005 in the cortex and olfactory bulb). In the cortex and olfactory bulb, PT3 expression (ng/mg) was significantly higher in mice treated with TAU_ITR111 (Voy101.CBA.PT3.H.F.T2A.L) compared to mice treated with TAU_ITR112 (Voy101.CAG.PT3.H.F.T2A.L) (p value <0.0005 in the olfactory bulb and p value <0.05 in the cortex).

[1513] Normalized PT3 expression was significantly increased in mice treated with TAU_ITR112 (Voy101.CAG.PT3.H.F.T2A.L) compared to mice treated with TAU_ITR116 (Voy101.CAG.PT3.LH.T2A) (p value <0.00005 in the cortex and olfactory bulb; p value <0.0005 in the brain stem and spinal cord). Similarly, normalized PT3 expression was significantly increased in mice treated with TAU_ITR111 (Voy101.CBA.PT3.H.F.T2A.L) when compared to mice treated with TAU_ITR115 (Voy101.CBA.PT3.LH.T2A) (p value <0.0005 in the cortex and spinal cord; p value <0.005 in the olfactory bulb; p value <0.05 in the thalamus). In the brain stem, normalized PT3 expression was significantly higher upon transduction of TAU_ITR112 (Voy101.CAG.PT3.H.F.T2A.L) compared to TAU_ITR111 (Voy101.CBA.PT3.H.F.T2A.L) (p value <0.05).

[1514] In CSF samples collected on the terminal day, quantification of the PT3 antibody expression demonstrated higher PT3 expression for constructs comprising T2A linkers (i.e. TAU_ITR112, TAU_ITR116, TAU_ITR111 and TAU_ITR115) than for constructs comprising F2A linkers (i.e. TAU_ITR104, TAU_ITR108, TAU_ITR103, TAU_ITR107). PT3 expression in the CSF was higher after delivery of a viral genome with CBA.HL format (i.e. TAU_ITR111) than after delivery of a viral genome with CBA.LH format (TAU_ITR115). For viral genomes with heavy-linker-light format, the CBA promoter (i.e. TAU_ITR111 and TAU_ITR103) drove greater PT3 expression than viral genomes comprising a CAG promoter (i.e. TAU_ITR112 and TAU_ITR104). No difference in expression was observed in mice transduced with VOY101 particles expressing constructs in the CAG.HL format (TAU_ITR112 and TAU_ITR104) and CAG.LH format (TAU_ITR116 and TAU_ITR108).

[1515] Immunohistochemistry was performed on brain tissue of mice treated with an IV bolus injection of ssVOY101.PT3 AAV particles comprising viral genomes encoding PT3, operably linked to CAG or CB6 promoters. PT3 (IgG) and astrocytic (S100β) markers were assessed for colocalization of PT3 with S100β positive cells. PT3 expression was detected in different brain regions of mice dosed with CAG.HL.PT3 vector, TAU_ITR112. Lower PT3 expression was observed in the brains of mice dosed with Voy101.CAG.LH.PT3 vector, TAU_ITR116. This same pattern was observed across format pairs, wherein the heavy-linker-light format yielded comparatively more staining than the light-linker-heavy format, regardless of the linker used (e.g., T2A or F2A). PT3 antibody expression also colocalized with S100β as well as cells that displayed neuronal morphology. Neuronal localization of PT3 antibody was also confirmed by immunofluorescence studies using neuronal marker NeuN which demonstrated colocalization with PT3 (IgG) in tissues obtained from mice injected with each of the constructs described in Table 159.

[1516] Comparing the PT3 expression obtained from T2A based constructs versus F2A constructs described in Table 159, showed that constructs with the HL format namely TAU_ITR112, TAU_ITR111, TAU_ITR104, and TAU_ITR103 showed higher PT3 expression compared to constructs with the LH format namely, TAU_ITR116, TAU_ITR115. TAU_ITR108 and TAU_ITR107, regardless of whether T2A or F2A was used. Generally, viral genomes comprising a T2A cleavage site, as opposed to an F2A cleavage site, showed higher levels of PT3 expression in the CNS and CSF as measured by ELISA.

[1517] Taken together, this study shows that PT3 antibody is expressed in CNS tissues of all the experimental groups, with no significant difference in PT3 levels per vector genome observed between constructs driven by the CAG promoter and the CBA promoter.

[1518] Comparing the PT3 expression levels observed in the brain (hippocampus, cortex and thalamus) obtained with PT3 constructs described in Table 159 with the IPN002 constructs described in Example 8, it was noted that in both instances, antibody expression levels were comparable and constructs with ubiquitous promoters (CAG or CBA) comprising a T2A cleavage site resulted in higher antibody (PT3 of IPN002) expression when compared to constructs with ubiquitous promoters (CAG or CBA) comprising an F2A cleavage site. IPN002 antibody expression levels were driven more robustly when a CAG promoter was used, whereas PT3 antibody expression was greater when driven by the CBA promoter. In general, IPN002 and PT3 constructs with ubiquitous promoters (CAG or CBA) that included a T2A and the antibody in the heavy chain-light chain format showed higher expression than T2A constructs with a light chain heavy format.

### Cell-Type Specific Promoters for PT3 Expression

[1519] The effect of using cell-type specific promoters GFAP or synapsin (SYN) for driving expression of PT3 from four different viral genome configurations (HF.T2AL, LT2AH, HF.F2AL or LF2AH) was assessed based on measurement of brain distribution, cellular tropism and antibody expression level. Data from this study further enabled comparison of the effects of T2A and F2A cleavage sites on PT3 antibody expression, distribution and tropism.

[1520] Viral genomes TAU_ITR113 (SEQ ID NO. 2163), TAU_ITR117 (SEQ ID NO. 2167), TAU_ITR114 (SEQ ID NO. 2164). TAU_ITR118 (SEQ ID NO. 2168), TAU_ITR105 (SEQ ID NO. 2155), TAU_ITR109 (SEQ ID NO. 2159). TAU_ITR106 (SEQ ID NO. 2156), and TAU_ITR110 (SEQ ID NO. 2160), were packaged, single stranded, into VOY101 AAV particles and formulated in PBS and 0.001% F-68. Vehicle PBS with 0.001% F-68 was used as a control. An intravenous bolus at a dose of 1.4×10¹³ vg/kg was administered via tail vein to two-month old female C57Bl/6 mice. Twenty-eight days later, mice were sacrificed by intracardiac perfusion and tissue samples collected and processed for further analysis. The right half of the brain (including olfactory bulb) and lumbar spinal cord were post-fixed with 4% PFA for immunohistochemistry. The other half of the brain (dissected into hippocampus, cortex, thalamus, brainstem) and cervical and thoracic spinal cord tissues were processed for use in ELISA assays and vector genome quantification by droplet digital PCR normalized to diploid cell number (VG/DC) using the endogenous mouse transferrin receptor gene (TFRC). Peripheral tissues from spleen, liver and skeletal muscle were also collected. Serum samples were collected at two days prior to dosing, and weekly after dosing on days 7, 14, 21 and 28 (terminal day). CSF samples were collected on the terminal day (D28). The study design is shown in Table 165 below.

TABLE 165
PT3 IV study design

| | | SEQ | | | | | | End |
|---|---|---|---|---|---|---|---|---|
| | TAU_ITR | ID | | Dose | Dose | | | of |
| Test article | ID | NO: | μl | VG/kg | Vg | route | N | study |
| GFAP.HF.T2A.L | TAU_ITR113 | 2163 | 100 | 1.40E+13 | 2.80E+11 | IV | 9 | D 28 |
| GFAP.LH.T2 | TAU_ITR117 | 2167 | 100 | 1.40E+13 | 2.80E+11 | IV | 6 | D 28 |
| SYN.HF.T2AL | TAU_ITR114 | 2164 | 100 | 1.40E+13 | 2.80E+11 | IV | 9 | D 28 |
| SYN.LH.T2 | TAU_ITR118 | 2168 | 100 | 1.40E+13 | 2.80E+11 | IV | 6 | D 28 |
| GFAP.HL.F2 | TAU_ITR105 | 2155 | 100 | 1.40E+13 | 2.80E+11 | IV | 6 | D 28 |
| GFAP.LH.F2 | TAU_ITR109 | 2159 | 100 | 1.40E+13 | 2.80E+11 | IV | 6 | D 28 |
| SYN.HL.F2 | TAU_ITR106 | 2156 | 100 | 1.40E+13 | 2.80E+11 | IV | 6 | D 28 |
| SYN.LH.F2 | TAU_ITR110 | 2160 | 100 | 1.40E+13 | 2.80E+11 | IV | 6 | D 28 |
| PBS | | — | 100 | n.a | n.a | IV | 4 | D 28 |

[1521] CNS, peripheral and serum samples were analyzed by ePHF ELISA. Brain, olfactory bulb and spinal cord tissues were assessed by immunohistochemistry (NeuN S100β, IgG), immunofluorescence and/or hematoxylin and eosin staining (H&E). Vector genome quantification using droplet digital PCR (ddPCR) was carried out for samples collected from cortex (CTX), hippocampus (HC), anterior olfactory bulb (OB), brain stem (BS), thoracic spinal cord (SC), thalamus (TH), liver, spleen, and skeletal muscle. Secondary readouts included daily cage side observations for 1 week after AAV particle administration and weekly body weight measurements. Vector genome quantifications (VG/DC) are shown in the Table 166 below.

TABLE 166
Vector genome quantification of ssVOY101.PT3 constructs

| | | TAU_ITR114 | TAU_ITR118 | TAU_ITR113 | TAU_ITR117 |
|---|---|---|---|---|---|
| | PBS | (SYN.HLT2A) | (SYN.LHT2A) | (GFAP.HLT2A) | (GFAP.LHT2A) |
| HC | 0.01 | 19.25 | 20.91 | 13.56 | 34.61 |
| | 0.01 | 51.14 | 62.89 | 10.55 | 46.43 |
| | 0.06 | 18.75 | 25.33 | 18.24 | 17.57 |
| | 0.01 | 11.39 | 63.78 | 20.10 | 26.96 |
| | 0.00 | 7.97 | 33.66 | 49.67 | 36.65 |
| | 0.00 | 14.99 | 42.15 | 14.78 | 42.71 |
| | 0.00 | 18.79 | — | 26.07 | — |
| | 0.00 | 12.87 | — | 41.19 | — |
| | — | 20.99 | — | 18.22 | — |
| Avg. | 0.01 | 19.57 | 41.45 | 23.59 | 34.16 |
| CTX | 0.00 | 14.70 | 59.18 | 24.28 | 37.16 |
| | 0.01 | 28.02 | 33.64 | 24.47 | 23.21 |
| | 0.00 | 31.61 | 25.38 | 23.90 | 24.64 |
| | 0.02 | 23.40 | 32.40 | 31.76 | 28.39 |
| | 0.00 | 7.04 | 27.33 | 36.38 | 48.54 |
| | 0.00 | 20.35 | 62.88 | 19.87 | 52.03 |
| | 0.00 | 25.98 | — | 34.53 | — |
| | 0.00 | 13.80 | — | 34.66 | — |
| | | 16.07 | — | 35.22 | — |
| Avg. | 0.00 | 20.11 | 40.13 | 29.45 | 35.66 |
| OB | 0.00 | 6.03 | 48.78 | 15.19 | 57.56 |
| | 0.00 | 20.33 | 8.38 | 3.10 | 29.66 |
| | 0.00 | 18.69 | 29.48 | 17.12 | 15.53 |
| | 0.00 | 7.16 | 29.55 | 36.82 | 28.82 |
| | 0.00 | 5.49 | 23.79 | 22.73 | 33.59 |
| | 0.00 | 14.86 | 12.97 | 15.25 | 51.84 |
| | 0.00 | 27.58 | — | 30.13 | — |
| | 0.02 | 16.35 | — | 42.10 | — |
| | | 21.47 | — | 18.78 | — |
| Avg. | 0.00 | 15.33 | 25.49 | 22.36 | 36.17 |
| TH | 0.01 | 20.40 | 229.00 | 32.09 | 41.58 |
| | 0.00 | 51.20 | 36.82 | 23.25 | 32.98 |
| | 0.06 | 40.21 | 207.63 | 30.81 | 55.41 |
| | 0.00 | 26.05 | 232.78 | 38.21 | 105.17 |
| | 0.00 | 7.82 | 184.74 | 43.81 | 41.36 |
| | 0.01 | 28.39 | 42.62 | 25.09 | 69.23 |
| | 0.00 | 27.67 | — | 42.05 | — |
| | 0.00 | 18.32 | — | 41.98 | — |
| | | 24.01 | — | 44.53 | — |
| Avg. | 0.01 | 27.12 | 155.60 | 35.76 | 57.62 |
| BS | 0.00 | 22.20 | 31.10 | 35.32 | 109.90 |
| | 0.06 | 46.25 | 102.52 | 26.03 | 38.26 |
| | 0.01 | 47.05 | 165.28 | 41.68 | 80.22 |
| | 0.02 | 26.71 | 50.57 | 53.04 | 99.61 |
| | 0.00 | 9.66 | 27.83 | 51.72 | 49.34 |
| | 0.00 | 34.54 | 50.73 | 24.94 | 132.43 |
| | 0.00 | 57.33 | — | 61.72 | — |
| | 0.00 | 34.05 | — | 51.76 | — |
| | | 52.59 | — | 53.14 | — |
| Avg. | 0.01 | 36.71 | 71.34 | 44.37 | 84.96 |
| SC | 0.02 | 12.63 | 55.71 | 20.02 | 41.26 |
| | 0.00 | 23.52 | 30.66 | 13.16 | 45.67 |
| | 0.01 | 23.18 | 234.44 | 22.87 | 66.02 |
| | 0.01 | 21.32 | 69.92 | 25.01 | 71.70 |
| | 0.00 | 4.30 | 29.48 | 93.99 | 45.59 |
| | 0.00 | 28.88 | 32.72 | 19.45 | 71.37 |
| | 0.01 | 25.01 | — | 29.22 | — |
| | 0.01 | 14.15 | — | 28.30 | — |
| | | 22.80 | — | 69.61 | — |
| Avg. | 0.01 | 19.53 | 75.49 | 35.74 | 56.93 |
| | | TAU_ITR106 | TAU_ITR110 | TAU_ITR105 | TAU_ITR109 |
| | | (SYN.HLF2A) | (SYN.LHF2A) | (GFAP.HLF2A) | (GFAP.LHF2A) |
| | HC | 23.69 | 27.95 | 27.21 | 22.27 |
| | | 27.04 | 0.26 | 25.35 | 39.38 |
| | | 35.50 | 17.85 | 25.90 | 10.75 |
| | | 128.16 | 25.89 | 28.65 | 48.17 |
| | | 28.96 | 4.91 | 29.76 | 21.96 |
| | | 29.09 | 44.57 | 18.38 | 25.36 |
| | | — | — | — | — |
| | | — | — | — | — |
| | | — | — | — | — |
| | Avg. | 45.41 | 20.24 | 25.88 | 27.98 |
| | CTX | 17.10 | 29.05 | 34.18 | 26.99 |
| | | 43.23 | 0.36 | 21.34 | 49.96 |
| | | 28.30 | 22.09 | 26.54 | 19.11 |
| | | 71.28 | 38.38 | 15.73 | 44.82 |
| | | 25.45 | 5.64 | 42.75 | 36.38 |
| | | 29.04 | 24.62 | 31.08 | 62.02 |
| | | — | — | — | — |
| | | — | — | — | — |
| | | — | — | — | — |
| | Avg. | 35.73 | 20.02 | 28.60 | 39.88 |
| | OB | 20.57 | 49.11 | 22.53 | 12.62 |
| | | 38.79 | 0.34 | 27.02 | 20.34 |
| | | 17.77 | 39.36 | 14.16 | 32.17 |
| | | 18.55 | 28.85 | 9.81 | 37.46 |
| | | 39.88 | 7.26 | 38.96 | 72.44 |
| | | 19.44 | 22.87 | 21.94 | 42.74 |
| | | — | — | — | — |
| | | — | — | — | — |
| | | — | — | — | — |
| | Avg. | 25.84 | 24.63 | 22.40 | 36.29 |
| | TH | 58.55 | 39.01 | 29.31 | 51.71 |
| | | 64.07 | 0.44 | 38.35 | 35.27 |
| | | 60.02 | 50.02 | 20.17 | 20.43 |
| | | 55.58 | 33.76 | 21.29 | 82.81 |
| | | 36.88 | 10.18 | 59.58 | 33.71 |
| | | 40.03 | 54.62 | 24.52 | 63.61 |
| | | — | — | — | — |
| | | — | — | — | — |
| | | — | — | — | — |
| | Avg. | 52.52 | 31.34 | 32.20 | 47.92 |
| | BS | 24.77 | 32.99 | 67.09 | 49.48 |
| | | 56.04 | 0.39 | 24.33 | 48.96 |
| | | 90.96 | 60.80 | 111.66 | 29.63 |
| | | 173.87 | 58.40 | 15.96 | 66.14 |
| | | 73.88 | 14.50 | 55.40 | 69.48 |
| | | 145.74 | 77.95 | 48.63 | 84.84 |
| | | — | — | — | — |
| | | — | — | — | — |
| | | — | — | — | — |
| | Avg. | 94.21 | 40.84 | 53.84 | 58.09 |
| | SC | 75.62 | 28.92 | 37.12 | 122.50 |
| | | 108.09 | 0.18 | 42.17 | 33.47 |
| | | 66.58 | 24.03 | 81.91 | 20.62 |
| | | 53.83 | 43.88 | 10.57 | 24.36 |
| | | 0.00 | 20.65 | 40.76 | 90.37 |
| | | 48.26 | 25.74 | 23.29 | 40.89 |
| | | — | — | — | — |
| | | — | — | — | — |
| | | — | — | — | — |
| | Avg. | 58.73 | 23.90 | 39.30 | 55.37 |

[1522] Across the six CNS tissues analyzed, TAU_ITR118 (SYN.LH. T2A) showed higher AAV biodistribution in hippocampus, cortex, olfactory bulb, thalamus and spinal cord. In the brain stem, TAU_ITR106 (SYN.HL. F2A) showed the highest AAV biodistribution. The remaining AAV viral genomes tested demonstrated fairly similar AAV biodistribution.

[1523] Comparing the AAV biodistribution of TAU_ITR112 (CAG.PT3.HFT2AL; SEQ ID NO: 2162) described in Table 160 with TAU_ITR113 (GFAP.PT3.HLT2A; SEQ ID NO: 2163) or TAU_ITR114 (SYN.PT3.HLT2A; SEQ ID NO: 2164), GFAP.PT3.HLT2A resulted in significantly higher expression in the cortex compared to CAG.PT3.HFT2AL (p value <0.0005, one-way ANOVA-Tukey's multiple comparison test) or SYN.PT3.HLT2A (p value <0.005). In the thalamus, AAV biodistribution in mice treated with TAU_ITR113 was significantly higher than the mice treated with TAU_ITR112 (p value <0.05). The vector genome quantification in peripheral tissues is provided in Table 167.

TABLE 167
Vector genome quantification of ssVOY101.PT3 constructs in peripheral tissues

| | | TAU_ITR114 | TAU_ITR118 | TAU_ITR113 | TAU_ITR117 |
|---|---|---|---|---|---|
| | PBS | (SYN.HLT2A) | (SYN.LHT2A) | (GFAP.HLT2A) | (GFAP.LHT2A) |
| Liver | 0.00 | 2.00 | 4.34 | 3.86 | 6.50 |
| | 0.00 | 4.03 | 3.29 | 1.73 | 6.41 |
| | 0.00 | 3.70 | 9.50 | 4.76 | 7.38 |
| | 0.00 | 5.31 | 4.78 | 2.64 | 5.81 |
| | 0.00 | 1.03 | 13.80 | 4.43 | 1.22 |
| | 0.00 | 2.06 | 3.74 | 8.77 | 8.33 |
| | 0.00 | 3.85 | — | 6.95 | — |
| | 0 00 | 2.72 | — | 6.06 | — |
| | | 3.25 | — | 1.56 | — |
| Avg. | 0.00 | 3.11 | 6.58 | 4.53 | 5.94 |
| Spleen | 0.00 | 0.92 | 0.41 | 10.97 | 7.05 |
| | 0.00 | 0.80 | 4.07 | 0.22 | 1.06 |
| | 0.00 | 15.69 | 0.59 | 14.33 | 0.81 |
| | 0.00 | 0.57 | 19.40 | 0.55 | 0.67 |
| | 0 00 | 0.19 | 5.48 | 0.59 | 0.78 |
| | 0.00 | 0.15 | 0.77 | 37.74 | 1.03 |
| | 0.00 | 5.84 | — | 8.54 | — |
| | 0.00 | 1.48 | — | 0.57 | — |
| | | 0.27 | — | 1.94 | — |
| Avg. | 0.00 | 2.88 | 5.12 | 8.38 | 1.90 |
| Skeletal | 0.00 | 0.68 | 1.78 | 1.10 | 0.95 |
| Muscle | 0.00 | 1.45 | 5.56 | 0.39 | 0.85 |
| | 0.00 | 1.07 | 0.64 | 0.93 | 0.67 |
| | 0.00 | 0.76 | 0.25 | 1.53 | 1.58 |
| | 0.00 | 0.39 | 0.29 | 2.74 | 0.81 |
| | 0.00 | 0.55 | 1.10 | 0.70 | 0.60 |
| | 0.00 | 2.21 | — | 1.05 | — |
| | 0.00 | 0.70 | — | 1.17 | — |
| | | 0.64 | — | 0.90 | — |
| Avg. | 0.00 | 0.94 | 1.60 | 1.17 | 0.91 |

| | TAU_ITR106 | TAU_ITR110 | TAU_ITR105 | TAU_ITR109 |
|---|---|---|---|---|
| | (SYN.HLF2A) | (SYN.LHF2A) | (GFAP.HLF2A) | (GFAP.LHF2A) |
| Liver | 1.91 | 3.38 | 5.32 | 1.51 |
| | 6.81 | 0.00 | 3.90 | 4.08 |
| | 6.60 | 7.60 | 8.66 | 4.04 |
| | 12.00 | 4 17 | 2.71 | 7.62 |
| | 11.65 | 1.08 | 4.69 | 8.29 |
| | 18.58 | 4.09 | 2.50 | 3.97 |
| | — | — | — | — |
| | — | — | — | — |
| | — | — | — | — |
| Avg. | 9.59 | 3.39 | 4.63 | 4.92 |
| Spleen | 1.30 | 0.43 | 32.61 | 0.56 |
| | 16.82 | 0.51 | 0.76 | 1.55 |
| | 10.11 | 4.72 | 1.21 | 0.09 |
| | 3.36 | 16.62 | 9.64 | 3.10 |
| | 5.70 | 1.20 | 0.47 | 0.82 |
| | 12.35 | 2.70 | 1.12 | 4.43 |
| | — | — | — | — |
| | — | — | — | — |
| | — | — | — | — |
| Avg. | 8.27 | 4.36 | 7.63 | 1.76 |
| Skeletal | 1.12 | 0.36 | 1.33 | 0.56 |
| Muscle | 2.03 | 0.44 | 1.24 | 0.55 |
| | 0.61 | 0.52 | 0.77 | 0.79 |
| | 0.55 | 0.47 | 0.34 | 0.46 |
| | 0.76 | 0.15 | 0.63 | 0.95 |
| | 0.43 | 0.28 | 0.39 | 1.14 |
| | — | — | — | — |
| | — | — | — | — |
| | — | — | — | — |
| Avg. | 0.92 | 0.37 | 0.78 | 0.74 |

[1524] As shown in Table 167, AAV biodistribution of the various viral genomes tested showed that the biodistribution in the peripheral tissues was much lower than the biodistribution observed in the CNS.

[1525] Samples of hippocampus, cortex, olfactory bulb, thalamus, brainstem, spinal cord, liver, spleen, skeletal muscle and serum were subjected to analysis by ePHF ELISA to determine PT3 expression from each of tbc cell-type specific PT3 viral genomes tested. Control studies were performed to confirm the standard curve and determine that the matrix effect is not observed in this ELISA assay. PT3 antibody expression was then normalized to the viral genome biodistribution (PT3/VG). Data are shown in Table 168 below as ng/mg protein (or ng/mL for serum samples) and Table 169 as PT3/vg (shortened to ab/vg).

TABLE 168
PT3 expression (ng PT3/mg protein)

| | | TAU_ITR114 | TAU_ITR118 | TAU_ITRU3 | TAU_ITR117 |
|---|---|---|---|---|---|
| | PBS | (SYN.HLT2A) | (SYN.LHT2A) | (GFAP.HLT2A) | (GFAP.LHT2A) |
| HC | 0 | 10.93 | 1.87 | 6.45 | 3.32 |
| | 0 | 27.86 | 3.05 | 14.35 | 5.18 |
| | 0 | 17.91 | 2.54 | 28.98 | 0.78 |
| | 0 | 8.17 | 4.78 | 9.06 | 1.55 |
| | 0 | −0.63 | 2.94 | 12.14 | 1.48 |
| | 0 | 17.55 | 0 | 16.30 | 3.55 |
| | 0 | 8.56 | — | 18.60 | — |
| | 0 | 19.96 | — | — | — |
| | — | 17.32 | — | — | — |
| Avg. | 0 | 14.18 | 2.53 | 15.12 | 2.64 |
| CTX | 0 | 12.15 | 6.46 | 49.00 | 10.83 |
| | 0 | 25.42 | 6.02 | 15.75 | 14.66 |
| | 0 | 23.33 | 8.47 | 41.61 | 5.17 |
| | 0 | 16.00 | 13.86 | 50.37 | 7.86 |
| | 0 | 2.24 | 8.21 | 69.70 | 12.22 |
| | 0 | 46.93 | 9.19 | 41.81 | 19.89 |
| | 0 | 56.18 | — | 68.12 | — |
| | 0 | 29.68 | — | 42.17 | — |
| Avg. | 0 | 26.49 | 8.70 | 47.32 | 11.77 |
| OB | 0 | 19.47 | 14.15 | 59.57 | 30.68 |
| | 0 | 58.45 | 19.67 | 43.29 | 53.70 |
| | 0 | 115.91 | 15.69 | 153.88 | 56.29 |
| | 0 | 79.90 | 12.41 | 151.17 | 82.15 |
| | 0 | 4.62 | 19.47 | 110.06 | 97.04 |
| | 0 | 67.05 | 24.42 | 209.14 | 133.00 |
| | 0 | 72.37 | — | 187.76 | — |
| | 0 | 54.52 | — | 233.63 | — |
| | — | 90.94 | — | 135.86 | — |
| Avg. | 0 | 62.58 | 17.64 | 142.71 | 75.48 |
| TH | 0 | 28.37 | 25.95 | 28.43 | 4.86 |
| | 0 | 89.14 | 20.82 | 6.14 | 6.34 |
| | 0 | 74.84 | 32.33 | 29.82 | 4.03 |
| | 0 | 84.59 | 25.53 | 30.61 | 2.13 |
| | 0 | 9.01 | 23.38 | 11.69 | 9.79 |
| | 0 | 39 | 4.75 | 16.15 | 14.6 |
| | 0 | 101.52 | — | 24.96 | — |
| | 0 | 21.89 | — | 16.96 | — |
| | — | 75.46 | — | — | — |
| Avg. | 0 | 58.20 | 22.13 | 20.60 | 6.96 |
| BS | 0 | 44.59 | 16.11 | 56.24 | 10.8 |
| | 0 | 79.98 | 18.31 | 33.04 | 13.05 |
| | 0 | 72.07 | 25.29 | 134.39 | 13.87 |
| | 0 | 42.39 | 17.80 | 57.02 | 9.72 |
| | 0 | 13.27 | 15.10 | 75.84 | 10.27 |
| | 0 | 58.28 | 20.09 | 37.94 | 15.51 |
| | 0 | 85.51 | — | 60.70 | — |
| | 0 | 62.06 | — | 46.41 | — |
| | — | 70.87 | — | — | — |
| Avg. | 0 | 58.78 | 18.78 | 62.70 | 12.20 |
| SC | 0 | 46.55 | 25.67 | 53.03 | 11.27 |
| | 0 | 86.71 | 44.13 | 34.72 | 15.04 |
| | 0 | 96.74 | 23.73 | 29.93 | 7.25 |
| | 0 | 73.22 | 32.70 | 45.11 | 8.27 |
| | 0 | 9.62 | 22.02 | 32.53 | 9.53 |
| | 0 | 59.44 | 13.28 | 28.94 | 16.83 |
| | 0 | 103.70 | — | 90.90 | — |
| | 0 | 79.46 | — | 44.64 | — |
| | — | 59.52 | — | 123.22 | — |
| Avg. | 0 | 68.33 | 26.92 | 53.67 | 11.37 |
| Liver | −0.09 | 0.65 | 0.34 | 8.01 | 7.51 |
| | −0.13 | 0.80 | 0.30 | 5.09 | 26.68 |
| | −0.08 | 1.00 | 0.48 | 13.78 | 42.32 |
| | −0.09 | 0.13 | 0.05 | 7.78 | 39.09 |
| | 0.00 | 1.05 | −0.27 | 11.18 | 22.21 |
| | −0.03 | 1.00 | 0.15 | 17.62 | — |
| | −0.07 | 0.89 | — | 13.36 | — |
| | −0.08 | 0.35 | — | 10.70 | — |
| Avg. | 0 | 0.73 | 0.18 | 10.94 | 27.56 |
| Spleen | 1.64 | 0.66 | 0.33 | 18.16 | 17.39 |
| | −1.28 | −0.82 | 0.14 | −4.00 | 20.10 |
| | −1.27 | 0.85 | 2.00 | 5.99 | 55.44 |
| | 0.57 | 2.62 | −0.10 | 5.21 | 36.70 |
| | −1.33 | 3.11 | 1.43 | 16.41 | 0.53 |
| | −1.52 | 0.65 | 0.19 | 6.49 | 74.95 |
| | −1.45 | 1.01 | — | 11.45 | — |
| | −2.38 | 0.75 | — | 10.07 | — |
| Avg. | −1 | 1.10 | 0.67 | 8.72 | 34.19 |
| Muscle | 0 | 0.97 | 0.74 | 1.55 | 2.46 |
| | 0 | 1.79 | 0.35 | 3.30 | 2.47 |
| | 0 | 2.58 | 0.51 | 11.39 | 2.38 |
| | 0 | 9.07 | 0.64 | 21.62 | 2.60 |
| | 0 | 1.73 | 1.88 | 30.43 | 0.62 |
| | 0 | 5.48 | 0.40 | 0.00 | 6.48 |
| | 0 | 16.19 | — | 0.00 | — |
| | 0 | 10.84 | — | 18.93 | — |
| | — | 0.72 | — | 5.03 | — |
| Avg. | 0 | 5.49 | 0.75 | 10.25 | 2.83 |

| | TAU_ITR106 | TAU_ITR110 | TAU_ITR105 | TAU_ITR109 |
|---|---|---|---|---|
| | (SYN.HLF2A) | (SYN.LHF2A) | (GFAP.HLF2A) | (GFAP.LHF2A) |
| HC | 9.11 | 1.83 | 0.54 | 0.24 |
| | 14.16 | −1.49 | 0.08 | 1.49 |
| | 5.39 | 1.57 | 0.13 | −0.59 |
| | 10.2 | 2.03 | −0.54 | 0.33 |
| | 5.8 | −0.73 | 0.16 | 0.41 |
| | 7.04 | 2.16 | −0.39 | 0.29 |
| | — | — | — | — |
| | — | — | — | — |
| | — | — | — | — |
| Avg. | 8.62 | 0.90 | 0.00 | 0.36 |
| CTX | 6.82 | 5.77 | 2.31 | 3.94 |
| | 14.79 | 0.00 | 3.14 | 7.28 |
| | 9.02 | 1.97 | 2.97 | 1.19 |
| | 9.81 | 4.11 | 0.46 | 4.05 |
| | 4.04 | 0.23 | 3.05 | 6.82 |
| | 4.60 | 5.31 | 1.24 | 5.70 |
| | — | — | — | — |
| | — | — | — | — |
| Avg. | 8.18 | 2.90 | 2.20 | 4.83 |
| OB | 19.49 | 4.15 | 23.62 | 11.92 |
| | 20.44 | 0.00 | 2.21 | 29.34 |
| | 17.12 | 6.83 | 9.99 | 14.29 |
| | 30.58 | 12.02 | 4.72 | 21.99 |
| | 12.75 | 1.29 | 14.17 | 41.27 |
| | 25.95 | 13.92 | 13.52 | 34.12 |
| | — | — | — | — |
| | — | — | — | — |
| | — | — | — | — |
| Avg. | 21.06 | 6.37 | 11.37 | 25.49 |
| TH | 10.41 | 16.13 | 3.43 | 1.19 |
| | 31.57 | 0 | 3.64 | 3.41 |
| | 29.82 | 1.05 | 1.62 | 1.3 |
| | 27.54 | 14.76 | 0 | 3.73 |
| | 15.52 | 1.69 | 0.29 | 5.25 |
| | 29.58 | 16.56 | 0.41 | 3.86 |
| | — | — | — | — |
| | — | — | — | — |
| | — | — | — | — |
| Avg. | 24.07 | 8.37 | 1.57 | 3.12 |
| BS | 24.52 | 16.05 | 0.06 | 1.43 |
| | 41.63 | 0.00 | 1.14 | 7.76 |
| | 21.17 | 8.87 | 3.40 | 3.60 |
| | 41.11 | 24.03 | 0.29 | 2.18 |
| | 32.40 | 8.36 | 4.23 | 9.39 |
| | 44.11 | 22.37 | 3.17 | 14.72 |
| | — | — | — | — |
| | — | — | — | — |
| | — | — | — | — |
| Avg. | 34.16 | 13.28 | 2.05 | 6.51 |
| SC | 33.43 | 31.66 | 10.63 | 6.52 |
| | 73.11 | 0.00 | 5.11 | 11.46 |
| | 47.52 | 14.82 | 7.47 | 3.05 |
| | 68.34 | 11.73 | 1.29 | 6.97 |
| | 52.26 | 5.95 | 5.61 | 9.52 |
| | 42.91 | 28.6 | 4.41 | 10.27 |
| | — | — | — | — |
| | — | — | — | — |
| | — | — | — | — |
| Avg. | 52.93 | 15.46 | 5.75 | 7.97 |
| Liver | 0.52 | 0.10 | 4.30 | 8.14 |
| | 0.30 | −0.04 | 3.60 | 14.99 |
| | −0.24 | −0.03 | 30.70 | 22.07 |
| | −0.03 | 0.11 | 10.27 | 22.68 |
| | 0.15 | 0.02 | 6.17 | 31.91 |
| | 0.37 | 0.13 | 0.97 | 17.71 |
| | — | — | — | — |
| | — | — | — | — |
| Avg. | 0.18 | 0.05 | 9.33 | 19.58 |
| Spleen | 0.10 | −0.34 | 4.20 | 2.24 |
| | 0.48 | −0.57 | 3.74 | 4.27 |
| | −1.23 | −0.21 | 5.56 | 29.90 |
| | 0.02 | −0.22 | 2.70 | 29.66 |
| | 0.48 | −0.72 | 3.83 | 9.22 |
| | 0.87 | −0.49 | 2.71 | 5.43 |
| | — | — | — | — |
| | — | — | — | — |
| Avg. | 0.12 | −0.42 | 3.79 | 13.45 |
| Muscle | 0.14 | 0.00 | 0.52 | 0.39 |
| | 0.40 | 0.00 | 1.0.3 | 2.9.3 |
| | 0.37 | 0.18 | 1.58 | 6.70 |
| | 0.33 | 0.21 | 0.73 | 2.41 |
| | 0.91 | 0.02 | 0.76 | 8.27 |
| | 0.46 | 0.02 | 0.99 | 18.48 |
| | — | — | — | — |
| | — | — | — | — |
| | — | — | — | — |
| Avg. | 0.44 | 0.07 | 0.93 | 6.53 |

TABLE 169
PTS expression (PT3/vg)

| | | TAU_ITR114 | TAU_ITR118 | TAU_ITR113 | TAU_ITR117 |
|---|---|---|---|---|---|
| | PBS | (SYN.HLT2A) | (SYN.LHT2A) | (GFAP.HLT2A) | (GFAP.LHT2A) |
| HC | 0 | 0.57 | 0.09 | 0.61 | 0.10 |
| | 0 | 0.54 | 0.05 | 0.79 | 0.11 |
| | 0 | 0.96 | 0.10 | 1.44 | 0.04 |
| | 0 | 0.72 | 0.07 | 0.18 | 0.06 |
| | 0 | 0.00 | 0.09 | 0.82 | 0.04 |
| | 0 | 1.17 | 0.00 | 0.63 | 0.08 |
| | 0 | 0.46 | — | 0.45 | — |
| | 0 | 1.55 | — | — | — |
| Avg. | 0 | 0.75 | 0.07 | 0.70 | 0.07 |
| CTX | 0 | 0.83 | 0.11 | 2.02 | 0.29 |
| | 0 | 0.91 | 0.18 | 0.64 | 0.63 |
| | 0 | 0.74 | 0.33 | 1.74 | 0.21 |
| | 0 | 0.68 | 0.43 | 1.59 | 0.28 |
| | 0 | 0.32 | 0.30 | 1.92 | 0.25 |
| | 0 | 2.31 | 0.15 | 2.10 | 0.38 |
| | 0 | 2.16 | — | 1.97 | — |
| | 0 | — | — | 1.22 | — |
| Avg. | 0 | 1.13 | 0.25 | 1.65 | 0.34 |
| OB | 0 | 3.23 | 0.29 | 3.92 | 0.53 |
| | 0 | 2.88 | 2.35 | 13.95 | 1.81 |
| | 0 | 6.20 | 0.53 | 8.99 | 3.62 |
| | 0 | 11.16 | 0.42 | 4.11 | 2.85 |
| | 0 | 0.84 | 0.82 | 4.84 | 2.89 |
| | 0 | 4.51 | 1.88 | 13.72 | 2.57 |
| | 0 | 2.62 | — | 6.23 | — |
| | 0 | 3.34 | — | 5.55 | — |
| | 0 | 4.24 | — | 7.23 | — |
| Avg. | 0 | 4.34 | 1.05 | 7.61 | 2.38 |
| TH | 0 | 1.39 | 0.11 | 0.89 | 0.12 |
| | 0 | 1.74 | 0.57 | 0.26 | 0.19 |
| | 0 | 1.86 | 0.16 | 0.00 | 0.07 |
| | 0 | 3.25 | 0.11 | 0.78 | 0.02 |
| | 0 | 1.15 | 0.13 | 0.70 | 0.24 |
| | 0 | 1.37 | 0.11 | 0.47 | 0.21 |
| | 0 | 3.67 | — | 0.38 | — |
| | 0 | 1.20 | — | 0.59 | — |
| | 0 | 3.14 | — | 0.38 | — |
| Avg. | 0 | 2.09 | 0.20 | 0.49 | 0.14 |
| BS | 0 | 2.01 | 0.52 | 1.59 | 0.10 |
| | 0 | 1.73 | 0.18 | 1.27 | 0.34 |
| | 0 | 1.53 | 0.15 | 3.22 | 0.17 |
| | 0 | 1.59 | 0.35 | 1.08 | 0.10 |
| | 0 | 1.37 | 0.54 | 1.47 | 0.21 |
| | 0 | 1.69 | 0.40 | 1.52 | 0.12 |
| | 0 | 1.49 | — | 0.98 | — |
| | 0 | 1.82 | — | 0.90 | — |
| | 0 | 1.35 | — | | — |
| Avg. | 0 | 1.62 | 0.36 | 1.50 | 0.17 |
| SC | 0 | 3.69 | 0.46 | 2.65 | 0.27 |
| | 0 | 3.69 | 1.44 | 2.64 | 0.33 |
| | 0 | 4.17 | 0.10 | 1.31 | 0.11 |
| | 0 | 3.43 | 0.47 | 1.80 | 0.12 |
| | 0 | 2.24 | 0.75 | 0.35 | 0.21 |
| | 0 | 2.06 | 0.41 | 1.49 | 0.24 |
| | 0 | 4.15 | — | 3.11 | — |
| | 0 | 5.62 | — | 1.58 | — |
| | 0 | 2.61 | — | 1.77 | — |
| Avg. | 0 | 3.52 | 0.60 | 1.85 | 0.21 |
| | | TAU_ITR106 | TAU_ITR110 | TAU_ITR105 | TAU_ITR109 |
| | | (SYN.HLF2A) | (SYN.LHF2A) | (GFAP.HLF2A) | (GFAP.LHF2A) |
| | HC | 0.38 | 0.07 | 0.02 | 0.01 |
| | | 0.52 | 0.00 | 0.00 | 0.04 |
| | | 0.15 | 0.09 | 0.00 | 0.00 |
| | | 0.08 | 0.08 | 0.00 | 0.01 |
| | | 0.20 | 0.00 | 0.01 | 0.02 |
| | | 0.24 | 0.05 | 0.00 | 0.01 |
| | | — | — | — | — |
| | | — | — | — | — |
| | Avg. | 0.26 | 0.05 | 0.01 | 0.01 |
| | CTX | 0.40 | 0.20 | 0.07 | 0.15 |
| | | 0.34 | 0.00 | 0.15 | 0.15 |
| | | 0.32 | 0.09 | 0.11 | 0.06 |
| | | 0.14 | 0.11 | 0.03 | 0.09 |
| | | 0.16 | 0.04 | 0.07 | 0.19 |
| | | 0.16 | 0.22 | 0.04 | 0.09 |
| | | — | — | — | — |
| | | — | — | — | — |
| | Avg. | 0.25 | 0.11 | 0.08 | 0.12 |
| | OB | 0.95 | 0.08 | 1.05 | 0.94 |
| | | 0.53 | 0.00 | 0.08 | 1.44 |
| | | 0.96 | 0.17 | 0.71 | 0.44 |
| | | 1.65 | 0.42 | 0.48 | 0.48 |
| | | 0.32 | 0.18 | 0.36 | 0.57 |
| | | 1.33 | 0.61 | 0.62 | 0.44 |
| | | — | — | — | — |
| | | — | — | — | — |
| | | — | — | — | — |
| | Avg. | 0.96 | 0.24 | 0.55 | 0.72 |
| | TH | 0.18 | 0.41 | 0.12 | 0.02 |
| | | 0.49 | 0.00 | 0.09 | 0.10 |
| | | 0.50 | 0.02 | 0.08 | 0.06 |
| | | 0.50 | 0.44 | 0.00 | 0.05 |
| | | 0.42 | 0.17 | 0.00 | 0.16 |
| | | 0.74 | 0.30 | 0.02 | 0.06 |
| | | — | — | — | — |
| | | — | — | — | — |
| | | — | — | — | — |
| | Avg. | 0.47 | 0.22 | 0.05 | 0.07 |
| | BS | 0.99 | 0.49 | 0.00 | 0.03 |
| | | 0.74 | 0.00 | 0.05 | 0.16 |
| | | 0.23 | 0.15 | 0.03 | 0.12 |
| | | 0.24 | 0.41 | 0.02 | 0.03 |
| | | 0.44 | 0.58 | 0.08 | 0.14 |
| | | 0.30 | 0.29 | 0.07 | 0.17 |
| | | — | — | — | — |
| | | — | — | — | — |
| | | — | — | — | — |
| | Avg. | 0.49 | 0.32 | 0.04 | 0.11 |
| | SC | 0.44 | 1.09 | 0.29 | 0.05 |
| | | 0.68 | 0.00 | 0.12 | 0.34 |
| | | 0.71 | 0.62 | 0.09 | 0.15 |
| | | 1.27 | 0.27 | 0.12 | 0.29 |
| | | 0.00 | 0.29 | 0.14 | 0.11 |
| | | 0.89 | 1.11 | 0.19 | 0.25 |
| | | — | — | — | — |
| | | — | | — | — |
| | | — | — | — | — |
| | Avg. | 0.67 | 0.56 | 0.16 | 0.20 |

[1526] PT3 expression was evident in all CNS tissue tested and limited expression was detected in the peripheral tissues of mice treated with each of the viral genomes. Higher PT3 expression (ng/mg or PT3/vg) was observed when mice were administered HL.T2A viral genomes (i.e. TAU_ITR114 (SYN.HL.T2A); TAU_ITR113 (GFAP.HL.T2A) regardless of the promoter used when compared to PT3 expression obtained with HL.F2A configuration (i.e. TAU_ITR106 (SYN.HL. F2A); TAU_ITR105 (GFAP.HL.F2A).

[1527] Comparing the PT3 expression in mice treated with TAU_ITR112 (Voy101.CAG.PT3.H.F.T2A.L) described in Table 163 with TAU_ITR113 (GFAP.HL.T2A) or TAU_ITR114 (SYN.HL.T2A), CAG.PT3.H.F.T2A.L resulted in significantly higher expression in the cortex, hippocampus and thalamus compared to GFAP.HL.T2A (p value <0.005 (cortex) and <0.0005 (hippocampus and thalamus). Expression of PT3 in cortex and hippocampus of mice treated with CAG.PT3.H.F.T2A.L was also higher in comparison to PT3 expression in mice treated with SYN.HL.T2A (p value <0.0005). In the thalamus, SYN.HL.T2A resulted in higher PT3 expression compared to GFAP.HL.T2A (p value <0.005).

[1528] PT3 expression in the CSF and serum were also measured (Table 170).

TABLE I70
PTS expression (PT3/vg) in serum and CSF

| | | TAU_ITR114 | TAU_ITR118 | TAU_ITR113 | TAU_ITR117 |
|---|---|---|---|---|---|
| | PBS | (SYN.HLT2A) | (SYN.LHT2A) | (GFAP.HLT2A) | (GFAP.LHT2A) |
| Serum | 0 | 1422.62 | 3588.88 | 27805.72 | 244053.65 |
| | 0 | 387.99 | 4257.08 | 126354.36 | 158211.62 |
| | 0 | 32720.22 | 4372.04 | 116784.02 | 280417.29 |
| | 0 | 10216.99 | 3078.75 | 164247.74 | 349567.81 |
| | 0 | 6078.46 | 3387.70 | 163730.42 | 175380.03 |
| | 0 | 19270.01 | 3064.38 | 249475.50 | 569538.00 |
| | 0 | — | — | 272754.71 | — |
| | 0 | — | — | 92470.18 | — |
| Avg. | 0 | 11682.71 | 3624.80 | 151702.83 | 296194.73 |
| CSF | 0 | 227.49 | 0 | 445.07 | 116.53 |
| | 0 | 315.66 | 158.17 | 109.68 | 120.10 |
| | 0 | 269.25 | 123.37 | 182.48 | 0.00 |
| | 0 | 383.49 | 216.18 | 223.62 | 135.56 |
| | 0 | 87.67 | 185.84 | 313.16 | 196.55 |
| | 0 | 416.69 | | 497.31 | 170.67 |
| | 0 | 336.56 | — | 249.55 | — |
| | 0 | 379.55 | — | 315.74 | — |
| | | 349.95 | — | — | — |
| Avg. | 0 | 307.37 | 136.71 | 292.08 | 123.23 |

| | TAU_ITR106 | TAU_ITR110 | TAU_ITR105 | TAU_ITR109 |
|---|---|---|---|---|
| | (SYN.HLF2A) | (SYN.LHF2A) | (GFAP.HLF2A) | (GFAP.LHF2A) |
| Serum | 12652.76 | 4884.64 | 34214.00 | 27938.64 |
| | 15906.61 | 308.06 | 20636.41 | 63613.08 |
| | 11261.80 | 4041.58 | 62015.72 | 56539.05 |
| | 15037.26 | 4808.57 | 39918.86 | 86166.33 |
| | 6120.22 | 1404.67 | 57718.05 | 89931.54 |
| | 6741.18 | 6895.28 | 24363.59 | 69774.34 |
| | — | — | — | — |
| | — | — | — | — |
| Avg. | 11286.64 | 3723.80 | 39811.11 | 65660.50 |
| CSF | 109.39 | 31.44 | 30.55 | 25.20 |
| | 215.29 | 0 | 19.54 | 63.57 |
| | 163.53 | 0 | 26.98 | 215.29 |
| | 203.69 | 64.76 | 25.20 | 59.71 |
| | 237.30 | 11.81 | | 54.05 |
| | 201.31 | 37.99 | | |
| | — | — | — | — |
| | — | — | — | — |
| | — | — | — | — |
| Avg. | 188.42 | 24.33 | 25.57 | 83.56 |

[1529] In T2A group, the serum of mice treated with viral genome configuration TAU_ITR117 (GFAP.LH. T2A) demonstrated a significantly higher PT3 expression compared to mice treated with TAU_ITR114 (SYN.HL.T2A); TAU_ITR118 (SYN.LH. T2A); or TAU_ITR113 (GFAP.HL.T2A) (p value <0.0005; 2 way ANOVA). PT3 expression in the serum of mice treated with TAU_ITR114 (SYN.HL.T2A) was also significantly higher than the expression in the serum of mice treated with TAU_ITR118 (SYN.LH. T2A); and significantly lower than the PT3 expression after administration of TAU_ITR113 (GFAP.HL.T2A) (p value <0.0005). No significant difference in PT3 expression was observed in mice treated with any of the F2A based genome configurations. The CSF of mice treated with TAU_ITR114 (SYN.HL.T2A) showed significantly higher PT3 expression compared to mice treated with TAU_ITR117 (GFAP.LH. T2A) (p value <0.0005) or TAU_ITR118 (SYN.LH. T2A) (p value <0.005). Similarly, PT3 expression in the CSF of mice treated with TAU_ITR113 (GFAP.HL.T2A) was higher than the expression in mice treated with TAU_ITR117 (GFAP.LH. T2A) or TAU_ITR118 (SYN.LH. T2A) (p value <0.005). In the F2A cohort, PT3 expression in the CSF was significantly greater in mice treated with TAU_ITR114 (SYN.HL.T2A) compared to mice treated with TAU_ITR118 (SYN.LH. T2A) (p value <0.005) or TAU_ITR113 (GFAP.HL.T2A) (p value <0.05). In general, in the T2A cohort, the PT3 expression in the CSF was higher in mice treated with HL configuration genomes compared to the LH genome configuration regardless of the promoter used.

[1530] The PT3 expression obtained using cell specific promoters in various genome configurations was compared with IPN002 expression in mice using identical promoters and genome configurations (see Table 108 and Table 111 in Example 8). Regardless of the cell specific promoter used, the HLT2A genome configuration resulted in higher anti tau antibody expression (ng/mg or ab/vg) in the CNS compared to the LHT2A or HLF2A genome configurations. Overall, higher IPN002 expression than PT3 expression (ab/vg) was obtained when using similar genome configurations. In both the PT3 study (instant example) and the IPN002 (Example 8), low levels of anti-tau antibody were observed in the peripheral tissues. In general, serum antibody levels were higher when the GFAP promoter was used than when the Syn promoter was used. Within the GFAP promoter based constructs, higher antibody expression was observed within the T2A group than the F2A group. In the CSF, no significant difference was observed in IPN002 study across all genome configurations analyzed within the T2A or F2A groups. However. HLT2A configuration resulted in higher IPN002 expression compared to HLF2A configuration or LHT2A configuration.

[1531] Taken together, these studies demonstrated that the mice treated with antibody constructs comprising the HLT2A genome configuration (heavy-linker-light) demonstrated comparatively more antibody expression (ab/vg), based on functional binding ELISA.

[1532] Anti-tau antibody distribution was evaluated using anti-IgG1 antibody-immunohistochemistry using DAB for detection. Broad distribution of PT3 expression in the brain was observed in all the tested viral genome configurations except the PBS group. Cell specific expression was measured in conjunction with anti-S100β immunohistochemistry using green chromogen (S100β is used an astrocytic cell marker). Promoter specific expression was observed in the neurons or astrocytes of mice treated with the corresponding promoters.

[1533] Comparing PT3 expression (ng/mg) among ubiquitous and cell specific promoters utilizing TAU_ITR111 (Voy101.CBA.PT3.H.F.T2A.L), TAU_ITR112 (Voy101.CAG.PT3.H.F.T2A.L), TAU_ITR113 (GFAP.HL.T2A), TAU_ITR114 (SYN.HL.T2A) constructs, it was noted that ubiquitous promoters produced higher PT3 expression in the CNS compared to cell-specific promoters. However, the PT3 levels in the CSF were comparable among all 4 promoters.

### Example 21. In Vivo Analysis of Constructs for Expression of Antibody Fragments

### IPN002 Fab Viral Genomes in Mice

[1534] To study biodistribution, tissue tropism and expression patterns of anti-tau antibody IPN002 fragments (Fab vs (Fab′)²) driven by CAG promoter in serum, CSF and/or CNS tissue of mice after intravenous delivery of AAV particles, viral genomes described in Table 171 were packaged into VOY101 capsids. AAV particles were formulated and provided intravenously at a dose of 1.4×10¹³ vg/kg into 2 month-old female C57Bl/6 mice. 28 days after administration, mice were sacrificed, perfused intracardially with PBS and CSF and/or tissue samples (hippocampus, cortex, thalamus, brain stem, spinal cord, olfactory bulb, CSF) were collected for analysis. Study design is shown in Table 171.

TABLE 171
Biodistribution of VOY101.IPN002 viral genomes (AAV genomes/cell)

| | | SEQ | | | | | | End |
|---|---|---|---|---|---|---|---|---|
| | TAU_ITR | ID | | Dose | Dose | | | of |
| AAV Particle | ID | NO: | μL | (vg/kg) | (vg) | Route | N | study |
| IPN002.(Fab\grave{ })₂.CAG.HL.T2 | TAU_ITR126 | 2176 | 100 | 1.4 × 10¹³ | 2.8 × 10¹¹ | IV | 6 | Day 28 |
| IPN002.Fab_ext.CAG.HL.T2 | TAU_ITR128 | 2178 | 100 | 1.4 × 10¹³ | 2.8 × 10¹¹ | IV | 6 | Day 28 |
| IPN002.Fab_ext.CAG.LH.T2 | TAU_ITR130 | 2180 | 100 | 1.4 × 10¹³ | 2.8 × 10¹¹ | IV | 6 | Day 28 |
| PBS | — | — | 100 | — | — | IV | 4 | D 28 |

[1535] VG/DC (vector genome/diploid cell) was quantified for a subset of tissues, such as for brain, and CSF by droplet digital PCR. Antibody levels in the hippocampus, cortex, olfactory bulb, and CSF were quantified using ePHF ELISA, as described above. Vector genome biodistribution quantification (VG/DC) in brain and spinal cord are shown in Table 172 and the antibody level measurements are shown in Table 173 and Table 174. Significance was analyzed using one-way ANOVA-Tukey's multiple comparison test.

TABLE 172
Biodistribution of VOY101.IPN002 viral genomes (AAV genomes/cell)

| AAV | | | Olfactory | | | Spinal |
|---|---|---|---|---|---|---|
| Partide | Hippocampus | Cortex | bulb | Thalamus | Brainstem | Cord |
| TAU_ITR126 | 15.82 | 18.60 | 9.17 | 62.46 | 38.13 | 21.96 |
| (IPN002.(Fab\grave{ })₂.CAG.HL.T2) | 20.55 | 27.61 | 21.94 | 80.46 | 52.24 | 20.40 |
| | 30.65 | 13.52 | 20.70 | 55.02 | 41.81 | 29.69 |
| | 28.30 | 30.93 | 31.83 | 62.82 | 105.57 | 83.17 |
| | 15.14 | 20.04 | 27.89 | 55.62 | 62.12 | 45.10 |
| | 13.35 | 14.19 | 25.05 | 39.21 | 56.85 | 32.47 |
| Average | 20.63 | 20.82 | 22.76 | 59.27 | 59.45 | 38.80 |
| TAU_ITR128 | 19.17 | 22.18 | 21.60 | 54.91 | 39.88 | 23.48 |
| (IPN002.Fab_ext.CAG.HL.T2) | 11.66 | 18.18 | 19.06 | 24.56 | 24.39 | 25.99 |
| | 14.09 | 25.64 | 48.77 | 84.41 | 64.66 | 4.93 |
| | 8.26 | 14.96 | 23.06 | 28.80 | 28.00 | 17.52 |
| | 2.45 | 3.36 | 2.90 | 8.50 | 6.33 | 38.29 |
| | 20.22 | 39.86 | 30.62 | 69.61 | 78.87 | 36.96 |
| Average | 12.64 | 20.70 | 24.33 | 45.13 | 40.36 | 24.53 |
| TAU_ITR130 | 17.16 | 23.89 | 20.93 | 45.81 | 57.77 | 31.99 |
| (IPN002.Fab_ext.CAG.LH.T2) | 21.36 | 51.64 | 21.64 | 59.06 | 77.14 | 53.97 |
| | 17.26 | 33.18 | 20.10 | 55.46 | 50.30 | 33.16 |
| | 24.74 | 25.15 | 27.57 | 32.72 | 64.24 | 30.44 |
| | 22.43 | 28.26 | 69.07 | 86.67 | 135.44 | 58.60 |
| | 59.46 | 27.90 | — | 20.49 | 39.21 | 20.51 |
| Average | 27.07 | 31.67 | 31.86 | 50.04 | 70.69 | 38.11 |
| PBS | — | 0.01 | 0.00 | 0.00 | 0.0 | 0.02 |

[1536] Among the Fab constructs tested, TAU_ITR130 (IPN002.Fab_ext.CAG.LH.T2) showed higher expression in all tissue types tested when compared to TAU_ITR128 (IPN002.Fab_ext.CAG.HL.T2). Among the (Fab′)2 based constructs and the Fab constructs tested, the (Fab′)2 construct TAU_ITR126 (IPN002.(Fab′)2.CAG.HL.T2) showed highest expression.

TABLE 173
IPN002 fragment expression in CNS

| | Hippocampus | | Cortex | | Olfactory bulb | |
|---|---|---|---|---|---|---|
| | ng/mg | scFv/ | ng/mg | | ng/mg | |
| Construct | protein | Vg | protein | scFv/Vg | protein | seFv/Vg |
| TAU_ITR126 | 5.18 | 6.33 | 16.17 | 0.87 | 14.00 | 1.53 |
| (IPN002.(Fab\grave{ })₂.CAG.HL.T2) | 14.25 | 0.69 | 22.42 | 0.81 | 17.24 | 0.79 |
| | 7.68 | 0.25 | 11.31 | 0.84 | 8.22 | 0.40 |
| | 14.18 | 0.50 | 23.90 | 0.77 | 23.72 | 0.75 |
| | 9.42 | 0.62 | 20.19 | 1.01 | 20.91 | 0.75 |
| | 7.34 | 0.55 | 20.63 | 1.45 | 19.72 | 0.79 |
| Average | 9.68 | 0.49 | 19.10 | 0.96 | 17.30 | 0.83 |
| TAU_ITR128 | 38.48 | 2.01 | 48.38 | 2.18 | 44.25 | 2.05 |
| (IPN002.Fab_ext.CAG.HL.T2) | 15.52 | 1.33 | 51.81 | 2.85 | 28.63 | 1.50 |
| | 31.54 | 2.24 | 55.66 | 2.17 | 38.50 | 0.79 |
| | 19.38 | 2.35 | 37.28 | 2.49 | 30.98 | 1.34 |
| | 2.86 | 1.87 | 3.39 | 1.32 | 47.55 | 1.55 |
| | 37.92 | — | 52.48 | — | — | |
| Average | 24.28 | 1.96 | 41.50 | 2.20 | 37.98 | 1.45 |
| TAU_ITR130 | 24.52 | 1.43 | 37.72 | 1.58 | 22.80 | 1.09 |
| (IPN002.Fab_ext.CAG.LH.T2) | 9.73 | 0.46 | 43.89 | 0.85 | 21.23 | 0.98 |
| | 9.35 | 0.77 | 25.22 | 0.72 | 10.84 | 0.94 |
| | 13.29 | 0.59 | 23.90 | 1.11 | 18.90 | 0.27 |
| | 12.81 | 0.30 | 22.37 | 1.79 | 18.53 | — |
| | 13.26 | — | 31.24 | — | 22.92 | — |
| | 17.86 | — | 49.90 | — | — | — |
| Average | 14.40 | 0.71 | 33.46 | 1.21 | 19.20 | 0.82 |
| Vehicle | 0.00 | 0.00 | 0.00 | 0.00 | 0.00 | 0.00 |
| (PBS) | | | | | | |

TABLE 174
IPN002 Fab or (Fab′)₂ expression in CSF

| | ng/mg | pM |
|---|---|---|
| | (Fab′)2 or | (Fab′)2 or |
| Construct | Fab per ml | Fab |
| TAU_ITR126 | 43.63 | 392.54 |
| (IPN002.(Fab′)₂.CAG.HL.T2) | 46.48 | 418.18 |
| | 23.94 | 215.38 |
| | 34.56 | 310.96 |
| | — | — |
| | — | — |
| Average | 37.15 | 334.27 |
| TAU_ITR128 | 308.03 | 6165.939 |
| (IPN002.Fab_ext.CAG.HL.T2) | 295.16 | 5908.297 |
| | 343.59 | 6877.729 |
| | 208.77 | 4179.039 |
| Average | 288.89 | 5782.751 |
| TAU_ITR130 | 189.14 | 3786.026 |
| (IPN002.Fab_ext.CAG.LH.T2) | 192.19 | 3847.162 |
| | 129.36 | 2589.520 |
| | 211.61 | 4235.808 |
| | 172.12 | 3445.415 |
| | 212.26 | 4248.908 |
| Average | 184.45 | 3692.140 |
| Vehicle (PBS) | 0.00 | 0.00 |

[1537] Among the Fab constructs. HL based construct TAU_ITR128 (IPN002.Fab_ext.CAG.HL.T2), appeared to have higher expression compared to TAU_ITR130 (IPN002.Fab_ext.CAG.LH.T2).

[1538] Immunohistochemistry using anti-Kappa antibody was performed on brain tissue of mice treated with an IV bolus injection of ssVOY101.IPN002 AAV particles comprising viral genomes encoding (Fab′)₂ or Fab, driven by CAG promoters 28 days prior. Broad distribution of IPN002 (Fab′)₂ or Fab antibody delivered by VOY101 using CAG promoter with the configurations described in Table 171 was observed both in the CNS and in the spinal cord. Stronger staining in multiple CNS regions was detected with TAU_ITR128 (IPN002.Fab_ext.CAG.HL.T2) as compared to the other constructs listed in Table 171.

[1539] Localization studies showed that all three constructs listed in Table 171 were distributed to both neurons and astrocytes.

### PT3 Fab Viral Genomes in Mice

[1540] To study the biodistribution, tissue tropism and expression of anti-tau antibody PT3 fragments (Fab and (Fab)₂) in serum, CSF and/or CNS tissue of mice after intravenous delivery of AAV particles, viral genomes described in Table 175 were packaged into VOY101 capsids. AAV particles were formulated and provided intravenously at a dose of 1.4×10¹³ vg/kg to 2 month-old female C57Bl/6 mice. Twenty-eight days after administration, mice were sacrificed, perfused intracardially with PBS and CSF and/or tissue samples (hippocampus, cortex, thalamus, brain stem, spinal cord, olfactory bulb, CSF) were collected for analysis. Study design is shown in Table 175.

TABLE 175
PT3 Fab/F(ab\grave{ })₂ IV study design

| | | SEQ | | | | | | End |
|---|---|---|---|---|---|---|---|---|
| | TAU_ITR | ID | | Dose | ~Dose | | | of |
| Construct Configuration | ID | NO: | μl | VG/kg | Vg | Route | N | study |
| CAG PT3_Fab H.F.T2A.L | TAU_ITR180 | 2230 | 100 | 1.4E13 | 2.8E11 | IV | 6 | D 28 |
| SYN.PT3_Fab H.F.T2A.L | TAU_ITR188 | 2260 | 100 | 1.4E13 | 2.8E11 | IV | 6 | D 28 |
| GFAP.PT3_Fab H.F.T2A.L | TAU_ITR189 | 2261 | 100 | 1.4E13 | 2.8E11 | IV | 6 | D 28 |
| CAG PT3_F(ab′)₂ | TAU_ITR190 | 2262 | 100 | 1.4E13 | 2.8E11 | IV | 6 | D 28 |
| H.hIgG3_3Hinge.F.T2A.L | | | | | | | | |
| SYN.PT3_F(ab′)2 | TAU_ITR191 | 2263 | 100 | 1.4E13 | 2.8E11 | IV | 6 | D 28 |
| H.hIgG3_3Hinge.F.T2A.L | | | | | | | | |
| GFAP.PT3_F(ab′)₂ | TAU_ITR192 | 2264 | 100 | 1.4E13 | 2.8E11 | IV | 6 | D 28 |
| H.hIgG3_3Hinge.F.T2A.L | | | | | | | | |
| CAG PT3_F(ab′)₂ | TAU_ITR193 | 2265 | 100 | 1.4E13 | 2.8E11 | IV | 6 | D 28 |
| H.hIgG3_3Hinge.F.F2A.L | | | | | | | | |
| SYN PT3_F(ab′)₂ | TAU_ITR194 | 2266 | 100 | 1.4E13 | 2.8E11 | IV | 6 | D 28 |
| H.hIgG3_3Hinge.F.F2A.L | | | | | | | | |
| GFAP PT3_F(ab′)₂ | TAU_ITR195 | 2267 | 100 | 1.4E13 | 2.8E11 | IV | 6 | D 28 |
| H.hIgG3_3Hinge.F.F2A.L | | | | | | | | |
| PBS | — | — | 100 | | — | IV | 8 | D 28 |

[1541] Vector genome was quantified for a subset of tissues, such as for brain, spinal cord, CSF, serum, and liver by droplet digital PCR and normalized per diploid cell (VG/DC) using the endogenous mouse transferrin receptor C gene (TFRC). Antibody levels in the tissues were quantified using ePHF ELISA, as described above. For these experiments, an anti-kappa-HRP was used as the detection antibody in the ePHF ELISA and a recombinant PT3 Fab or F(ab′)2 was used as a standard. Vector genome biodistribution quantification (VG/DC) in brain and spinal cord are shown in Table 176 and the antibody level measurements are shown in Table 177 and Table 178. Significance was analyzed using one-way ANOVA-Tukey's multiple comparison test. The results were also compared to the data obtained by transducing rodents with scFv constructs described in Table 153. Table 154. Table 155, and Table 156.

TABLE 176
Biodistribution of VOY101.PT3 viral
genomes (AAV genomes/cell)

| Construct Configuration | | | Olfactory | Spinal |
|---|---|---|---|---|
| (TAU_ITR ID) | Cortex | Hippocampus | Bulb | Cord |
| Vehicle | 0.00 | 0.00 | 0.00 | 0.00 |
| GFAP.F(ab′)₂.HL.T2A | 59.66 | 96.407 | 93.93 | 175.95 |
| (TAU_ITR192) | 25.84 | 16.215 | 58.22 | 90.17 |
| | 35.97 | 34.999 | 41.80 | 77.01 |
| | 13.17 | 17.486 | 33.98 | 30.39 |
| | 36.06 | 65.657 | 82.67 | 133.80 |
| | 36.49 | 39.704 | 57.63 | 76.65 |
| Average | 34.53 | 45.08 | 61.37 | 97.33 |
| SYN.F(ab′)₂.HL.T2A | 25.76 | 29.356 | 33.32 | 62.15 |
| (TAU_ITR191) | 33.72 | 65.259 | 72.73 | 35.69 |
| | 35.29 | 31.863 | 45.38 | 114.84 |
| | 31.71 | 40.863 | 72.96 | 123.35 |
| | 34.91 | 44.189 | 51.50 | 97.39 |
| | 41.11 | 39.333 | 56.87 | 67.66 |
| Average | 33.75 | 41.81 | 55.46 | 83.51 |
| CAG.F(ab′)₂.HL.T2A | 18.00 | 16.861 | 16.48 | 86.92 |
| (TAU_ITR190) | 15.22 | 14.334 | 15.21 | 81.93 |
| | 9.27 | 15.698 | 31.06 | 52.76 |
| | 11.63 | 15.610 | 15.22 | 11.52 |
| | 13.11 | 6.386 | 15.25 | 18.41 |
| | 11.39 | 8.523 | 13.57 | 19.78 |
| Average | 13.10 | 12.90 | 17.80 | 45.22 |
| CAG.F(ab′)₂.HL.F2A | 28.54 | 32.441 | 73.48 | 110.55 |
| (TAU_ITR193) | 23.40 | 20.576 | 52.51 | 103.39 |
| | 36.16 | 37.218 | 69.30 | 127.66 |
| | 34.23 | 29.131 | 37.18 | 66.41 |
| | 27.94 | 33.222 | 57.25 | 73.27 |
| | 44.03 | 34.568 | 50.42 | 106.80 |
| Average | 32.38 | 31.19 | 56.69 | 98.01 |
| SYN.Fab.HL.T2A | 20.06 | 11.107 | 27.75 | 35.30 |
| (TAU_ITR188) | 30.05 | 28.200 | 46.34 | 122.48 |
| | 60.13 | 82.673 | 63.78 | 30.90 |
| | 57.01 | 59.839 | 81.80 | 307.92 |
| | 34.60 | 62.331 | 67.39 | 112.09 |
| | 44.07 | 25.380 | 151.00 | 160.08 |
| Average | 40.99 | 44.92 | 73.01 | 128.13 |
| CAG.Fab.HL.T2A | 38.22 | 110.961 | 42.12 | 35.75 |
| (TAU_ITR180) | 15.13 | 20.688 | 25.32 | 47.77 |
| | 16.55 | 18.755 | 51.72 | 61.31 |
| | 17.98 | 10.043 | 31.93 | 50.11 |
| | 22.51 | 24.999 | 26.60 | 55.10 |
| | 30.71 | 50.367 | 45.16 | 91.20 |
| | 12.00 | 16.332 | 15.08 | 53.24 |
| Average | 21.87 | 36.02 | 33.99 | 56.36 |
| GFAP.F(ab′)₂.HL.F2A | 21.62 | 20.987 | 35.76 | 40.35 |
| (TAU_ITR195) | 27.14 | 108.730 | 66.79 | 113.01 |
| | 39.12 | 66.121 | 168.32 | 176.09 |
| | 22.65 | 48.241 | 34.40 | 45.45 |
| | 42.00 | 77.394 | 47.39 | 82.56 |
| | 19.74 | 46.927 | 63.92 | 81.14 |
| Average | 28.71 | 61.40 | 69.43 | 89.77 |
| SYN.F(ab′)₂.HL.F2A | 21.77 | 61.32 | 47.43 | 78.25 |
| (TAU_ITR194) | 38.78 | 73.78 | 49.62 | 143.28 |
| | 36.45 | 42.48 | 79.82 | 87.14 |
| | 57.30 | 102.33 | 136.96 | 155.97 |
| | 27.85 | 85.72 | 97.86 | 116.69 |
| | 24.01 | 55.63 | 54.33 | 51.00 |
| Average | 34.36 | 70.21 | 77.67 | 105.39 |
| GFAP.Fab.HL.T2A | 50.64 | 56.364 | 63.86 | 127.32 |
| (TAU_ITR189) | 51.51 | 58.083 | 108.95 | 60.53 |
| | 49.01 | 79.911 | 130.12 | 165.26 |
| | 40.72 | 53.395 | 125.42 | 97.73 |
| | 43.82 | 55.946 | 66.42 | 109.34 |
| | 29.67 | 51.120 | 61.83 | 73.39 |
| Average | 44.23 | 59.14 | 92.77 | 105.59 |

[1542] As shown in Table 176, among the constructs with a T2A cleavage site, constructs with GFAP and SYN promoters generally showed higher AAV biodistribution than constructs operably linked to a CAG promoter. For transgenes with F2A peptide cleavage sites, this trend is only observed in hippocampal tissue. Delivery of Fab constructs (TAU_ITR180, TAU_ITR189 and TAU_ITR188) yielded the highest AAV genomes per cell, as compared to F(ab′)2 or scFv constructs comprising the same promoter (e.g., CAG.Fab resulted in more AAV genomes per cell than CAG. F(ab′)2 or CAG.scFv).

[1543] Using One-way ANOVA-Tukey's multiple comparison test, statistical analyses were performed for AAV distribution of each form of fragment (Fab, F(ab′)2, and scFv) driven by each promoter and in each tissue. Assessment of biodistribution in the cortex yielded the following statistically significant relationships. In comparing constructs encoding Fab fragments, administration of TAU_ITR189 (GFAP.Fab) and TAU_ITR188 (SYN.Fab) resulted in significantly more AAV genomes per cell as compared to TAU_ITR180 (CAG.Fab) (p values <0.0005 and <0.005 respectively). For the F(ab′)2 fragment group, a similar pattern was evident, with delivery of TAU_ITR192 (GFAP. F(ab′)₂) generating significantly more AAV genomes per cell in the cortex than delivery of TAU_ITR190 (CAG. F(ab′)2) (p value <0.005). In comparing biodistribution of constructs encoding scFv fragments (TAU_ITR162. TAU_ITR165, and TAU_ITR168; Table 154), delivery of TAU_ITR165 (GFAP.scFv) resulted in greater biodistribution to the cortex than delivery of TAU_ITR162 (CAG.scFv) (p value <0.05). Comparisons across fragment type with expression driven by the same promoter showed significantly greater biodistribution to the cortex and the hippocampus following delivery of TAU_ITR188 (SYN.Fab) than TAU_ITR168 (SYN.scFv) (p value <0.005) and significantly greater biodistribution to cells of the hippocampus subsequent to delivery of TAU_ITR192 (GFAP. F(ab′)₂) than TAU_ITR165 (GFAP.scFv) (p value <0.05).

[1544] Antibody levels in the various tissues were quantified using ePHF ELISA, as described above, but using an anti-Kappa-HRP as a detection antibody The antibody level measurements in the cortex, hippocampus, olfactory bulb, and spinal cord are shown in Table 177 and Table 178. Significance was analyzed using one-way ANOVA-Tukey's multiple comparison test.

TABLE 177
PT3 Fab/F(ab′)₂ expression (ng/mg)

| Construct | | | Olfactory | Spinal |
|---|---|---|---|---|
| (TAU_ITR ID) | Cortex | Hippocampus | Bulb | Cord |
| Vehicle | 0.00 | 1.69 | 0.00 | 0.00 |
| CAG.F(ab′)₂.HL.F2A | 7.30 | 0.00 | 25.66 | 67.08 |
| (TAU_ITR.193) | 12.99 | 7.50 | 26.31 | 76.64 |
| | 15.36 | 10.92 | 43.98 | 65.61 |
| | 8.45 | 6.57 | 37.95 | 42.91 |
| | 22.62 | 11.19 | 36.26 | 95.39 |
| | 20.20 | 14.09 | 66.37 | 85.58 |
| Average | 14.49 | 8.38 | 39.42 | 72.20 |
| SYN.Fab.HL.T2A | 0.51 | −0.22 | 0.00 | 0.00 |
| (TAU_ITR188) | 10.97 | 10.13 | 32.01 | 234.75 |
| | 6.88 | 9.58 | 36.81 | 182.59 |
| | 28.19 | 36.04 | 70.50 | 363.45 |
| | 7.05 | 10.02 | 25.76 | 185.08 |
| | 16.67 | 32.51 | 90.01 | 391.81 |
| Average | 11.71 | 16.34 | 42.51 | 226.28 |
| CAG.Fab.HL.T2A | 213.95 | 152.15 | 246.17 | 400.88 |
| (TAU_ITR180) | 37.26 | 30.67 | 184.38 | 180.63 |
| | 106.69 | 71.19 | 196.59 | 297.40 |
| | 51.67 | 45.98 | 252.33 | 374.69 |
| | 42.30 | 30.46 | 158.28 | 141.95 |
| | 128.16 | 92.23 | 261.18 | 284.72 |
| | 24.33 | 15.50 | 129.56 | 139.25 |
| Average | 86.34 | 62.60 | 204.07 | 259.93 |
| GFAP.F(ab′)₂.HL.F2A | 0.00 | 0.00 | 0.00 | 0.00 |
| (TAU_ITR195) | 0.00 | 0.00 | 18.25 | 9.85 |
| | 3.18 | 0.00 | 22.67 | 11.22 |
| | 0.00 | 0.00 | 13.02 | 12.81 |
| | 3.87 | 0.00 | 47.61 | 29.23 |
| | 0.00 | 0.00 | 14.03 | 9.43 |
| Average | 1.18 | 0.00 | 19.26 | 12.09 |
| SYN.F(ab′)₂.HL.F2A | 0.00 | 0.00 | 0.00 | 45.63 |
| (TAU_ITR194) | 0.00 | 0.00 | 0.00 | 37.95 |
| | 0.00 | 0.00 | 0.00 | 67.24 |
| | 0.00 | 0.00 | 9.28 | 83.39 |
| | 0.00 | 0.00 | 9.78 | 76.17 |
| | 0.00 | 0.00 | — | 62.03 |
| Average | 0.00 | 0.00 | 3.81 | 62.07 |
| GFAP.Fab.HL.T2A | 17.63 | 12.07 | 123.89 | 38.49 |
| (TAU_ITR189) | 42.89 | 14.45 | 221.26 | 58.23 |
| | 29.03 | 22.36 | 262.50 | 112.04 |
| | 14.59 | 12.94 | 119.80 | 74.22 |
| | 27.13 | 10.66 | 154.62 | 90.98 |
| | 48.47 | 15.16 | 234.40 | 108.85 |
| Average | 29.96 | 14.61 | 186.08 | 80.47 |
| GFAP.F(ab′)₂.HL.T2A | 3.87 | 0.00 | 48.19 | 57.72 |
| (TAU_ITR192) | 0.00 | 0.00 | 28.06 | 22.84 |
| | 6.17 | 0.00 | 43.30 | 38.07 |
| | 0.00 | 0.00 | 0.00 | 7.36 |
| | 5.28 | 0.00 | 0.00 | 46.19 |
| | 4.27 | 0.00 | 24.68 | 52.93 |
| Average | 3.27 | 0.00 | 24.04 | 37.52 |
| SYN.F(ab′)₂.HL.T2A | 2.70 | 0.00 | 9.40 | 128.50 |
| (TAU_ITR191) | 0.00 | 0.00 | 11.47 | 87.30 |
| | 3.10 | 0.00 | 14.70 | 124.64 |
| | 3.29 | 0.00 | 12.12 | 229.45 |
| | 3.55 | 0.00 | 16.95 | 157.90 |
| | 2.97 | 0.00 | 11.61 | 185.24 |
| Average | 2.60 | 0.00 | 12.71 | 152.17 |
| CAG.F(ab′)₂.HL.T2A | 2.66 | 0.00 | 13.09 | 53.44 |
| (TAU_ITR190) | 3.41 | 6.28 | 12.53 | 61.70 |
| | 3.74 | 0.00 | 8.86 | 73.11 |
| | 2.61 | 0.00 | 10.77 | 48.82 |
| | 3.67 | 0.00 | 22.19 | 92.71 |
| | 3.81 | 0.00 | 13.06 | 139.20 |
| Average | 3.32 | 1.05 | 13.42 | 78.16 |

[1545] As shown in Table 177, high levels of PT3 Fab were observed in the hippocampus, cortex and olfactory bulb of the mice dosed with Fab constructs as compared to mice dosed with F(ab′)₂ constructs. In contrast to the vector genome quantification data, use of a CAG promoter appeared to drive higher expression when compared to constructs comprising a cell specific promoter. High levels of PT3 Fab were also observed in the olfactory bulb of the mice dosed with Fab constructs as compared to those dosed with F(ab′)2 vectors. PT3 expression (ng/mg) was significantly higher (p value <0.0005) in the cortex of rodents transduced with CAG.Fab.HL.T2A (TAU_ITR180) when compared to the expression in the cortex of rodents transduced with SYN.Fab.HL.T2A (TAU_ITR188) or ssAAV CAG PT3 VL G4S-3 VH HA rBGpA (TAU_ITR162). PT3 expression (ng/mg) was significantly higher (p value <0.005) in the cortex of rodents transduced with CAG.Fab.HL.T2A (TAU_ITR180) when compared to the expression in the cortex of rodents transduced with GFAP.Fab.HL.T2A (TAU_ITR189) or CAG.F(ab′)2.HL.T2A (TAU_ITR190). In the hippocampus, PT3 expression (ng/mg) was significantly higher, p value <0.0005, in the rodents transduced with CAG.Fab.HL.T2A (TAU_ITR180) compared to SYN.Fab.HL.T2A (TAU_ITR188). GFAP.Fab.HL.T2A (TAU_ITR189), or ssAAV CAG PT3 VL G4S-3 VH HA rBGpA (TAU_ITR162). PT3 expression (ng/mg) was also significantly higher (p value <0.005) in the hippocampus of rodents transduced with CAG.Fab.HL.T2A (TAU_ITR180) compared to rodents transduced with CAG.F(ab′)2.HL.T2A (TAU_ITR190).

[1546] In spinal cord, PT3 expression levels were similar when driven by CAG or SYN promoter, regardless of whether the PT3 fragment was Fab or F(ab′)₂.

TABLE 178
Normalized PT3 Fab/F (ab′)2 expression (PT3/vector genome)

| Construct | | | Olfactory | Spinal |
|---|---|---|---|---|
| (TAU_ITR ID) | Cortex | Hippocampus | Bulb | cord |
| Vehicle | 0 | 0 | 0 | 0 |
| CAG.F(ab′)₂.HL.F2A | 0.26 | 0.00 | 0.35 | 0.61 |
| (TAU_ITR193) | 0.56 | 0.36 | 0.50 | 0.74 |
| | 0.42 | 0.29 | 0.63 | 0.51 |
| | 0.25 | 0.23 | 1.02 | 0.65 |
| | 0.81 | 0.34 | 0.63 | 1.30 |
| | 0.46 | 0.41 | 1.32 | 0.80 |
| Average | 0.46 | 0.27 | 0.74 | 0.77 |
| SYN.Fab.HL.T2A | 0.03 | 0.00 | 0.00 | 0.00 |
| (TAU_ITR188) | 0.37 | 0.36 | 0.69 | 1.92 |
| | 0.11 | 0.12 | 0.58 | 5.91 |
| | 0.49 | 0.60 | 0.86 | 1.18 |
| | 0.20 | 0.16 | 0.38 | 1.65 |
| | 0.38 | 1.28 | 0.60 | 2.45 |
| Average | 0.26 | 0.42 | 0.52 | 2.18 |
| CAG.Fab.HL.T2A | 5.60 | 1.37 | 5.84 | 11.21 |
| (TAU_ITR180) | 2.46 | 1.48 | 7.28 | 3.78 |
| | 6.45 | 3.80 | 3.80 | 4.85 |
| | 2.87 | 4.58 | 7.90 | 7.48 |
| | 1.88 | 1.22 | 5.95 | 2.58 |
| | 4.17 | 1.83 | 5.78 | 3.12 |
| | 20.3 | 0.95 | 8.59 | 2.62 |
| Average | 3.64 | 2.18 | 6.45 | 5.09 |
| GFAP.F(ab′)₂.HL.F2A | 0.00 | 0 | 0.00 | 0.00 |
| (TAU_ITR195) | 0.00 | 0 | 0.27 | 0.09 |
| | 0.08 | 0 | 0.13 | 0.06 |
| | 0.00 | 0 | 0.38 | 0.28 |
| | 0.09 | 0 | 1.00 | 0.35 |
| | 0.00 | 0 | 0.22 | 0.12 |
| Average | 0.03 | 0.00 | 0.34 | 0.15 |
| | 0.00 | 0 | 0.00 | 0.58 |
| | 0.00 | 0 | 0.00 | 0.26 |
| SYN.F(ab′)₂.HL.F2A | 0.00 | 0 | 0.00 | 0.77 |
| (TAU_ITR194) | 0.00 | 0 | 0.07 | 0.53 |
| | 0.00 | 0 | 0.10 | 0.65 |
| | 0.00 | 0 | 0.00 | 1.22 |
| Average | 0.00 | 0.00 | 0.03 | 0.67 |
| GFAP.Fab.HL.T2A | 0.35 | 0.21 | 1.94 | 0.30 |
| (TAU_ITR189) | 0.83 | 0.25 | 2.03 | 0.96 |
| | 0.59 | 0.28 | 2.02 | 0.68 |
| | 0.36 | 0.24 | 0.96 | 0.76 |
| | 0.62 | 0.19 | 2.33 | 0.83 |
| | 1.63 | 0.30 | 3.79 | 1.48 |
| Average | 0.73 | 0.25 | 2.18 | 0.84 |
| GFAP.F(ab′)₂.HL.T2A | 0.06 | 0 | 0.51 | 0.33 |
| (TAU_ITR192) | 0.00 | 0 | 0.48 | 0.25 |
| | 0.17 | 0 | 1.04 | 0.49 |
| | 0.00 | 0 | 0.00 | 0.24 |
| | 0.15 | 0 | 0.00 | 0.35 |
| | 0.12 | 0 | 0.43 | 0.69 |
| Average | 0.08 | 0.00 | 0.41 | 0.39 |
| SYN.F(ab′)₂.HL.T2A | 0.10 | 0 | 0.28 | 2.07 |
| (TAU_ITR191) | 0.00 | 0 | 0.16 | 2.45 |
| | 0.09 | 0 | 0.32 | 1.09 |
| | 0.10 | 0 | 0.17 | 1.86 |
| | 0.10 | 0 | 0.33 | 1.62 |
| | 0.07 | 0 | 0.20 | 2.74 |
| Average | 0.08 | 0.00 | 0.24 | 1.97 |
| CAG.F(ab′)₂.HL.T2A | 0.15 | 0.00 | 0.79 | 0.61 |
| (TAU_ITR190) | 0.22 | 0.44 | 0.82 | 0.75 |
| | 0.40 | 0.00 | 0.29 | 1.39 |
| | 0.22 | 0.00 | 0.71 | 4.24 |
| | 0.28 | 0.00 | 1.45 | 5.03 |
| | 0.33 | 0.00 | 0.96 | 7.04 |
| Average | 0.27 | 0.07 | 0.84 | 3.18 |

[1547] As shown in Table 178, inclusion of the CAG promoter resulted in higher PT3 expression in TAU_ITR180 (CAG PT3_Fab H.F.T2A.L), TAU_ITR190 (CAG PT3_F(ab′)2 H.hIgG3_3Hinge.F.T2A.L), TAU_ITR193 (CAG PT3_F(ab′)2 H.hIgG3_3Hinge.F.F2A.L) regardless of whether Fab or F(ab′)₂ antibody fragments were delivered to the cortex, hippocampus and olfactory bulb. In the spinal cord, CAG promoter appeared to drive PT3 expression in TAU_ITR180 (CAG PT3_Fab H.F.T2A.L), TAU_ITR190 (CAG PT3_F(ab′)2 H.hIgG3_3Hinge.F.T2A.L), TAU_ITR193 (CAG PT3_F(ab′)2 H.hIgG3_3Hinge.F.F2A.L) at levels similar to that seen with the SYN promoter constructs TAU_ITR188 (SYN.PT3_Fab H.F.T2A.L), TAU_ITR191 (SYN.PT3_F(ab′)2 H.hIgG3_3Hinge.F.T2A.L), TAU_ITR194 (SYN PT3_F(ab′)2 H.hIgG3_3Hinge.F.F2A.L). Comparing Fab and F(ab′)2 constructs operably linked to the same promoter, it was noted that PT3 Fab constructs (TAU_ITR180, TAU_ITR188, TAU_ITR189) resulted in higher expression per vector genome as compared to PT3 F(ab′)2 constructs (TAU_ITR190, TAU_ITR191, TAU_ITR192, TAU_ITR193, TAU_ITR194, TAU_ITR195).

[1548] Normalization of antibody fragments level showed a highest average level of expression per vector genome in the group dosed with CAG-Fab (TAU_ITR180). The statistical significance of the data in Table 178 was analyzed using one-way ANOVA-Tukey's multiple comparison test. Normalized PT3 expression (ab/vg) was significantly higher (p<0.0005) in the cortex of the former of the following pairs of comparison compared to the latter, (a) CAG PT3_Fab H.F.T2A.L (TAU_ITR180) compared to CAG PT3_F(ab′)2 H.hIgG3_3Hinge.F.T2A.L (TAU_ITR190), GFAP.PT3_Fab H.F.T2A. L (TAU_ITR189), or SYN.PT3_Fab H.F.T2A.L (TAU_ITR188) (b) ssAAV CAG PT3 VL G4S-3 VH HA rBGpA (TAU_ITR162) compared to ssAAV SYN PT3 VL G4S-3 VH HA rBGpA (TAU_ITR168) or ssAAV GFAP PT3 VL G4S-3 VH HA rBGpA (TAU_ITR165) or CAG PT3_F(ab′)2 H.hIgG3_3Hinge.F.T2A.L (TAU_ITR190). In the hippocampus, normalized PT3 expression (ab/vg) was significantly higher (p value <0.0005) in CAG PT3_Fab H.F.T2A.L (TAU_ITR180) compared to CAG PT3_F(ab′)2 H.F.T2A.L (TAU_ITR190), ssAAV CAG PT3 VL G4S-3 VH HA rBGpA (TAU_ITR162), SYN.PT3_Fab H.F.T2A.L (TAU_ITR188), or GFAP.PT3_Fab H.F.T2A.L (TAU_ITR189).

[1549] Antibody levels in the CSF, serum and liver tissues were also quantified using ePHF ELISA, as described above and as shown in Table 179. Also included in the table are vector genome quantification of the biodistribution to the liver (VG/DC).

TABLE 179
PT3 expression in CSF serum and liver

| | CSF | CSF | Serum | Serum | Liver | Liver |
|---|---|---|---|---|---|---|
| Description | (ng/ml) | (nM) | (ng/ml) | (nM) | CVG/DC) | (ng/mg) |
| CAG.F(ab′)₂.HL.F2A | 95.4 | 0.87 | 306.50 | 2.79 | 3.07 | 21.30 |
| (TAU_ITR193) | 101.55 | 0.92 | 6248.75 | 56.81 | 3.93 | 20.32 |
| | 70.25 | 0.64 | 5193.75 | 47.22 | 4.75 | 36.75 |
| | 46.45 | 0.42 | 5420.75 | 49.28 | 3.11 | 25.63 |
| | 97.15 | 0.88 | 12421.50 | 112.92 | 5.80 | 34.15 |
| | — | — | 11130.25 | 101.18 | 7.30 | 67.69 |
| | — | — | 13131.00 | 119.37 | — | — |
| Average | 82.16 | 0.75 | 7693.21 | 69.94 | 4.66 | 34.32 |
| SYN.PT3_Fab H.F.T2A.L | 340.65 | 6.19 | 3479.73 | 63.27 | 0.30 | 0.00 |
| (TAU_ITR188) | 678.10 | 12.33 | 800.91 | 14.56 | 10.50 | 0.00 |
| | 663.75 | 12.07 | 871.53 | 15.85 | 6.98 | 0.00 |
| | — | — | 743.96 | 13.53 | 3.48 | 0.00 |
| | — | — | 2094.76 | 38.09 | 4.09 | 0.00 |
| | — | — | 447.84 | 8.14 | 4.78 | 0.00 |
| Average | 560.83 | 10.20 | 1406.45 | 25.57 | 5.02 | 0.00 |
| CAG PT3_Fab H.F.T2A.L | 1077.65 | 19.59 | 2701.37 | 49.12 | 5.67 | 17.07 |
| (TAU_ITR180) | 703.40 | 12.79 | 7146.70 | 129.94 | 1.65 | 8.21 |
| | 894.50 | 16.26 | 4679.73 | 85.09 | 4.56 | 18.86 |
| | 903.90 | 16.43 | 2199.09 | 39.98 | 3.74 | 59.20 |
| | 833.20 | 15.15 | 2513.21 | 45.69 | 6.34 | 0.00 |
| | 1026.80 | 18.67 | 2270.84 | 41.29 | 4.48 | 51.66 |
| | — | — | — | — | 2.58 | 11.89 |
| Average | 906.58 | 16.48 | 3585.16 | 65.18 | 4.15 | 23.84 |
| GFAP.F(ab′)₂.HL.F2A | 0.00 | 0.00 | 274.00 | 2.49 | 0.63 | 0.00 |
| (TAU_ITR195) | 0.00 | 0.00 | 808.25 | 7.35 | 4.96 | 7.12 |
| | 0.00 | 0.00 | 3426.00 | 31.15 | 9.12 | 19.29 |
| | 0.00 | 0.00 | 414.75 | 3.77 | 2.58 | 3.39 |
| | 0.00 | 0.00 | 2556.00 | 23.24 | 7.52 | 15.07 |
| | — | — | 1057.75 | 9.62 | 4.00 | 10.46 |
| Average | 0.00 | 0.00 | 1422.79 | 12.93 | 4.80 | 9.22 |
| SYN.F(ab′)₂.HL.F2A | 66.60 | 0.61 | 195.00 | 1 77 | 4.54 | 0.00 |
| (TAU_ITR194) | — | — | 306.50 | 2.79 | 4.55 | 0.00 |
| | — | — | 243.50 | 2.21 | 4.05 | 0.00 |
| | 104.05 | 0.95 | 448.75 | 4.08 | 9.29 | 0.00 |
| | 106.40 | 0.97 | 364.75 | 3.32 | 7.72 | 0.00 |
| | 84.95 | 0.77 | 267.50 | 2.43 | 4.39 | 0.00 |
| Average | 90.50 | 0.82 | 304.33 | 2.77 | 5.76 | 0.00 |
| GFAP.PT3_Fab | 484.75 | 8.81 | 1300.38 | 23.64 | 7.36 | 11.21 |
| H.F.T2A.L (TAU_ITR189) | 234.65 | 4.27 | 3106.15 | 56.48 | 4.82 | 13.02 |
| | 654.35 | 11.90 | 1185.88 | 21.56 | 6.27 | 12.32 |
| | 443.60 | 8.07 | 5381.78 | 97.85 | 4.44 | 7.05 |
| | 956.35 | 17.39 | 3069.70 | 55.81 | 3.89 | 4.47 |
| | — | — | 1196.36 | 21.75 | 7.41 | 5.66 |
| Average | 554.74 | 10.09 | 2540.04 | 46.18 | 5.70 | 8.96 |
| GFAP.PT3_F(ab′)2 | 59.05 | 0.54 | 830.50 | 7.55 | 7.14 | 14.42 |
| H.hIgG3_3Hinge.F.T2A.L | 51.10 | 0.46 | 967.75 | 8.80 | 10.11 | 61.18 |
| (TAU_ITR192) | 68.10 | 0.62 | 704.75 | 6.41 | 8.79 | 12.44 |
| | 41.80 | 0.38 | 65.75 | 0.60 | 0.56 | 2.66 |
| | 90.45 | 0.82 | 1085.25 | 9.87 | 4.68 | 13.27 |
| | 52.50 | 0.48 | 704.75 | 6.41 | 5.01 | 35.44 |
| Average | 60.50 | 0.55 | 726.46 | 6.60 | 6.05 | 23.24 |
| SYN.PT3_F(ab′)2 | 33.90 | 0.31 | 310.25 | 2.82 | 4.31 | 0.00 |
| H.hIgG3_3Hinge.F.T2A.L | 120.95 | 1.10 | 311.75 | 2.83 | 3.08 | 0.00 |
| (TAU_ITR191) | 83.05 | 0.76 | 323.50 | 2.94 | 5.33 | 0.00 |
| | 113.65 | 1.03 | 164.00 | 1.49 | 4.54 | 0.00 |
| | 34.80 | 0.32 | 316.65 | 2.88 | 8.14 | 0.00 |
| | 102.25 | 0.93 | 296.25 | 2.69 | 6.80 | 0.00 |
| Average | 81.43 | 0.74 | 287.07 | 2.61 | 5.37 | 0.00 |
| | 45.30 | 0.41 | 2599.75 | 23.63 | 5.75 | 21.25 |
| CAGPT3_F(ab′)2 | 60.15 | 0.55 | 2990.75 | 27.19 | 7.73 | 81.32 |
| H.hIgG3_3Hinge.F.T2A.L | 64.75 | 0.59 | 2693.75 | 24.49 | 4.33 | 28.72 |
| (TAU_ITR190) | 54.70 | 0.50 | 2119.50 | 19.27 | 2.40 | 15.47 |
| | 53.80 | 0.49 | 1746.50 | 15.88 | 6.07 | 18.05 |
| | 74.05 | 0.67 | 3126.50 | 28.42 | 3.97 | 22.46 |
| Average | 58.79 | 0.53 | 2546.13 | 23.15 | 5.04 | 31.21 |
| Vehicle | 0.00 | 0.00 | 0.00 | 0.00 | 0.00 | 0.00 |

[1550] Consistent with the measurements in Table 177 and Table 178, higher PT3 expression levels were observed with Fab constructs (TAU_ITR180, TAU_ITR188, TAU_ITR189) compared to F(ab′)₂ constructs (TAU_ITR190, TAU_ITR191, TAU_ITR192, TAU_ITR193, TAU_ITR194, TAU_ITR195) and lowest with delivery of F(ab′)2 constructs. Among the Fab constructs, CSF PT3 fragment expression levels were the same regardless of the promoter used. In the group of mice dosed with the F(ab′)₂ T2A vectors (TAU_ITR190, TAU_ITR191, TAU_ITR192), no significant difference in the expression of PT3 was detected among the different promoters. In the serum, as expected, the CAG promoter appeared to drive the highest expression of PT3 in constructs (TAU_ITR180 (CAG PT3_Fab H.F.T2A.L), TAU_ITR190 (CAG PT3_F(ab′)2 H.hIgG3_3Hinge.F.T2A.L), TAU_ITR193 (CAG PT3_F(ab′)2 H.hIgG3_3Hinge.F.F2A.L)), whereas the SYN promoter had the least expression in constructs (TAU_ITR188 (SYN.PT3_Fab H.F.T2A.L), TAU_ITR191 (SYN.PT3_F(ab′)2 H.hIgG3_3Hinge.F.T2A.L), TAU_ITR194 (SYN PT3_F(ab′)2 H.hIgG3_3Hinge.F.F2A.L)). In the liver, all the constructs resulted in similar AAV biodistribution albeit at levels lower than seen in the CNS tissues. PT3 antibody expression was observed in mice transduced with CAG promoter constructs (TAU_ITR180 (CAG PT3_Fab H.F.T2A.L), TAU_ITR190 (CAG PT3_F(ab′)2 H.hIgG3_3Hinge.F.T2A.L),TAU_ITR193 (CAG PT3_F(ab′)2 H.hIgG3_3Hinge.F.F2A.L)) and to a lesser extent the GFAP promoter constructs (TAU_ITR189 (GFAP.PT3_Fab H.F.T2A.L), TAU_ITR192 (GFAP.PT3_F(ab′)2 H.hIgG3_3Hinge.F.T2A.L), TAU_ITR195 (GFAP PT3_F(ab′)2 H.hIgG3_3Hinge.F.F2A.L)). No PT3 expression was evident in the liver when driven by the synapsin promoter (TAU_ITR188 (SYN.Fab), TAU_ITR191 (SYN. F(ab′)2), TAU_ITR168 (SYN.scFv)).

[1551] The statistical significance of the data in Table 179 was analyzed using one-way ANOVA-Tukey's multiple comparison test. PT3 expression (for both ng/ml and nM) was significantly higher (p<0.0005) in the CSF of the former of the following pairs when compared to the latter, (a) CAG PT3_Fab H.F.T2A.L (TAU_ITR180) compared to CAG PT3_F(ab′)2 H.hIgG3_3Hinge.F.T2A.L (TAU_ITR190), ssAAV CAG PT3 VL G4S-3 VH HA rBGpA (TAU_ITR162), GFAP.PT3_Fab H.F.T2A.L (TAU_ITR189) or SYN.PT3_Fab H.F.T2A.L (TAU_ITR188) (b) GFAP.PT3_Fab H.F.T2A.L (TAU_ITR189) compared to GFAP.PT3_F(ab′)2 H.hIgG3_3Hinge.F.T2A.L (TAU_ITR192) or ssAAV GFAP PT3 VL G4S-3 VH HA rBGpA (TAU_ITR165); (c) SYN.PT3_Fab H.F.T2A.L (TAU_ITR188) compared to SYN.PT3_F(ab′)2 H.hIgG3_3Hinge.F.T2A.L (TAU_ITR191), or ssAAV SYN PT3 VL G4S-3 VH HA rBGpA (TAU_ITR168). PT3 expression (nM) was also significantly higher (p<0.005 and <0.05 respectively) in the CSF of the former of the following pairs (a) CAG PT3_F(ab′)2 H.hIgG3_3Hinge.F.T2A.L (TAU_ITR190), compared to ssAAV CAG PT3 VL G4S-3 VH HA rBGpA (TAU_ITR162) (b) ssAAV CAG PT3 VL G4S-3 VH HA rBGpA (TAU_ITR162) compared to ssAAV SYN PT3 VL G4S-3 VH HA rBGpA (TAU_ITR168).

[1552] In the serum, PT3 expression (ng/ml) was significantly higher with a value of P<0.0005 in the serum of rodents transduced with CAG PT3_Fab H.F.T2A.L (TAU_ITR180) compared to ssAAV CAG PT3 VL G4S-3 VH HA rBGpA (TAU_ITR162). Higher PT3 expression (ng/ml) with a significance of p value <0.005 was observed in the PT3 in the serum of rodents treated with the former constructs in the following pairs compared to the latter constructs (a) CAG PT3_Fab H.F.T2A.L (TAU_ITR180) compared to CAG PT3_F(ab′)2 H.hIgG3_3Hinge.F.T2A.L (TAU_ITR190) (b) CAG PT3_F(ab′)2 H.hIgG3_3Hinge.F.T2A.L (TAU_ITR190) compared to SYN.PT3_F(ab′)2 H.hIgG3_3Hinge.F.T2A.L (TAU_ITR191) (c) ssAAV CAG PT3 VL G4S-3 VH HA rBGpA (TAU_ITR162) compared to ssAAV SYN PT3 VL G4S-3 VH HA rBGpA (TAU_ITR168) (d) GFAP.PT3_Fab H.F.T2A.L (TAU_ITR189) compared to ssAAV GFAP PT3 VL G4S-3 VH HA rBGpA (TAU_ITR165). Higher PT3 expression (ng/ml) (p value <0.05) was observed in the PT3 in the serum of rodents transduced with the former constructs in the following pairs compared to the latter constructs (a) CAG PT3_F(ab′)2 H.hIgG3_3Hinge.F.T2A.L (TAU_ITR190) compared to GFAP.PT3_F(ab′)2 H.hIgG3_3Hinge.F.T2A.L (TAU_ITR192) and (b) GFAP.PT3_Fab H.F.T2A.L (TAU_ITR189) compared to GFAP.PT3_F(ab′)2 H.hIgG3_3Hinge.F.T2A.L (TAU_ITR192). In comparing the PT3 expression (nM), the expression was significantly higher (p<0.0005) in CAG PT3_Fab H.F.T2A.L (TAU_ITR180) compared to ssAAV CAG PT3 VL G4S-3 VH HA rBGpA (TAU_ITR162) or SYN.PT3_Fab H.F.T2A.L (TAU_ITR188). A significance of p value <0.005 was obtained when the PT3 expression (nM) in the serum was compared between the former of the following pairs compared to the latter (a) CAG PT3_Fab H.F.T2A.L (TAU_ITR180) compared to CAG PT3_F(ab′)2 H.hIgG3_3Hinge.F.T2A.L (TAU_ITR190); (b) ssAAV CAG PT3 VL G4S-3 VH HA rBGpA (TAU_ITR162) compared to ssAAV SYN PT3 VL G4S-3 VH HA rBGpA (TAU_ITR168) (c) GFAP.PT3_Fab H.F.T2A.L (TAU_ITR189) compared to GFAP.PT3_F(ab′)2 H.hIgG3_3Hinge.F.T2A.L (TAU_ITR192) (d) GFAP.PT3_F(ab′)2 H.hIgG3_3Hinge.F.T2A.L (TAU_ITR192) compared to ssAAV GFAP PT3 VL G4S-3 VH HA rBGpA (TAU_ITR165). In general, antibody levels were highest following delivery of constructs encoding Fab fragments, followed by F(ab′)2. Expression driven by the CAG promoter resulted in the highest expression of antibody fragment in the serum, as compared to when driven by cell-specific promoters.

[1553] Immunohistochemistry (using DAB and an anti-kappa light chain primary antibody) was performed on brain tissue of mice treated with an IV bolus injection of VOY101.PT3 AAV particles comprising viral genomes encoding (Fab′)₂ or Fab, driven by CAG, SYN or GFAP promoters 28 days prior.

[1554] Comparing the PT3 Fab fragment-based constructs namely GFAP.Fab.HL.T2A (TAU_ITR189), SYN.Fab.HL.T2A (TAU_ITR188), CAG.Fab.HL.T2A (TAU_ITR180), a broad distribution of PT3 Fab fragment was observed in mice dosed with PT3 Fab vectors under CAG or cell specific promoters. Broad distribution of PT3 Fab fragment was observed from anterior to posterior coronal sections of the brain (e.g., hippocampus) of mice dosed with CAG or cell specific promoter.

[1555] PT3 F(ab′)2 T2A fragment-based constructs, namely GFAP.F(ab′)2.HL.T2A (TAU_ITR192), SYN.F(ab′)2.HL.T2A (TAU_ITR191), and CAG.F(ab′)2.HL.T2A (TAU_ITR190), also showed a broad distribution of PT3 F(ab′)2 fragment.

[1556] Strong staining was observed in multiple CNS regions in all groups dosed with vectorized Fab, but overall, CAG PT3 Fab or PT3 F(ab′)2 (F2A vectors) showed stronger signal in the brain when compared to the other constructs in Table 175 with cell specific promoters. Vehicle treated control animals showed low background levels of staining.

[1557] Taken together, these data show that constructs operably linked to the CAG promoter namely TAU_ITR180 (CAG PT3_Fab H.F.T2A.L), TAU_ITR190 (CAG PT3_F(ab′)2 H.hIgG3_3Hinge.F.T2A.L),TAU_ITR193 (CAG PT3_F(ab′)2 H.hIgG3_3Hinge.F.F2A.L) showed stronger signal in the brain when compared to those wherein expression is driven by cell specific promoters namely constructs TAU_ITR188 (SYN.PT3_Fab H.F.T2A.L).TAU_ITR191 (SYN.PT3_F(ab′)2 H.hIgG3_3Hinge.F.T2A.L), TAU_ITR194 (SYN PT3_F(ab′)2 H.hIgG3_3Hinge.F.F2A.L), TAU_ITR189 (GFAP.PT3_Fab H.F.T2A.L), TAU_ITR192 (GFAP.PT3_F(ab′)2 H.hIgG3_3Hinge.F.T2A.L), TAU_ITR195 (GFAP PT3_F(ab′)2 H.hIgG3_3Hinge.F.F2A.L).

[1558] The cell-specificity of the expression of the constructs described in Table 175 was also evaluated. Among the PT3 Fab constructs GFAP.Fab.HL.T2A (TAU_ITR189). SYN.Fab.HL.T2A (TAU_ITR188), and CAG.Fab.HL.T2A (TAU_ITR180) PT3 expression was detected in cells with neuronal and glial cell morphology in the hippocampus, cortex, thalamus and the spinal cord when a CAG promoter was used. PT3 Fab expression was most evident in cells with astrocytic morphology in cortex. PT3 Fab fragment expression was also detected in cells with neuronal or glial cell morphology in indicated brain regions when Syn or GFAP promoters were used, respectively. For viral genomes comprising a CAG promoter, PT3 Fab fragment expression was most evident in cells with astrocytic morphology in cortex. Further, PT3 Fab T2A constructs GFAP.Fab.HL.T2A (TAU_ITR189), SYN.Fab.HL.T2A (TAU_ITR188), and CAG.Fab.HL.T2A (TAU_ITR180) appeared to have higher expression when compared to other F(ab′)2 constructs (GFAP.F(ab′)2.HL.T2A (TAU_ITR192), SYN.F(ab′)2.HL.T2A (TAU_ITR191) and CAG.F(ab′)2.HL.T2A (TAU_ITR190).

[1559] When all data on delivery of viral genomes expressing antibody fragments are considered in aggregate, Fab.HL.T2A format appears to result in the highest expression of antibody fragment in target tissue.

[1560] Further, in comparing expression of anti-tau antibody fragments after IV delivery of VOY101 particles, brain levels were substantially higher than the level of expression seen after IV delivery of full length antibody.

[1561] In conclusion, these data showed that intravenous delivery of AAV particles (e.g., Voy101) encoding anti-tau antibodies or antibody fragments resulted in widespread vector genome biodistribution and therapeutically relevant antibody levels in mouse CNS tissues.

### VII. Equivalents and Scope

[1562] Those skilled in the art will recognize, or be able to ascertain using no more than routine experimentation, many equivalents to the specific embodiments in accordance with the disclosure described herein. The scope of the present disclosure is not intended to be limited to the above Description, but rather is as set forth in the appended claims.

[1563] In the claims, articles such as “a,” “an,” and “the” may mean one or more than one unless indicated to the contrary or otherwise evident from the context. Claims or descriptions that include “or” between one or more members of a group are considered satisfied if one, more than one, or all of the group members are present in, employed in, or otherwise relevant to a given product or process unless indicated to the contrary or otherwise evident from the context. The disclosure includes embodiments in which exactly one member of the group is present in, employed in, or otherwise relevant to a given product or process. The disclosure includes embodiments in which more than one, or the entire group members are present in, employed in, or otherwise relevant to a given product or process.

[1564] It is also noted that the term “comprising” is intended to be open and permits but does not require the inclusion of additional elements or steps. When the term “comprising” is used herein, the term “consisting of” is thus also encompassed and disclosed.

[1565] Where ranges are given, endpoints are included. Furthermore, it is to be understood that unless otherwise indicated or otherwise evident from the context and understanding of one of ordinary skill in the art, values that are expressed as ranges can assume any specific value or subrange within the stated ranges in different embodiments, to the tenth of the unit of the lower limit of the range, unless the context clearly dictates otherwise.

[1566] In addition, it is to be understood that any particular embodiment of the present disclosure that falls within the prior art may be explicitly excluded from any one or more of the claims. Since such embodiments are deemed to be known to one of ordinary skill in the art, they may be excluded even if the exclusion is not set forth explicitly herein. Any particular embodiment of the compositions (e.g., any antibiotic, therapeutic or active ingredient; any method of production; any method of use; etc.) can be excluded from any one or more claims, for any reason, whether or not related to the existence of prior art.

[1567] It is to be understood that the words which have been used are words of description rather than limitation, and that changes may be made within the purview of the appended claims without departing from the true scope and spirit in its broader aspects.

[1568] While the present disclosure has been described at some length and with some particularity with respect to the several described embodiments, it is not intended that it should be limited to any such particulars or embodiments or any particular embodiment, but it is to be construed with reference to the appended claims so as to provide the broadest possible interpretation of such claims in view of the prior art and, therefore, to effectively encompass the intended scope.

The application's sequence listing, which the Patent Office published only in electronic form, follows.

SEQUENCE LISTING (4546 sequences)

SEQ ID NO: 1 - protein, 743 aa, Artificial Sequence
  source: /note="Description of Artificial Sequence: Synthetic polypeptide"
MAADGYLPDWLEDNLSEGIREWWALKPGAPQPKANQQHQDNARGLVLPGYKYLGPGNGLDKGEPVNAADAAALEHDKAYDQQLKAGDNPYLKYNHADAEFQERLKEDTSFGGNLGRAVFQAKKRLLEPLGLVEEAAKTAPGKKRPVEQSPQEPDSSAGIGKSGAQPAKKRLNFGQTGDTESVPDPQPIGEPPAAPSGVGSLTMASGGGAPVADNNEGADGVGSSSGNWHCDSQWLGDRVITTSTRTWALPTYNNHLYKQISNSTSGGSSNDNAYFGYSTPWGYFDFNRFHCHFSPRDWQRLINNNWGFRPKRLNFKLFNIQVKEVTDNNGVKTIANNLTSTVQVFTDSDYQLPYVLGSAHEGCLPPFPADVFMIPQYGYLTLNDGSQAVGRSSFYCLEYFPSQMLRTGNNFQFSYEFENVPFHSSYAHSQSLDRLMNPLIDQYLYYLSKTINGSGQNQQTLKFSVAGPSNMAVQGRNYIPGPSYRQQRVSTTVTQNNNSEFAWPGASSWALNGRNSLMNPGPAMASHKEGEDRFFPLSGSLIFGKQGTGRDNVDADKVMITNEEEIKTTNPVATESYGQVATNHQSDGTLAVPFKAQAQTGWVQNQGILPGMVWQDRDVYLQGPIWAKIPHTDGNFHPSPLMGGFGMKHPPPQILIKNTPVPADPPTAFNKDKLNSFITQYSTGQVSVEIEWELQKENSKRWNPEIQYTSNYYKSNNVEFAVNTEGVYSEPRPIGTRYLTRNL

SEQ ID NO: 2 - DNA, 2232 bp, Artificial Sequence
  source: /note="Description of Artificial Sequence: Synthetic polynucleotide"
atggctgccgatggttatcttccagattggctcgaggacaaccttagtgaaggaattcgcgagtggtgggctttgaaacctggagcccctcaacccaaggcaaatcaacaacatcaagacaacgctcgaggtcttgtgcttccgggttacaaataccttggacccggcaacggactcgacaagggggagccggtcaacgcagcagacgcggcggccctcgagcacgacaaggcctacgaccagcagctcaaggccggagacaacccgtacctcaagtacaaccacgccgacgccgagttccaggagcggctcaaagaagatacgtcttttgggggcaacctcgggcgagcagtcttccaggccaaaaagaggcttcttgaacctcttggtctggttgaggaagcggctaagacggctcctggaaagaagaggcctgtagagcagtctcctcaggaaccggactcctccgcgggtattggcaaatcgggtgcacagcccgctaaaaagagactcaatttcggtcagactggcgacacagagtcagtcccagaccctcaaccaatcggagaacctcccgcagccccctcaggtgtgggatctcttacaatggcttcaggtggtggcgcaccagtggcagacaataacgaaggtgccgatggagtgggtagttcctcgggaaattggcattgcgattcccaatggctgggggacagagtcatcaccaccagcacccgaacctgggccctgcccacctacaacaatcacctctacaagcaaatctccaacagcacatctggaggatcttcaaatgacaacgcctacttcggctacagcaccccctgggggtattttgacttcaacagattccactgccacttctcaccacgtgactggcagcgactcatcaacaacaactggggattccggcctaagcgactcaacttcaagctcttcaacattcaggtcaaagaggttacggacaacaatggagtcaagaccatcgccaataaccttaccagcacggtccaggtcttcacggactcagactatcagctcccgtacgtgctcgggtcggctcacgagggctgcctcccgccgttcccagcggacgttttcatgattcctcagtacgggtatctgacgcttaatgatggaagccaggccgtgggtcgttcgtccttttactgcctggaatatttcccgtcgcaaatgctaagaacgggtaacaacttccagttcagctacgagtttgagaacgtacctttccatagcagctacgctcacagccaaagcctggaccgactaatgaatccactcatcgaccaatacttgtactatctctcaaagactattaacggttctggacagaatcaacaaacgctaaaattcagtgtggccggacccagcaacatggctgtccagggaagaaactacatacctggacccagctaccgacaacaacgtgtctcaaccactgtgactcaaaacaacaacagcgaatttgcttggcctggagcttcttcttgggctctcaatggacgtaatagcttgatgaatcctggacctgctatggccagccacaaagaaggagaggaccgtttctttcctttgtctggatctttaatttttggcaaacaaggaactggaagagacaacgtggatgcggacaaagtcatgataaccaacgaagaagaaattaaaactactaacccggtagcaacggagtcctatggacaagtggccacaaaccaccagagtgatgggactttggcggtgccttttaaggcacaggcgcagaccggctgggttcaaaaccaaggaatacttccgggtatggtttggcaggacagagatgtgtacctgcaaggacccatttgggccaaaattcctcacacggacggcaactttcacccttctccgctgatgggagggtttggaatgaagcacccgcctcctcagatcctcatcaaaaacacacctgtacctgcggatcctccaacggccttcaacaaggacaagctgaactctttcatcacccagtattctactggccaagtcagcgtggagatcgagtgggagctgcagaaggaaaacagcaagcgctggaacccggagatccagtacacttccaactattacaagtctaataatgttgaatttgctgttaatactgaaggtgtatatagtgaaccccgccccattggcaccagatacctgactcgtaatctgtaa

SEQ ID NO: 3 - DNA, 2232 bp, Artificial Sequence
  source: /note="Description of Artificial Sequence: Synthetic polynucleotide"
atggctgccgatggttatcttccagattggctcgaggacaaccttagtgaaggaattcgcgagtggtgggctttgaaacctggagcccctcaacccaaggcaaatcaacaacatcaagacaacgctcgaggtcttgtgcttccgggttacaaataccttggacccggcaacggactcgacaagggggagccggtcaacgcagcagacgcggcggccctcgagcacgacaaggcctacgaccagcagctcaaggccggagacaacccgtacctcaagtacaaccacgccgacgccgagttccaggagcggctcaaagaagatacgtcttttgggggcaacctcgggcgagcagtcttccaggccaaaaagaggcttcttgaacctcttggtctggttgaggaagcggctaagacggctcctggaaagaagaggcctgtagagcagtctcctcaggaaccggactcctccgcgggtattggcaaatcgggtgcacagcccgctaaaaagagactcaatttcggtcagactggcgacacagagtcagtcccagaccctcaaccaatcggagaacctcccgcagccccctcaggtgtgggatctcttacaatggcttcaggtggtggcgcaccagtggcagacaataacgaaggtgccgatggagtgggtagttcctcgggaaattggcattgcgattcccaatggctgggggacagagtcatcaccaccagcacccgaacctgggccctgcccacctacaacaatcacctctacaagcaaatctccaacagcacatctggaggatcttcaaatgacaacgcctacttcggctacagcaccccctgggggtattttgacttcaacagattccactgccacttctcaccacgtgactggcagcgactcatcaacaacaactggggattccggcctaagcgactcaacttcaagctcttcaacattcaggtcaaagaggttacggacaacaatggagtcaagaccatcgccaataaccttaccagcacggtccaggtcttcacggactcagactatcagctcccgtacgtgctcgggtcggctcacgagggctgcctcccgccgttcccagcggacgttttcatgattcctcagtacgggtatctgacgcttaatgatggaagccaggccgtgggtcgttcgtccttttactgcctggaatatttcccgtcgcaaatgctaagaacgggtaacaacttccagttcagctacgagtttgagaacgtacctttccatagcagctacgctcacagccaaagcctggaccgactaatgaatccactcatcgaccaatacttgtactatctctcaaagactattaacggttctggacagaatcaacaaacgctaaaattcagtgtggccggacccagcaacatggctgtccagggaagaaactacatacctggacccagctaccgacaacaacgtgtctcaaccactgtgactcaaaacaacaacagcgaatttgcttggcctggagcttcttcttgggctctcaatggacgtaatagcttgatgaatcctggacctgctatggccagccacaaagaaggagaggaccgtttctttcctttgtctggatctttaatttttggcaaacaaggaactggaagagacaacgtggatgcggacaaagtcatgataaccaacgaagaagaaattaaaactactaacccggtagcaacggagtcctatggacaagtggccacaaaccaccagagtgcccaaactttggcggtgccttttaaggcacaggcgcagaccggctgggttcaaaaccaaggaatacttccgggtatggtttggcaggacagagatgtgtacctgcaaggacccatttgggccaaaattcctcacacggacggcaactttcacccttctccgctgatgggagggtttggaatgaagcacccgcctcctcagatcctcatcaaaaacacacctgtacctgcggatcctccaacggccttcaacaaggacaagctgaactctttcatcacccagtattctactggccaagtcagcgtggagatcgagtgggagctgcagaaggaaaacagcaagcgctggaacccggagatccagtacacttccaactattacaagtctaataatgttgaatttgctgttaatactgaaggtgtatatagtgaaccccgccccattggcaccagatacctgactcgtaatctgtaa

SEQ ID NO: 4 - protein, 743 aa, Artificial Sequence
  source: /note="Description of Artificial Sequence: Synthetic polypeptide"
MAADGYLPDWLEDNLSEGIREWWALKPGAPQPKANQQHQDNARGLVLPGYKYLGPGNGLDKGEPVNAADAAALEHDKAYDQQLKAGDNPYLKYNHADAEFQERLKEDTSFGGNLGRAVFQAKKRLLEPLGLVEEAAKTAPGKKRPVEQSPQEPDSSAGIGKSGAQPAKKRLNFGQTGDTESVPDPQPIGEPPAAPSGVGSLTMASGGGAPVADNNEGADGVGSSSGNWHCDSQWLGDRVITTSTRTWALPTYNNHLYKQISNSTSGGSSNDNAYFGYSTPWGYFDFNRFHCHFSPRDWQRLINNNWGFRPKRLNFKLFNIQVKEVTDNNGVKTIANNLTSTVQVFTDSDYQLPYVLGSAHEGCLPPFPADVFMIPQYGYLTLNDGSQAVGRSSFYCLEYFPSQMLRTGNNFQFSYEFENVPFHSSYAHSQSLDRLMNPLIDQYLYYLSRTINGSGQNQQTLKFSVAGPSNMAVQGRNYIPGPSYRQQRVSTTVTQNNNSEFAWPGASSWALNGRNSLMNPGPAMASHKEGEDRFFPLSGSLIFGKQGTGRDNVDADKVMITNEEEIKTTNPVATESYGQVATNHQSDGTLAVPFKAQAQTGWVQNQGILPGMVWQDRDVYLQGPIWAKIPHTDGNFHPSPLMGGFGMKHPPPQILIKNTPVPADPPTAFNKDKLNSFITQYSTGQVSVEIEWELQKENSKRWNPEIQYTSNYYKSNNVEFAVNTEGVYSEPRPIGTRYLTRNL

SEQ ID NO: 5 - protein, 743 aa, Artificial Sequence
  source: /note="Description of Artificial Sequence: Synthetic polypeptide"
MAADGYLPDWLEDNLSEGIREWWALKPGAPQPKANQQHQDNARGLVLPGYKYLGPGNGLDKGEPVNAADAAALEHDKAYDQQLKAGDNPYLKYNHADAEFQERLKEDTSFGGNLGRAVFQAKKRLLEPLGLVEEAAKTAPGKKRPVEQSPQEPDSSAGIGKSGAQPAKKRLNFGQTGDTESVPDPQPIGEPPAAPSGVGSLTMASGGGAPVADNNEGADGVGSSSGNWHCDSQWLGDRVITTSTRTWALPTYNNHLYKQISNSTSGGSSNDNAYFGYSTPWGYFDFNRFHCHFSPRDWQRLINNNWGFRPKRLNFKLFNIQVKEVTDNNGVKTIANNLTSTVQVFTDSDYQLPYVLGSAHEGCLPPFPADVFMIPQYGYLTLNDGSQAVGRSSFYCLEYFPSQMLRTGNNFQFSYEFENVPFHSSYAHSQSLDRLMNPLIDQYLYYLSRTINGSGQNQQTLKFSVAGPSNMAVQGRNYIPGPSYRQQRVSTTVTQNNNSEFAWPGASSWALNGRNSLMNPGPAMASHKEGEDRFFPLSGSLIFGKQGTGRDNVDADKVMITNEEEIKTTNPVATESYGQVATNHQSAQTLAVPFKAQAQTGWVQNQGILPGMVWQDRDVYLQGPIWAKIPHTDGNFHPSPLMGGFGMKHPPPQILIKNTPVPADPPTAFNKDKLNSFITQYSTGQVSVEIEWELQKENSKRWNPEIQYTSNYYKSNNVEFAVNTEGVYSEPRPIGTRYLTRNL

SEQ ID NO: 6 - DNA, 2232 bp, Artificial Sequence
  source: /note="Description of Artificial Sequence: Synthetic polynucleotide"
atggctgccgatggttatcttccagattggctcgaggacaaccttagtgaaggaattcgcgagtggtgggctttgaaacctggagcccctcaacccaaggcaaatcaacaacatcaagacaacgctcgaggtcttgtgcttccgggttacaaataccttggacccggcaacggactcgacaagggggagccggtcaacgcagcagacgcggcggccctcgagcacgacaaggcctacgaccagcagctcaaggccggagacaacccgtacctcaagtacaaccacgccgacgccgagttccaggagcggctcaaagaagatacgtcttttgggggcaacctcgggcgagcagtcttccaggccaaaaagaggcttcttgaacctcttggtctggttgaggaagcggctaagacggctcctggaaagaagaggcctgtagagcagtctcctcaggaaccggactcctccgcgggtattggcaaatcgggtgcacagcccgctaaaaagagactcaatttcggtcagactggcgacacagagtcagtcccagaccctcaaccaatcggagaacctcccgcagccccctcaggtgtgggatctcttacaatggcttcaggtggtggcgcaccagtggcagacaataacgaaggtgccgatggagtgggtagttcctcgggaaattggcattgcgattcccaatggctgggggacagagtcatcaccaccagcacccgaacctgggccctgcccacctacaacaatcacctctacaagcaaatctccaacagcacatctggaggatcttcaaatgacaacgcctacttcggctacagcaccccctgggggtattttgacttcaacagattccactgccacttctcaccacgtgactggcagcgactcatcaacaacaactggggattccggcctaagcgactcaacttcaagctcttcaacattcaggtcaaagaggttacggacaacaatggagtcaagaccatcgccaataaccttaccagcacggtccaggtcttcacggactcagactatcagctcccgtacgtgctcgggtcggctcacgagggctgcctcccgccgttcccagcggacgttttcatgattcctcagtacgggtatctgacgcttaatgatggaagccaggccgtgggtcgttcgtccttttactgcctggaatatttcccgtcgcaaatgctaagaacgggtaacaacttccagttcagctacgagtttgagaacgtacctttccatagcagctacgctcacagccaaagcctggaccgactaatgaatccactcatcgaccaatacttgtactatctctctagaactattaacggttctggacagaatcaacaaacgctaaaattcagtgtggccggacccagcaacatggctgtccagggaagaaactacatacctggacccagctaccgacaacaacgtgtctcaaccactgtgactcaaaacaacaacagcgaatttgcttggcctggagcttcttcttgggctctcaatggacgtaatagcttgatgaatcctggacctgctatggccagccacaaagaaggagaggaccgtttctttcctttgtctggatctttaatttttggcaaacaaggtaccggcagagacaacgtggatgcggacaaagtcatgataaccaacgaagaagaaattaaaactactaacccggtagcaacggagtcctatggacaagtggccacaaaccaccagagtgcccaaactttggcggtgccttttaaggcacaggcgcagaccggttgggttcaaaaccaaggaatacttccgggtatggtttggcaggacagagatgtgtacctgcaaggacccatttgggccaaaattcctcacacggacggcaactttcacccttctccgctgatgggagggtttggaatgaagcacccgcctcctcagatcctcatcaaaaacacacctgtacctgcggatcctccaacggccttcaacaaggacaagctgaactctttcatcacccagtattctactggccaagtcagcgtggagatcgagtgggagctgcagaaggaaaacagcaagcgctggaacccggagatccagtacacttccaactattacaagtctaataatgttgaatttgctgttaatactgaaggtgtatatagtgaaccccgccccattggcaccagatacctgactcgtaatctgtaa

SEQ ID NO: 7 - protein, 736 aa, Artificial Sequence
  source: /note="Description of Artificial Sequence: Synthetic polypeptide"
MAADGYLPDWLEDNLSEGIREWWALKPGAPQPKANQQHQDNARGLVLPGYKYLGPGNGLDKGEPVNAADAAALEHDKAYDQQLKAGDNPYLKYNHADAEFQERLKEDTSFGGNLGRAVFQAKKRLLEPLGLVEEAAKTAPGKKRPVEQSPQEPDSSAGIGKSGAQPAKKRLNFGQTGDTESVPDPQPIGEPPAAPSGVGSLTMASGGGAPVADNNEGADGVGSSSGNWHCDSQWLGDRVITTSTRTWALPTYNNHLYKQISNSTSGGSSNDNAYFGYSTPWGYFDFNRFHCHFSPRDWQRLINNNWGFRPKRLNFKLFNIQVKEVTDNNGVKTIANNLTSTVQVFTDSDYQLPYVLGSAHEGCLPPFPADVFMIPQYGYLTLNDGSQAVGRSSFYCLEYFPSQMLRTGNNFQFSYEFENVPFHSSYAHSQSLDRLMNPLIDQYLYYLSRTIQSSQTPRQTLKFSVAGPSNMAVQGRNYIPGPSYRQQRVSTTVTQNNNSEFAWPGASSWALNGRNSLMNPGPAMASHKEGEDRFFPLSGSLIFGKQGTGRDNVDADKVMITNEEEIKTTNPVATESYGQVATNHQSAQAQAQTGWVQNQGILPGMVWQDRDVYLQGPIWAKIPHTDGNFHPSPLMGGFGMKHPPPQILIKNTPVPADPPTAFNKDKLNSFITQYSTGQVSVEIEWELQKENSKRWNPEIQYTSNYYKSNNVEFAVNTEGVYSEPRPIGTRYLTRNL

SEQ ID NO: 8 - protein, 743 aa, Artificial Sequence
  source: /note="Description of Artificial Sequence: Synthetic polypeptide"
MAADGYLPDWLEDNLSEGIREWWALKPGAPQPKANQQHQDNARGLVLPGYKYLGPGNGLDKGEPVNAADAAALEHDKAYDQQLKAGDNPYLKYNHADAEFQERLKEDTSFGGNLGRAVFQAKKRLLEPLGLVEEAAKTAPGKKRPVEQSPQEPDSSAGIGKSGAQPAKKRLNFGQTGDTESVPDPQPIGEPPAAPSGVGSLTMASGGGAPVADNNEGADGVGSSSGNWHCDSQWLGDRVITTSTRTWALPTYNNHLYKQISNSTSGGSSNDNAYFGYSTPWGYFDFNRFHCHFSPRDWQRLINNNWGFRPKRLNFKLFNIQVKEVTDNNGVKTIANNLTSTVQVFTDSDYQLPYVLGSAHEGCLPPFPADVFMIPQYGYLTLNDGSQAVGRSSFYCLEYFPSQMLRTGNNFQFSYEFENVPFHSSYAHSQSLDRLMNPLIDQYLYYLSRTIILGTGTSQTLKFSVAGPSNMAVQGRNYIPGPSYRQQRVSTTVTQNNNSEFAWPGASSWALNGRNSLMNPGPAMASHKEGEDRFFPLSGSLIFGKQGTGRDNVDADKVMITNEEEIKTTNPVATESYGQVATNHQSAQTRTNPEAAQAQTGWVQNQGILPGMVWQDRDVYLQGPIWAKIPHTDGNFHPSPLMGGFGMKHPPPQILIKNTPVPADPPTAFNKDKLNSFITQYSTGQVSVEIEWELQKENSKRWNPEIQYTSNYYKSNNVEFAVNTEGVYSEPRPIGTRYLTRNL

SEQ ID NO: 9 - protein, 743 aa, Artificial Sequence
  source: /note="Description of Artificial Sequence: Synthetic polypeptide"
MAADGYLPDWLEDNLSEGIREWWALKPGAPQPKANQQHQDNARGLVLPGYKYLGPGNGLDKGEPVNAADAAALEHDKAYDQQLKAGDNPYLKYNHADAEFQERLKEDTSFGGNLGRAVFQAKKRLLEPLGLVEEAAKTAPGKKRPVEQSPQEPDSSAGIGKSGAQPAKKRLNFGQTGDTESVPDPQPIGEPPAAPSGVGSLTMASGGGAPVADNNEGADGVGSSSGNWHCDSQWLGDRVITTSTRTWALPTYNNHLYKQISNSTSGGSSNDNAYFGYSTPWGYFDFNRFHCHFSPRDWQRLINNNWGFRPKRLNFKLFNIQVKEVTDNNGVKTIANNLTSTVQVFTDSDYQLPYVLGSAHEGCLPPFPADVFMIPQYGYLTLNDGSQAVGRSSFYCLEYFPSQMLRTGNNFQFSYEFENVPFHSSYAHSQSLDRLMNPLIDQYLYYLSRTIILGTGTSQTLKFSVAGPSNMAVQGRNYIPGPSYRQQRVSTTVTQNNNSEFAWPGASSWALNGRNSLMNPGPAMASHKEGEDRFFPLSGSLIFGKQGTGRDNVDADKVMITNEEEIKTTNPVATESYGQVATNHQSAQNGGTSSSAQAQTGWVQNQGILPGMVWQDRDVYLQGPIWAKIPHTDGNFHPSPLMGGFGMKHPPPQILIKNTPVPADPPTAFNKDKLNSFITQYSTGQVSVEIEWELQKENSKRWNPEIQYTSNYYKSNNVEFAVNTEGVYSEPRPIGTRYLTRNL

SEQ ID NO: 10 - protein, 743 aa, Artificial Sequence
  source: /note="Description of Artificial Sequence: Synthetic polypeptide"
MAADGYLPDWLEDNLSEGIREWWALKPGAPQPKANQQHQDNARGLVLPGYKYLGPGNGLDKGEPVNAADAAALEHDKAYDQQLKAGDNPYLKYNHADAEFQERLKEDTSFGGNLGRAVFQAKKRLLEPLGLVEEAAKTAPGKKRPVEQSPQEPDSSAGIGKSGAQPAKKRLNFGQTGDTESVPDPQPIGEPPAAPSGVGSLTMASGGGAPVADNNEGADGVGSSSGNWHCDSQWLGDRVITTSTRTWALPTYNNHLYKQISNSTSGGSSNDNAYFGYSTPWGYFDFNRFHCHFSPRDWQRLINNNWGFRPKRLNFKLFNIQVKEVTDNNGVKTIANNLTSTVQVFTDSDYQLPYVLGSAHEGCLPPFPADVFMIPQYGYLTLNDGSQAVGRSSFYCLEYFPSQMLRTGNNFQFSYEFENVPFHSSYAHSQSLDRLMNPLIDQYLYYLSRTINGSGQNQQTLKFSVAGPSNMAVQGRNYIPGPSYRQQRVSTTVTQNNNSEFAWPGASSWALNGRNSLMNPGPAMASHKEGEDRFFPLSGSLIFGKQGTGRDNVDADKVMITNEEEIKTTNPVATESYGQVATNHQSAQQAVRTSLAQAQTGWVQNQGILPGMVWQDRDVYLQGPIWAKIPHTDGNFHPSPLMGGFGMKHPPPQILIKNTPVPADPPTAFNKDKLNSFITQYSTGQVSVEIEWELQKENSKRWNPEIQYTSNYYKSNNVEFAVNTEGVYSEPRPIGTRYLTRNL

SEQ ID NO: 11 - protein, 736 aa, Artificial Sequence
  source: /note="Description of Artificial Sequence: Synthetic polypeptide"
MAADGYLPDWLEDNLSEGIREWWALKPGAPQPKANQQHQDNARGLVLPGYKYLGPGNGLDKGEPVNAADAAALEHDKAYDQQLKAGDNPYLKYNHADAEFQERLKEDTSFGGNLGRAVFQAKKRLLEPLGLVEEAAKTAPGKKRPVEQSPQEPDSSAGIGKSGAQPAKKRLNFGQTGDTESVPDPQPIGEPPAAPSGVGSLTMASGGGAPVADNNEGADGVGSSSGNWHCDSQWLGDRVITTSTRTWALPTYNNHLYKQISNSTSGGSSNDNAYFGYSTPWGYFDFNRFHCHFSPRDWQRLINNNWGFRPKRLNFKLFNIQVKEVTDNNGVKTIANNLTSTVQVFTDSDYQLPYVLGSAHEGCLPPFPADVFMIPQYGYLTLNDGSQAVGRSSFYCLEYFPSQMLRTGNNFQFSYEFENVPFHSSYAHSQSLDRLMNPLIDQYLYYLSRTINGSGQNQQTLKFSVAGPSNMAVQGRNYIPGPSYRQQRVSTTVTQNNNSEFAWPGASSWALNGRNSLMNPGPAMASHKEGEDRFFPLSGSLIFGKQGTGRDNVDADKVMITNEEEIKTTNPVATESYGQVATNHQSAQAQAQTGWVQNQGILPGMVWQDRDVYLQGPIWAKIPHTDGNFHPSPLMGGFGMKHPPPQILIKNTPVPADPPTAFNKDKLNSFITQYSTGQVSVEIEWELQKENSKRWNPEIQYTSNYYKSNNVEFAVNTEGVYSEPRPIGTRYLTRNL

SEQ ID NO: 12 - DNA, 2211 bp, Artificial Sequence
  source: /note="Description of Artificial Sequence: Synthetic polynucleotide"
atggctgccgatggttatcttccagattggctcgaggacaacctctctgagggcattcgcgagtggtgggacttgaaacctggagccccgaagcccaaagccaaccagcaaaagcaggacgacggccggggtctggtgcttcctggctacaagtacctcggacccttcaacggactcgacaagggggagcccgtcaacgcggcggacgcagcggccctcgagcacgacaaggcctacgaccagcagctcaaagcgggtgacaatccgtacctgcggtataaccacgccgacgccgagtttcaggagcgtctgcaagaagatacgtcttttgggggcaacctcgggcgagcagtcttccaggccaagaagcgggttctcgaacctctcggtctggttgaggaaggcgctaagacggctcctggaaagaaacgtccggtagagcagtcgccacaagagccagactcctcctcgggcatcggcaagacaggccagcagcccgctaaaaagagactcaattttggtcagactggcgactcagagtcagtccccgatccacaacctctcggagaacctccagcaacccccgctgctgtgggacctactacaatggcttcaggcggtggcgcaccaatggcagacaataacgaaggcgccgacggagtgggtaatgcctcaggaaattggcattgcgattccacatggctgggcgacagagtcatcaccaccagcacccgcacctgggccttgcccacctacaataaccacctctacaagcaaatctccagtgcttcaacgggggccagcaacgacaaccactacttcggctacagcaccccctgggggtattttgatttcaacagattccactgccacttttcaccacgtgactggcagcgactcatcaacaacaattggggattccggcccaagagactcaacttcaaactcttcaacatccaagtcaaggaggtcacgacgaatgatggcgtcacaaccatcgctaataaccttaccagcacggttcaagtcttctcggactcggagtaccagcttccgtacgtcctcggctctgcgcaccagggctgcctccctccgttcccggcggacgtgttcatgattccgcaatacggctacctgacgctcaacaatggcagccaagccgtgggacgttcatccttttactgcctggaatatttcccttctcagatgctgagaacgggcaacaactttaccttcagctacacctttgaggaagtgcctttccacagcagctacgcgcacagccagagcctggaccggctgatgaatcctctcatcgaccaatacctgtattacctgaacagaactcaaaatcagtccggaagtgcccaaaacaaggacttgctgtttagccgtgggtctccagctggcatgtctgttcagcccaaaaactggctacctggaccctgttatcggcagcagcgcgtttctaaaacaaaaacagacaacaacaacagcaattttacctggactggtgcttcaaaatataacctcaatgggcgtgaatccatcatcaaccctggcactgctatggcctcacacaaagacgacgaagacaagttctttcccatgagcggtgtcatgatttttggaaaagagagcgccggagcttcaaacactgcattggacaatgtcatgattacagacgaagaggaaattaaagccactaaccctgtggccaccgaaagatttgggaccgtggcagtcaatttccagagcagcagcacagaccctgcgaccggagatgtgcatgctatgggagcattacctggcatggtgtggcaagatagagacgtgtacctgcagggtcccatttgggccaaaattcctcacacagatggacactttcacccgtctcctcttatgggcggctttggactcaagaacccgcctcctcagatcctcatcaaaaacacgcctgttcctgcgaatcctccggcggagttttcagctacaaagtttgcttcattcatcacccaatactccacaggacaagtgagtgtggaaattgaatgggagctgcagaaagaaaacagcaagcgctggaatcccgaagtgcagtacacatccaattatgcaaaatctgccaacgttgattttactgtggacaacaatggactttatactgagcctcgccccattggcacccgttaccttacccgtcccctgtaa

SEQ ID NO: 13 - protein, 736 aa, Adeno-associated virus 1
MAADGYLPDWLEDNLSEGIREWWDLKPGAPKPKANQQKQDDGRGLVLPGYKYLGPFNGLDKGEPVNAADAAALEHDKAYDQQLKAGDNPYLRYNHADAEFQERLQEDTSFGGNLGRAVFQAKKRVLEPLGLVEEGAKTAPGKKRPVEQSPQEPDSSSGIGKTGQQPAKKRLNFGQTGDSESVPDPQPLGEPPATPAAVGPTTMASGGGAPMADNNEGADGVGNASGNWHCDSTWLGDRVITTSTRTWALPTYNNHLYKQISSASTGASNDNHYFGYSTPWGYFDFNRFHCHFSPRDWQRLINNNWGFRPKRLNFKLFNIQVKEVTTNDGVTTIANNLTSTVQVFSDSEYQLPYVLGSAHQGCLPPFPADVFMIPQYGYLTLNNGSQAVGRSSFYCLEYFPSQMLRTGNNFTFSYTFEEVPFHSSYAHSQSLDRLMNPLIDQYLYYLNRTQNQSGSAQNKDLLFSRGSPAGMSVQPKNWLPGPCYRQQRVSKTKTDNNNSNFTWTGASKYNLNGRESIINPGTAMASHKDDEDKFFPMSGVMIFGKESAGASNTALDNVMITDEEEIKATNPVATERFGTVAVNFQSSSTDPATGDVHAMGALPGMVWQDRDVYLQGPIWAKIPHTDGHFHPSPLMGGFGLKNPPPQILIKNTPVPANPPAEFSATKFASFITQYSTGQVSVEIEWELQKENSKRWNPEVQYTSNYAKSANVDFTVDNNGLYTEPRPIGTRYLTRPL

SEQ ID NO: 14 - DNA, 4718 bp, Adeno-associated virus 1
ttgcccactccctctctgcgcgctcgctcgctcggtggggcctgcggaccaaaggtccgcagacggcagagctctgctctgccggccccaccgagcgagcgagcgcgcagagagggagtgggcaactccatcactaggggtaatcgcgaagcgcctcccacgctgccgcgtcagcgctgacgtaaattacgtcataggggagtggtcctgtattagctgtcacgtgagtgcttttgcgacattttgcgacaccacgtggccatttagggtatatatggccgagtgagcgagcaggatctccattttgaccgcgaaatttgaacgagcagcagccatgccgggcttctacgagatcgtgatcaaggtgccgagcgacctggacgagcacctgccgggcatttctgactcgtttgtgagctgggtggccgagaaggaatgggagctgcccccggattctgacatggatctgaatctgattgagcaggcacccctgaccgtggccgagaagctgcagcgcgacttcctggtccaatggcgccgcgtgagtaaggccccggaggccctcttctttgttcagttcgagaagggcgagtcctacttccacctccatattctggtggagaccacgggggtcaaatccatggtgctgggccgcttcctgagtcagattagggacaagctggtgcagaccatctaccgcgggatcgagccgaccctgcccaactggttcgcggtgaccaagacgcgtaatggcgccggaggggggaacaaggtggtggacgagtgctacatccccaactacctcctgcccaagactcagcccgagctgcagtgggcgtggactaacatggaggagtatataagcgcctgtttgaacctggccgagcgcaaacggctcgtggcgcagcacctgacccacgtcagccagacccaggagcagaacaaggagaatctgaaccccaattctgacgcgcctgtcatccggtcaaaaacctccgcgcgctacatggagctggtcgggtggctggtggaccggggcatcacctccgagaagcagtggatccaggaggaccaggcctcgtacatctccttcaacgccgcttccaactcgcggtcccagatcaaggccgctctggacaatgccggcaagatcatggcgctgaccaaatccgcgcccgactacctggtaggccccgctccgcccgcggacattaaaaccaaccgcatctaccgcatcctggagctgaacggctacgaacctgcctacgccggctccgtctttctcggctgggcccagaaaaggttcgggaagcgcaacaccatctggctgtttgggccggccaccacgggcaagaccaacatcgcggaagccatcgcccacgccgtgcccttctacggctgcgtcaactggaccaatgagaactttcccttcaatgattgcgtcgacaagatggtgatctggtgggaggagggcaagatgacggccaaggtcgtggagtccgccaaggccattctcggcggcagcaaggtgcgcgtggaccaaaagtgcaagtcgtccgcccagatcgaccccacccccgtgatcgtcacctccaacaccaacatgtgcgccgtgattgacgggaacagcaccaccttcgagcaccagcagccgttgcaggaccggatgttcaaatttgaactcacccgccgtctggagcatgactttggcaaggtgacaaagcaggaagtcaaagagttcttccgctgggcgcaggatcacgtgaccgaggtggcgcatgagttctacgtcagaaagggtggagccaacaaaagacccgcccccgatgacgcggataaaagcgagcccaagcgggcctgcccctcagtcgcggatccatcgacgtcagacgcggaaggagctccggtggactttgccgacaggtaccaaaacaaatgttctcgtcacgcgggcatgcttcagatgctgtttccctgcaagacatgcgagagaatgaatcagaatttcaacatttgcttcacgcacgggacgagagactgttcagagtgcttccccggcgtgtcagaatctcaaccggtcgtcagaaagaggacgtatcggaaactctgtgccattcatcatctgctggggcgggctcccgagattgcttgctcggcctgcgatctggtcaacgtggacctggatgactgtgtttctgagcaataaatgacttaaaccaggtatggctgccgatggttatcttccagattggctcgaggacaacctctctgagggcattcgcgagtggtgggacttgaaacctggagccccgaagcccaaagccaaccagcaaaagcaggacgacggccggggtctggtgcttcctggctacaagtacctcggacccttcaacggactcgacaagggggagcccgtcaacgcggcggacgcagcggccctcgagcacgacaaggcctacgaccagcagctcaaagcgggtgacaatccgtacctgcggtataaccacgccgacgccgagtttcaggagcgtctgcaagaagatacgtcttttgggggcaacctcgggcgagcagtcttccaggccaagaagcgggttctcgaacctctcggtctggttgaggaaggcgctaagacggctcctggaaagaaacgtccggtagagcagtcgccacaagagccagactcctcctcgggcatcggcaagacaggccagcagcccgctaaaaagagactcaattttggtcagactggcgactcagagtcagtccccgatccacaacctctcggagaacctccagcaacccccgctgctgtgggacctactacaatggcttcaggcggtggcgcaccaatggcagacaataacgaaggcgccgacggagtgggtaatgcctcaggaaattggcattgcgattccacatggctgggcgacagagtcatcaccaccagcacccgcacctgggccttgcccacctacaataaccacctctacaagcaaatctccagtgcttcaacgggggccagcaacgacaaccactacttcggctacagcaccccctgggggtattttgatttcaacagattccactgccacttttcaccacgtgactggcagcgactcatcaacaacaattggggattccggcccaagagactcaacttcaaactcttcaacatccaagtcaaggaggtcacgacgaatgatggcgtcacaaccatcgctaataaccttaccagcacggttcaagtcttctcggactcggagtaccagcttccgtacgtcctcggctctgcgcaccagggctgcctccctccgttcccggcggacgtgttcatgattccgcaatacggctacctgacgctcaacaatggcagccaagccgtgggacgttcatccttttactgcctggaatatttcccttctcagatgctgagaacgggcaacaactttaccttcagctacacctttgaggaagtgcctttccacagcagctacgcgcacagccagagcctggaccggctgatgaatcctctcatcgaccaatacctgtattacctgaacagaactcaaaatcagtccggaagtgcccaaaacaaggacttgctgtttagccgtgggtctccagctggcatgtctgttcagcccaaaaactggctacctggaccctgttatcggcagcagcgcgtttctaaaacaaaaacagacaacaacaacagcaattttacctggactggtgcttcaaaatataacctcaatgggcgtgaatccatcatcaaccctggcactgctatggcctcacacaaagacgacgaagacaagttctttcccatgagcggtgtcatgatttttggaaaagagagcgccggagcttcaaacactgcattggacaatgtcatgattacagacgaagaggaaattaaagccactaaccctgtggccaccgaaagatttgggaccgtggcagtcaatttccagagcagcagcacagaccctgcgaccggagatgtgcatgctatgggagcattacctggcatggtgtggcaagatagagacgtgtacctgcagggtcccatttgggccaaaattcctcacacagatggacactttcacccgtctcctcttatgggcggctttggactcaagaacccgcctcctcagatcctcatcaaaaacacgcctgttcctgcgaatcctccggcggagttttcagctacaaagtttgcttcattcatcacccaatactccacaggacaagtgagtgtggaaattgaatgggagctgcagaaagaaaacagcaagcgctggaatcccgaagtgcagtacacatccaattatgcaaaatctgccaacgttgattttactgtggacaacaatggactttatactgagcctcgccccattggcacccgttaccttacccgtcccctgtaattacgtgttaatcaataaaccggttgattcgtttcagttgaactttggtctcctgtccttcttatcttatcggttaccatggttatagcttacacattaactgcttggttgcgcttcgcgataaaagacttacgtcatcgggttacccctagtgatggagttgcccactccctctctgcgcgctcgctcgctcggtggggcctgcggaccaaaggtccgcagacggcagagctctgctctgccggccccaccgagcgagcgagcgcgcagagagggagtgggcaa

SEQ ID NO: 15 - DNA, 3131 bp, Artificial Sequence
  source: /note="Description of Artificial Sequence: Synthetic polynucleotide"
gcggccgcgaattcgcccttggctgcgtcaactggaccaatgagaactttcccttcaatgattgcgtcgacaagatggtgatctggtgggaggagggcaagatgacggccaaggtcgtggagtccgccaaggccattctcggcggcagcaaggtgcgcgtggaccaaaagtgcaagtcgtccgcccagatcgaccccacccccgtgatcgtcacctccaacaccaacatgtgcgccgtgattgacgggaacagcaccaccttcgagcaccagcagcctctccaggaccggatgtttaagttcgaactcacccgccgtctggagcacgactttggcaaggtgacaaagcaggaagtcaaagagttcttccgctgggccagtgatcacgtgaccgaggtggcgcatgagttttacgtcagaaagggcggagccagcaaaagacccgcccccgatgacgcggataaaagcgagcccaagcgggcctgcccctcagtcgcggatccatcgacgtcagacgcggaaggagctccggtggactttgccgacaggtaccaaaacaaatgttctcgtcacgcgggcatgcttcagatgctgtttccctgcaaaacgtgcgagagaatgaatcggaatttcaacatttgcttcacacacggggtcagagactgctcagagtgtttccccggcgtgtcagaatctcaaccggtcgtcagaaagaggacgtatcggaaactccgtgcgattcatcatctgctggggcgggctcccgagattgcttgctcggcctgcgatctggtcaacgtggacctggatgactgtgtttctgagcaataaatgacttaaaccaggtatggctgccgatggttatcttccagattggctcgaggacaacctctctgagggcattcgcgagtggtgggcgctgaaacctggagccccgaagcccaaagccaaccagcaaaagcaggacgacggccggggtctggtgcttcctggctacaagtacctcggacccttcaacggactcgacaagggggagcccgtcaacgcggcggacgcagcggccctcgagcacgacaaggcttacgaccagcagctgcaggcgggtgacaatccgtacctgcggtataaccacgccgacgccgagtttcaggagcgtctgcaagaagatacgtcttttgggggcaacctcgggcgagcagtcttccaggccaagaagcgggttctcgaacctctcggtctggttgaggaaggcgctaagacggctcctggaaagaagagaccggtagagccatcaccccagcgttctccagactcctctacgggcatcggcaagaaaggccaacagcccgccagaaaaagactcaattttggtcagactggcgactcagagtcagttccagaccctcaacctctcggagaacctccagcagcgccctctggtgtgggacctaatacaatggctgcaggcggtggcgcaccaatggcagacaataacgaaggcgccgacggagtgggtagttcctcgggaaattggcattgcgattccacatggctgggcgacagagtcatcaccaccagcacccgaacctgggccctgcccacctacaacaaccacctctacaagcaaatctccaacgggacatcgggaggagccaccaacgacaacacctacttcggctacagcaccccctgggggtattttgactttaacagattccactgccacctttcaccacgtgactggcagcgactcatcaacaacaactggggattccgacccaagagactcagcttcaagctcttcaacatccaggtcaaggaggtcacgcagaatgaaggcaccaagaccatcgccaataacctcaccagcaccatccaggtgtttacggactcggagtaccagctgccgtacgttctcggctctgtccaccagggctgcctgcctccgttcccggcggacgtgttcatgattccccagtacggctacctaacactcaacaacggtagtcaggccgtgggacgctcctccttctactgcctggaatactttccttcgcagatgctgagaaccggcaacaacttccagtttacttacaccttcgaggacgtgcctttccacagcagctacgcccacagctagagcttggaccggctgatgaatcctctgattgaccagtacctgtactacttgtctcggactcaaacaacaggaggcacggcaaatacgcagactctgggcttcagccaaggtgggcctaatacaatggccaatcaggcaaagaactggctgccaggaccctgttaccgccaacaacgcgtctcaacgacaaccgggcaaaacaacaatagcaactttgcctggactgctgggaccaaataccatctgaatggaagaaattcattggctaatcctggcatcgctatggcaacacacaaagacgacgaggagcgtttttttcccagtaacgggatcctgatttttggcaaacaaaatgctgccagagacaatgcggattacagcgatgtcatgctcaccagcgaggaagaaatcaaaaccactaaccctgtggctacagaggaatacggtatcgtggcagataacttgcagcagcaaaacacggctcctcaaattggaactgtcaacagccagggggccttacccggtatggtctggcagaaccgggacgtgtacctgcagggtcccatctgggccaagattcctcacacggacggcaacttccacccgtctccgctgatgggcggctttggcctgaaacatcctccgcctcagatcctgatcaagaacacgcctgtacctgcggatcctccgaccaccttcaaccagtcaaagctgaactctttcatcacgcaatacagcaccggacaggtcagcgtggaaattgaatgggagctgcagaaggaaaacagcaagcgctggaaccccgagatccagtacacctccaactactacaaatctataagtgtggactttgctgttaatacagaaggcgtgtactctgaaccccgccccattggcacccgttacctcacccgtaatctgtaattgcctgttaatcaataaaccggttgattcgtttcagttgaactttggtctctgcgaagggcgaattc

SEQ ID NO: 16 - DNA, 255 bp, Adeno-associated virus 10
ggtaattcctccggaaattggcattgcgattccacatggctgggcgacagagtcatcaccaccagcacccgaacctgggtcctgcccacctacaacaaccacatctacaagcaaatctccagcgagacaggagccaccaacgacaaccactacttcggctacagcaccccctgggggtattttgactttaacagattccactgccacttttcaccacgtgactggcagcgactcatcaacaacaactggggattc

SEQ ID NO: 17 - protein, 738 aa, Adeno-associated virus 10
MAADGYLPDWLEDNLSEGIREWWDLKPGAPKPKANQQKQDDGRGLVLPGYKYLGPFNGLDKGEPVNAADAAALEHDKAYDQQLKAGDNPYLRYNHADAEFQERLQEDTSFGGNLGRAVFQAKKRVLEPLGLVEEAAKTAPGKKRPVEPSPQRSPDSSTGIGKKGQQPAKKRLNFGQTGESESVPDPQPIGEPPAGPSGLGSGTMAAGGGAPMADNNEGADGVGSSSGNWHCDSTWLGDRVITTSTRTWALPTYNNHLYKQISNGTSGGSTNDNTYFGYSTPWGYFDFNRFHCHFSPRDWQRLINNNWGFRPKRLSFKLFNIQVKEVTQNEGTKTIANNLTSTIQVFTDSEYQLPYVLGSAHQGCLPPFPADVFMIPQYGYLTLNNGSQAVGRSSFYCLEYFPSQMLRTGNNFEFSYTFEDVPFHSSYAHSQSLDRLMNPLIDQYLYYLSRTQSTGGTQGTQQLLFSQAGPANMSAQAKNWLPGPCYRQQRVSTTLSQNNNSNFAWTGATKYHLNGRDSLVNPGVAMATHKDDEERFFPSSGVLMFGKQGAGRDNVDYSSVMLTSEEEIKTTNPVATEQYGVVADNLQQANTGPIVGNVNSQGALPGMVWQNRDVYLQGPIWAKIPHTDGNFHPSPLMGGFGLKHPPPQILIKNTPVPADPPTTFSQAKLASFITQYSTGQVSVEIEWELQKENSKRWNPEIQYTSNYYKSTNVDFAVNTEGTYSEPRPIGTRYLTRNL

SEQ ID NO: 18 - protein, 738 aa, Adeno-associated virus 10
MAADGYLPDWLEDNLSEGIREWWDLKPGAPKPKANQQKQDDGRGLVLPGYKYLGPFNGLDKGEPVNAADAAALEHDKAYDQQLKAGDNPYLRYNHADAEFQERLQEDTSFGGNLGRAVFQAKKRVLEPLGLVEEGAKTAPGKKRPVEPSPQRSPDSSTGIGKKGQQPAKKRLNFGQTGDSESVPDPQPIGEPPAGPSGLGSGTMAAGGGAPMADNNEGADGVGSSSGNWHCDSTWLGDRVITTSTRTWALPTYNNHLYKQISNGTSGGSTNDNTYFGYSTPWGYFDFNRFHCHFSPRDWQRLINNNWGFRPKRLNFKLFNIQVKEVTQNEGTKTIANNLTSTIQVFTDSEYQLPYVLGSAHQGCLPPFPADVFMIPQYGYLTLNNGSQAVGRSSFYCLEYFPSQMLRTGNNFEFSYQFEDVPFHSSYAHSQSLDRLMNPLIDQYLYYLSRTQSTGGTAGTQQLLFSQAGPNNMSAQAKNWLPGPCYRQQRVSTTLSQNNNSNFAWTGATKYHLNGRDSLVNPGVAMATHKDDEERFFPSSGVLMFGKQGAGKDNVDYSSVMLTSEEEIKTTNPVATEQYGVVADNLQQQNAAPIVGAVNSQGALPGMVWQNRDVYLQGPIWAKIPHTDGNFHPSPLMGGFGLKHPPPQILIKNTPVPADPPTTFSQAKLASFITQYSTGQVSVEIEWELQKENSKRWNPEIQYTSNYYKSTNVDFAVNTDGTYSEPRPIGTRYLTRNL

SEQ ID NO: 19 - DNA, 258 bp, Adeno-associated virus 11
ggtaattcctccggaaattggcattgcgattccacatggctgggcgacagagtcatcaccaccagcacccgaacctgggccctgccaacctacaacaaccacctctacaaacaaatctccagcgcttcaacgggggccagcaacgacaaccactactttggctacagcaccccctgggggtattttgactttaacagattccactgccacttctcaccacgtgactggcagcgactcatcaacaacaactggggattc

SEQ ID NO: 20 - DNA, 255 bp, Adeno-associated virus 12
ggtaattcctccggaaattggcattgcgattccacatggctgggcgaccgagtcattaccaccagcacccggacttgggccctgcccacctacaacaaccacctctacaagcaaatctccagccaatcgggtgccaccaacgacaaccactacttcggctacagcaccccttgggggtattttgatttcaacagattccactgccatttctcaccacgtgactggcagcgactcatcaacaacaactggggattc

SEQ ID NO: 21 - DNA, 2208 bp, Adeno-associated virus 2
atggctgccgatggttatcttccagattggctcgaggacactctctctgaaggaataagacagtggtggaagctcaaacctggcccaccaccaccaaagcccgcagagcggcataaggacgacagcaggggtcttgtgcttcctgggtacaagtacctcggacccttcaacggactcgacaagggagagccggtcaacgaggcagacgccgcggccctcgagcacgacaaagcctacgaccggcagctcgacagcggagacaacccgtacctcaagtacaaccacgccgacgcggagtttcaggagcgccttaaagaagatacgtcttttgggggcaacctcggacgagcagtcttccaggcgaaaaagagggttcttgaacctctgggcctggttgaggaacctgttaagacggctccgggaaaaaagaggccggtagagcactctcctgtggagccagactcctcctcgggaaccggaaaggcgggccagcagcctgcaagaaaaagattgaattttggtcagactggagacgcagactcagtacctgacccccagcctctcggacagccaccagcagccccctctggtctgggaactaatacgatggctacaggcagtggcgcaccaatggcagacaataacgagggcgccgacggagtgggtaattcctcgggaaattggcattgcgattccacatggatgggcgacagagtcatcaccaccagcacccgaacctgggccctgcccacctacaacaaccacctctacaaacaaatttccagccaatcaggagcctcgaacgacaatcactactttggctacagcaccccttgggggtattttgacttcaacagattccactgccacttttcaccacgtgactggcaaagactcatcaacaacaactggggattccgacccaagagactcaacttcaagctctttaacattcaagtcaaagaggtcacgcagaatgacggtacgacgacgattgccaataaccttaccagcacggttcaggtgtttactgactcggagtaccagctcccgtacgtcctcggctcggcgcatcaaggatgcctcccgccgttcccagcagacgtcttcatggtgccacagtatggatacctcaccctgaacaacgggagtcaggcagtaggacgctcttcattttactgcctggagtactttccttctcagatgctgcgtaccggaaacaactttaccttcagctacacttttgaggacgttcctttccacagcagctacgctcacagccagagtctggaccgtctcatgaatcctctcatcgaccagtacctgtattacttgagcagaacaaacactccaagtggaaccaccacgcagtcaaggcttcagttttctcaggccggagcgagtgacattcgggaccagtctaggaactggcttcctggaccctgttaccgccagcagcgagtatcaaagacatctgcggataacaacaacagtgaatactcgtggactggagctaccaagtaccacctcaatggcagagactctctggtgaatccgggcccggccatggcaagccacaaggacgatgaagaaaagttttttcctcagagcggggttctcatctttgggaagcaaggctcagagaaaacaaatgtggacattgaaaaggtcatgattacagacgaagaggaaatcaggacaaccaatcccgtggctacggagcagtatggttctgtatctaccaacctccagagaggcaacagacaagcagctaccgcagatgtcaacacacaaggcgttcttccaggcatggtctggcaggacagagatgtgtaccttcaggggcccatctgggcaaagattccacacacggacggacattttcacccctctcccctcatgggtggattcggacttaaacaccctcctccacagattctcatcaagaacaccccggtacctgcgaatccttcgaccaccttcagtgcggcaaagtttgcttccttcatcacacagtactccacgggacaggtcagcgtggagatcgagtgggagctgcagaaggaaaacagcaaacgctggaatcccgaaattcagtacacttccaactacaacaagtctgttaatgtggactttactgtggacactaatggcgtgtattcagagcctcgccccattggcaccagatacctgactcgtaatctgtaa

SEQ ID NO: 22 - protein, 735 aa, Adeno-associated virus 2 [sequence omitted]

SEQ ID NO: 23 - protein, 621 aa, Adeno-associated virus 2
MPGFYEIVIKVPSDLDGHLPGISDSFVNWVAEKEWELPPDSDMDLNLIEQAPLTVAEKLQRDFLTEWRRVSKAPEALFFVQFEKGESYFHMHVLVETTGVKSMVLGRFLSQIREKLIQRIYRGIEPTLPNWFAVTKTRNGAGGGNKVVDECYIPNYLLPKTQPELQWAWTNMEQYLSACLNLTERKRLVAQHLTHVSQTQEQNKENQNPNSDAPVIRSKTSARYMELVGWLVDKGITSEKQWIQEDQASYISFNAASNSRSQIKAALDNAGKIMSLTKTAPDYLVGQQPVEDISSNRIYKILELNGYDPQYAASVFLGWATKKFGKRNTIWLFGPATTGKTNIAEAIAHTVPFYGCVNWTNENFPFNDCVDKMVIWWEEGKMTAKVVESAKAILGGSKVRVDQKCKSSAQIDPTPVIVTSNTNMCAVIDGNSTTFEHQQPLQDRMFKFELTRRLDHDFGKVTKQEVKDFFRWAKDHVVEVEHEFYVKKGGAKKRPAPSDADISEPKRVRESVAQPSTSDAEASINYADRYQNKCSRHVGMNLMLFPCRQCERMNQNSNICFTHGQKDCLECFPVSESQPVSVVKKAYQKLCYIHHIMGKVPDACTACDLVNVDLDDCIFEQ

SEQ ID NO: 24 - DNA, 4675 bp, Adeno-associated virus 2
ttggccactccctctctgcgcgctcgctcgctcactgaggccgggcgaccaaaggtcgcccgacgcccgggctttgcccgggcggcctcagtgagcgagcgagcgcgcagagagggagtggccaactccatcactaggggttcctggaggggtggagtcgtgacgtgaattacgtcatagggttagggaggtcctgtattagaggtcacgtgagtgttttgcgacattttgcgacaccatgtggtcacgctgggtatttaagcccgagtgagcacgcagggtctccattttgaagcgggaggtttgaacgcgcagccgccatgccggggttttacgagattgtgattaaggtccccagcgaccttgacgggcatctgcccggcatttctgacagctttgtgaactgggtggccgagaaggaatgggagttgccgccagattctgacatggatctgaatctgattgagcaggcacccctgaccgtggccgagaagctgcagcgcgactttctgacggaatggcgccgtgtgagtaaggccccggaggcccttttctttgtgcaatttgagaagggagagagctacttccacatgcacgtgctcgtggaaaccaccggggtgaaatccatggttttgggacgtttcctgagtcagattcgcgaaaaactgattcagagaatttaccgcgggatcgagccgactttgccaaactggttcgcggtcacaaagaccagaaatggcgccggaggcgggaacaaggtggtggatgagtgctacatccccaattacttgctccccaaaacccagcctgagctccagtgggcgtggactaatatggaacagtatttaagcgcctgtttgaatctcacggagcgtaaacggttggtggcgcagcatctgacgcacgtgtcgcagacgcaggagcagaacaaagagaatcagaatcccaattctgatgcgccggtgatcagatcaaaaacttcagccaggtacatggagctggtcgggtggctcgtggacaaggggattacctcggagaagcagtggatccaggaggaccaggcctcatacatctccttcaatgcggcctccaactcgcggtcccaaatcaaggctgccttggacaatgcgggaaagattatgagcctgactaaaaccgcccccgactacctggtgggccagcagcccgtggaggacatttccagcaatcggatttataaaattttggaactaaacgggtacgatccccaatatgcggcttccgtctttctgggatgggccacgaaaaagttcggcaagaggaacaccatctggctgtttgggcctgcaactaccgggaagaccaacatcgcggaggccatagcccacactgtgcccttctacgggtgcgtaaactggaccaatgagaactttcccttcaacgactgtgtcgacaagatggtgatctggtgggaggaggggaagatgaccgccaaggtcgtggagtcggccaaagccattctcggaggaagcaaggtgcgcgtggaccagaaatgcaagtcctcggcccagatagacccgactcccgtgatcgtcacctccaacaccaacatgtgcgccgtgattgacgggaactcaacgaccttcgaacaccagcagccgttgcaagaccggatgttcaaatttgaactcacccgccgtctggatcatgactttgggaaggtcaccaagcaggaagtcaaagactttttccggtgggcaaaggatcacgtggttgaggtggagcatgaattctacgtcaaaaagggtggagccaagaaaagacccgcccccagtgacgcagatataagtgagcccaaacgggtgcgcgagtcagttgcgcagccatcgacgtcagacgcggaagcttcgatcaactacgcagacaggtaccaaaacaaatgttctcgtcacgtgggcatgaatctgatgctgtttccctgcagacaatgcgagagaatgaatcagaattcaaatatctgcttcactcacggacagaaagactgtttagagtgctttcccgtgtcagaatctcaacccgtttctgtcgtcaaaaaggcgtatcagaaactgtgctacattcatcatatcatgggaaaggtgccagacgcttgcactgcctgcgatctggtcaatgtggatttggatgactgcatctttgaacaataaatgatttaaatcaggtatggctgccgatggttatcttccagattggctcgaggacactctctctgaaggaataagacagtggtggaagctcaaacctggcccaccaccaccaaagcccgcagagcggcataaggacgacagcaggggtcttgtgcttcctgggtacaagtacctcggacccttcaacggactcgacaagggagagccggtcaacgaggcagacgccgcggccctcgagcacgtacaaagcctacgaccggcagctcgacagcggagacaacccgtacctcaagtacaaccacgccgacgcggagtttcaggagcgccttaaagaagatacgtcttttgggggcaacctcggacgagcagtcttccaggcgaaaaagagggttcttgaacctctgggcctggttgaggaacctgttaagacggctccgggaaaaaagaggccggtagagcactctcctgtggagccagactcctcctcgggaaccggaaaggcgggccagcagcctgcaagaaaaagattgaattttggtcagactggagacgcagactcagtacctgacccccagcctctcggacagccaccagcagccccctctggtctgggaactaatacgatggctacaggcagtggcgcaccaatggcagacaataacgagggcgccgacggagtgggtaattcctccggaaattggcattgcgattccacatggatgggcgacagagtcatcaccaccagcacccgaacctgggccctgcccacctacaacaaccacctctacaaacaaatttccagccaatcaggagcctcgaacgacaatcactactttggctacagcaccccttgggggtattttgacttcaacagattccactgccacttttcaccacgtgactggcaaagactcatcaacaacaactggggattccgacccaagagactcaacttcaagctctttaacattcaagtcaaagaggtcacgcagaatgacggtacgacgacgattgccaataaccttaccagcacggttcaggtgtttactgactcggagtaccagctcccgtacgtcctcggctcggcgcatcaaggatgcctcccgccgttcccagcagacgtcttcatggtgccacagtatggatacctcaccctgaacaacgggagtcaggcagtaggacgctcttcattttactgcctggagtactttccttctcagatgctgcgtaccggaaacaactttaccttcagctacacttttgaggacgttcctttccacagcagctacgctcacagccagagtctggaccgtctcatgaatcctctcatcgaccagtacctgtattacttgagcagaacaaacactccaagtggaaccaccacgcagtcaaggcttcagttttctcaggccggagcgagtgacattcgggaccagtctaggaactggcttcctggaccctgttaccgccagcagcgagtatcaaagacatctgcggataacaacaacagtgaatactcgtggactggagctaccaagtaccacctcaatggcagagactctctggtgaatccggccatggcaagccacaaggacgatgaagaaaagttttttcctcagagcggggttctcatctttgggaagcaaggctcagagaaaacaaatgtgaacattgaaaaggtcatgattacagacgaagaggaaatcggaacaaccaatcccgtggctacggagcagtatggttctgtatctaccaacctccagagaggcaacagacaagcagctaccgcagatgtcaacacacaaggcgttcttccaggcatggtctggcaggacagagatgtgtaccttcaggggcccatctgggcaaagattccacacacggacggacattttcacccctctcccctcatgggtggattcggacttaaacaccctcctccacagattctcatcaagaacaccccggtacctgcgaatccttcgaccaccttcagtgcggcaaagtttgcttccttcatcacacagtactccacgggacacggtcagcgtggagatcgagtgggagctgcagaaggaaaacagcaaacgctggaatcccgaaattcagtacacttccaactacaacaagtctgttaatcgtggacttaccgtggatactaatggcgtgtattcagagcctcgccccattggcaccagatacctgactcgtaatctgtaattgcttgttaatcaataaaccgtttaattcgtttcagttgaactttggtctctgcgtatttctttcttatctagtttccatggctacgtagataagtagcatggcgggttaatcattaactacaaggaacccctagtgatggagttggccactccctctctgcgcgctcgctcgctcactgaggccgggcgaccaaaggtcgcccgacgcccgggctttgcccgggcggcctcagtgagcgagcgagcgcgcagagagggagtggccaa

SEQ ID NO: 25 - DNA, 4679 bp, Adeno-associated virus 2
ttggccactccctctctgcgcgctcgctcgctcactgaggccgggcgaccaaaggtcgcccgacgcccgggctttgcccgggcggcctcagtgagcgagcgagcgcgcagagagggagtggccaactccatcactaggggttcctggaggggtggagtcgtgacgtgaattacgtcatagggttagggaggtcctgtattagaggtcacgtgagtgttttgcgacattttgcgacaccatgtggtcacgctgggtatttaagcccgagtgagcacgcagggtctccattttgaagcgggaggtttgaacgcgcagccgccatgccggggttttacgagattgtgattaaggtccccagcgaccttgacgggcatctgcccggcatttctgacagctttgtgaactgggtggccgagaaggaatgggagttgccgccagattctgacatggatctgaatctgattgagcaggcacccctgaccgtggccgagaagctgcagcgcgactttctgacggaatggcgccgtgtgagtaaggccccggaggcccttttctttgtgcaatttgagaagggagagagctacttccacatgcacgtgctcgtggaaaccaccggggtgaaatccatggttttgggacgtttcctgagtcagattcgcgaaaaactgattcagagaatttaccgcgggatcgagccgactttgccaaactggttcgcggtcacaaagaccagaaatggcgccggaggcgggaacaaggtggtggatgagtgctacatccccaattacttgctccccaaaacccagcctgagctccagtgggcgtggactaatatggaacagtatttaagcgcctgtttgaatctcacggagcgtaaacggttggtggcgcagcatctgacgcacgtgtcgcagacgcaggagcagaacaaagagaatcagaatcccaattctgatgcgccggtgatcagatcaaaaacttcagccaggtacatggagctggtcgggtggctcgtggacaaggggattacctcggagaagcagtggatccaggaggaccaggcctcatacatctccttcaatgcggcctccaactcgcggtcccaaatcaaggctgccttggacaatgcgggaaagattatgagcctgactaaaaccgcccccgactacctggtgggccagcagcccgtggaggacatttccagcaatcggatttataaaattttggaactaaacgggtacgatccccaatatgcggcttccgtctttctgggatgggccacgaaaaagttcggcaagaggaacaccatctggctgtttgggcctgcaactaccgggaagaccaacatcgcggaggccatagcccacactgtgcccttctacgggtgcgtaaactggaccaatgagaactttcccttcaacgactgtgtcgacaagatggtgatctggtgggaggaggggaagatgaccgccaaggtcgtggagtcggccaaagccattctcggaggaagcaaggtgcgcgtggaccagaaatgcaagtcctcggcccagatagacccgactcccgtgatcgtcacctccaacaccaacatgtgcgccgtgattgacgggaactcaacgaccttcgaacaccagcagccgttgcaagaccggatgttcaaatttgaactcacccgccgtctggatcatgactttgggaaggtcaccaagcaggaagtcaaagactttttccggtgggcaaaggatcacgtggttgaggtggagcatgaattctacgtcaaaaagggtggagccaagaaaagacccgcccccagtgacgcagatataagtgagcccaaacgggtgcgcgagtcagttgcgcagccatcgacgtcagacgcggaagcttcgatcaactacgcagacaggtaccaaaacaaatgttctcgtcacgtgggcatgaatctgatgctgtttccctgcagacaatgcgagagaatgaatcagaattcaaatatctgcttcactcacggacagaaagactgtttagagtgctttcccgtgtcagaatctcaacccgtttctgtcgtcaaaaaggcgtatcagaaactgtgctacattcatcatatcatgggaaaggtgccagacgcttgcactgcctgcgatctggtcaatgtggatttggatgactgcatctttgaacaataaatgatttaaatcaggtatggctgccgatggttatcttccagattggctcgaggacactctctctgaaggaataagacagtggtggaagctcaaacctggcccaccaccaccaaagcccgcagagcggcataaggacgacagcaggggtcttgtgcttcctgggtacaagtacctcggacccttcaacggactcgacaagggagagccggtcaacgaggcagacgccgcggccctcgagcacgacaaagcctacgaccggcagctcgacagcggagacaacccgtacctcaagtacaaccacgccgacgcggagtttcaggagcgccttaaagaagatacgtcttttgggggcaacctcggacgagcagtcttccaggcgaaaaagagggttcttgaacctctgggcctggttgaggaacctgttaagacggctccgggaaaaaagaggccggtagagcactctcctgtggagccagactcctcctcgggaaccggaaaggcgggccagcagcctgcaagaaaaagattgaattttggtcagactggagacgcagactcagtacctgacccccagcctctcggacagccaccagcagccccctctggtctgggaactaatacgatggctacaggcagtggcgcaccaatggcagacaataacgagggcgccgacggagtgggtaattcctccggaaattggcattgcgattccacatggatgggcgacagagtcatcaccaccagcacccgaacctgggccctgcccacctacaacaaccacctctacaaacaaatttccagccaatcaggagcctcgaacgacaatcactactttggctacagcaccccttgggggtattttgacttcaacagattccactgccacttttcaccacgtgactggcaaagactcatcaacaacaactggggattccgacccaagagactcaacttcaagctctttaacattcaagtcaaagaggtcacgcagaatgacggtacgacgacgattgccaataaccttaccagcacggttcaggtgtttactgactcggagtaccagctcccgtacgtcctcggctcggcgcatcaaggatgcctcccgccgttcccagcagacgtcttcatggtgccacagtatggatacctcaccctgaacaacgggagtcaggcagtaggacgctcttcattttactgcctggagtactttccttctcagatgctgcgtaccggaaacaactttaccttcagctacacttttgaggacgttcctttccacagcagctacgctcacagccagagtctggaccgtctcatgaatcctctcatcgaccagtacctgtattacttgagcagaacaaacactccaagtggaaccaccacgcagtcaaggcttcagttttctcaggccggagcgagtgacattcgggaccagtctaggaactggcttcctggaccctgttaccgccagcagcgagtatcaaagacatctgcggataacaacaacagtgaatactcgtggactggagctaccaagtaccacctcaatggcagagactctctggtgaatccgggcccggccatggcaagccacaaggacgatgaagaaaagttttttcctcagagcggggttctcatctttgggaagcaaggctcagagaaaacaaatgtggacattgaaaaggtcatgattacagacgaagaggaaatcaggacaaccaatcccgtggctacggagcagtatggttctgtatctaccaacctccagagaggcaacagacaagcagctaccgcagatgtcaacacacaaggcgttcttccaggcatggtctggcaggacagagatgtgtaccttcaggggcccatctgggcaaagattccacacacggacggacattttcacccctctcccctcatgggtggattcggacttaaacaccctcctccacagattctcatcaagaacaccccggtacctgcgaatccttcgaccaccttcagtgcggcaaagtttgcttccttcatcacacagtactccacgggacaggtcagcgtggagatcgagtgggagctgcagaaggaaaacagcaaacgctggaatcccgaaattcagtacacttccaactacaacaagtctgttaatgtggactttactgtggacactaatggcgtgtattcagagcctcgccccattggcaccagatacctgactcgtaatctgtaattgcttgttaatcaataaaccgtttaattcgtttcagttgaactttggtctctgcgtatttctttcttatctagtttccatggctacgtagataagtagcatggcgggttaatcattaactacaaggaacccctagtgatggagttggccactccctctctgcgcgctcgctcgctcactgaggccgggcgaccaaaggtcgcccgacgcccgggctttgcccgggcggcctcagtgagcgagcgagcgcgcagagagggagtggccaa

SEQ ID NO: 26 - protein, 725 aa, Adeno-associated virus-5
MAADGYLPDWLEDTLSEGIRQWWKLKPGPPPPKPAERHKDDSRGLVLPGYKYLGPFNGLDKGEPVNEADAAALEHDKAYDRQLDSGDNPYLKYNHADAEFQERLKEDTSFGGNLGRAVFQAKKRVLEPFGLVEEGAKTAPTGKRIDDHFPKRKKARTEEDSKPSTSSDAEAGPSGSQQLQIPAQPASSLGADTMSAGGGGPLGDNNQGADGVGNASGDWHCDSTWMGDRVVTKSTRTWVLPSYNNHQYREIKSGSVDGSNANAYFGYSTPWGYFDFNRFHSHWSPRDWQRLINNYWGFRPRSLRVKIFNIQVKEVTVQDSTTTIANNLTSTVQVFTDDDYQLPYVVGNGTEGCLPAFPPQVFTLPQYGYATLNRDNTENPTERSSFFCLEYFPSKMLRTGNNFEFTYNFEEVPFHSSFAPSQNLFKLANPLVDQYLYRFVSTNNTGGVQFNKNLAGRYANTYKNWFPGPMGRTQGWNLGSGVNRASVSAFATTNRMELEGASYQVPPQPNGMTNNLQGSNTYALENTMIFNSQPANPGTTATYLEGNMLITSESETQPVNRVAYNVGGQMATNNQSSTTAPTTGTYNLQEIVPGSVWMERDVYLQGPIWAKIPETGAHFHPSPAMGGFGLKHPPPMMLIKNTPVPGNITSFSDVPVSSFITQYSTGQVTVEMEWELKKENSKRWNPEIQYTNNYNDPQFVDFAPDSTGEYRTTRPIGTRYLTRPL

SEQ ID NO: 27 - protein, 644 aa, Artificial Sequence
  source: /note="Description of Artificial Sequence: Synthetic polypeptide"
  MOD_RES (434)..(434): Any amino acid
KAYDQQLKAGDNPYLRYNHADAEFQERLQEDTSFGGNLGRAVFQAKKRVLEPLGLVETPAKTAPGKKRPVDSPDSTSGIGKKGQQPAKKRLNFGQTGDSESVPDPQPIGEPPAGPSGLGSGTMAAGGGAPMADNNEGADGVGNASGNWHCDSTWLGDRVITTSTRTWALPTYNNHLYKQISSQSAGSTNDNVYFGYSTPWGYFDFNRFHCHFSPRDWQRLINNNWGFRPKKLNFKLFNIQVKEVTTNDGVTTIANNLTSTVQVFSDSEYQLPYVLGSAHQGCLPPFPADVFMIPQYGYLTLNNGSQSVGRSSFYCLEYFPSQMLRTGNNFTFSYTFEDVPFHSSYAHSQSLDRLMNPLIDQYLYYLARTQSNAGGTAGNRELQFYQGGPTTMAEQAKNWLPGPCFRQQRVSKTLDQNNNSNFAWTGATKYHLNXRNSLVNPGVAMATHKDDEERFFPSSGVLIFGKTGAANKTTLENVLMTNEEEIRPTNPVATEEYGIVSSNLQAASTAAQTQVVNNQGALPGMVWQNRDVYLQGPIWAKIPHTDGNFHPSPLMGGFGLKHPPPQILIKNTPVPANPPEVFTPAKFASFITQYSTGQVSVEIEWELQKENSKRWNPEIQYTSNFDKQTGVDFAVDSQGVYSEP

SEQ ID NO: 28 - DNA, 1933 bp, Artificial Sequence
  source: /note="Description of Artificial Sequence: Synthetic polynucleotide"
caaggcctacgaccagcagctcaaagcgggtgacaatccgtacctgcggtataaccacgccgacgccgagtttcaggagtgtcttcaagaagatacgtcttttgggggcaacctcgggcgagcagtcttccaggccaaaaagcgggttctcgaacctcttggtctggttgagacgccagctaagacggcacctggaaagaagcgaccggtagactcgccagactccacctcgggcatcggcaagaaaggccagcagcccgcgaaaaagagactcaactttgggcagactggcgactcagagtcagtccccgaccctcaaccaatcggagaaccaccagcaggcccctctggtctgggatctggtacaatggttgcaggcggtggcgcaccaatggctgacaataacgagggcgccgacggagtgggtaatgcctcaggaaattggcattgcgattccacatggctgggcgacagagtcatcaccaccagcacccgaacctgggccctgcccacctacaacaaccacctctacaagcaaatctccagtcagtcagcagggagcaccaacgataacgtctatttcggctacagcaccccctgggggtattttgacttcaacagattccattgccacttctcaccacgtgactggcagcgacttatcaacaacaactggggattccggcccaagaagctcaacttcaagctcttcaacatccaggtcaaggaggtcacgacgaatgacggtgtcacaaccatcgctaataaccttaccagcacggttcaggtcttttcggactcggaatatcaactgccgtacgtcctcggctccgcgcaccagggctgcctgcctccgttcccggcagacgtgttcatgattccgcagtacggatacctgactctgaacaatggcagccaatcggtaggccgttcctccttctactgcctggagtactttccttctcagatgctgagaacgggcaacaacttcacctttagctacaccttcgaggacgtgcctttccacagcagctacgcgcacagccagagtctggaccggctgatgaatcccctcatcgaccagtacctgtactacttggccagaacacagagcaacgcaggaggtactgctggcaatcgggaactgcagttttatcagggcggacctaccaccatggccgaacaagcaaagaactggctgcccggaccttgcttccggcaacagagagtatccaagacgctggatcaaaataacaacagcaactttgcctggactggtgccacaaaataccatttaaatggaagaaattcattggttaatcccggtgtcgccatggcaacccacaaggacgacgaggaacgcttctccccttcgagcggagttctaatttttggcaaaactggagcagctaataaaactacattagaaaacgtgctcatgacaaatgaagaagaaattcgtcctaccaacccggtagctaccgaggaatacgggattgtaagcagcaacttgcaggcggctagcaccgcagcccagacacaagttgttaacaaccagggagccttacctggcatggtctggcagaaccgggacgtgtacctgcaaggtcccatttgggccaagattcctcacacggacggcaactttcacccgtctcctctaatgggtggctttggactgaaacacccgcctccccagatcctgatcaaaaacacgccggtacctgctaatcctccagaagtgtttactcctgccaagtttgcttccttcatcacgcagtacagcaccgggcaagtcagcgttgagatcgagtgggagctgcagaaagagaacagcaagcgctggaacccagagattcagtacacctccaactttgacaaacagactggagtggactttgctgttgacagccagggtgtttactctgagcct

SEQ ID NO: 29 - protein, 644 aa, Artificial Sequence
  source: /note="Description of Artificial Sequence: Synthetic polypeptide"
KAYDQQLKAGDNPYLRYNHADAEFQECLQEDTSFGGNLGRAVFQAKKRVLEPLGLVETPAKTAPGKKRPVDSPDSTSGIGKKGQQPAKKRLNFGQTGDSESVPDPQPIGEPPAGPSGLGSGTMVAGGGAPMADNNEGADGVGNASGNWHCDSTWLGDRVITTSTRTWALPTYNNHLYKQISSQSAGSTNDNVYFGYSTPWGYFDFNRFHCHFSPRDWQRLINNNWGFRPKKLNFKLFNIQVKEVTTNDGVTTIANNLTSTVQVFSDSEYQLPYVLGSAHQGCLPPFPADVFMIPQYGYLTLNNGSQSVGRSSFYCLEYFPSQMLRTGNNFTFSYTFEDVPFHSSYAHSQSLDRLMNPLIDQYLYYLARTQSNAGGTAGNRELQFYQGGPTTMAEQAKNWLPGPCFRQQRVSKTLDQNNNSNFAWTGATKYHLNGRNSLVNPGVAMATHKDDEERFSPSSGVLIFGKTGAANKTTLENVLMTNEEEIRPTNPVATEEYGIVSSNLQAASTAAQTQVVNNQGALPGMVWQNRDVYLQGPIWAKIPHTDGNFHPSPLMGGFGLKHPPPQILIKNTPVPANPPEVFTPAKFASFITQYSTGQVSVEIEWELQKENSKRWNPEIQYTSNFDKQTGVDFAVDSQGVYSEP

SEQ ID NO: 30 - DNA, 1933 bp, Artificial Sequence
  source: /note="Description of Artificial Sequence: Synthetic polynucleotide"
caaggcctacgaccagcagctcaaagcgggtgacaatccgtacctgcggtataaccacgccgacgccgagtttcaggagcgtcttcaagaagatacgtcttttgggggcaacctcgggcgagcagtcttccaggccaaaaagcgggttctcgaacctcttggtctggttgagacgccagctaagacggcacctggaaagaagcgaccggtagactcgccagactccacctcgggcatcggcaagaaaggccagcagcccgcgaaaaagagactcaactttgggcagactggcgactcagagccagtccccgaccctcaaccaatcggagaaccaccagcaggcccctctggtctgggatctggtacaatggctgcaggcggtggcgcaccaatggctgacaataacgagggcgccgacggagtgggtaatgcctcaggaaattggcattgcgattccacacggctgggcgacagagtcatcaccaccagcacccgaacctgggccctgcccacctacaacaaccacctctacaagcaaatctccagtcagtcagcagggagcaccaacgataacgtctatttcggctacagcaccccctgggggtattttgacttcaacagattccattgccacttctcaccacgtgactggcagcgacttatcaacaacaactggggattccggcccaagaagctcaacttcaagctcttcaacatccaggtcaaggaggtcacgacgaatgacggcgtcacaaccatcgctaataaccttaccagcacggttcaggtcttttcggactcggaatatcaactgccgtacgtcctcggctccgcgcaccagggctgcctgcctccgttcccggcagacgtgttcatgattccgcagtacggatacctgactctgaacaatggcagccaatcggtaggccgttcctccttctactgcctggagtactttccttctcagatgctgagaacgggcaacaacttcacctttagctacaccttcgaggacgtgcctttccacagcagctacgcgcacagccagagtctgggccggctgatgaatcccctcatcgaccagtacctgtactacttggccagaacacagagcaacgcaggaggtactgctggcaatcgggaactgcagttttatcagggcggacctaccaccatggccgaacaagcaaagaactggctgcccggaccttgcttccggcaacagagagtatccaagacgctggatcaaaataacaacagcaactttgcctggactggtgccacaaaataccatttaaatggaagaaattcattggttaatcccggtgtcgccatggcaacccacaaggacgacgaggaacgcttcttcccttcgagcggagttctaatttttggcaaaactggagcagctaataaaactacattagaaaacgtgctcatgacaaatgaagaagaaattcgtcctaccaacccggtagctaccgaggaatacgggattgtaagcagcaacttgcaggcggctagcaccgcagcccagacacaagttgttaacaaccagggagccttacctggcatggtctggcagaaccgggacgtgtacctgcaaggtcccatttgggccaagattcctcacacggacggcaactttcacccgtctcctctaatgggtggctttggactgaaacacccgcctccccagatcctgatcaaaaacacaccggtacctgctaatcctccagaagtgtttactcctgccaagtttgcttccttcatcacgcagtacagcaccgggcaagtcagcgttgagatcgaatgggagctgcagaaagagaacagcaagcgctggaacccagagattcagtacacctccaactttgacaaacagactggagtggactttgctgttgacagccagggtgtttactctgagcct

SEQ ID NO: 31 - protein, 644 aa, Artificial Sequence
  source: /note="Description of Artificial Sequence: Synthetic polypeptide"
KAYDQQLKAGDNPYLRYNHADAEFQERLQEDTSFGGNLGRAVFQAKKRVLEPLGLVETPAKTAPGKKRPVDSPDSTSGIGKKGQQPAKKRLNFGQTGDSEPVPDPQPIGEPPAGPSGLGSGTMAAGGGAPMADNNEGADGVGNASGNWHCDSTRLGDRVITTSTRTWALPTYNNHLYKQISSQSAGSTNDNVYFGYSTPWGYFDFNRFHCHFSPRDWQRLINNNWGFRPKKLNFKLFNIQVKEVTTNDGVTTIANNLTSTVQVFSDSEYQLPYVLGSAHQGCLPPFPADVFMIPQYGYLTLNNGSQSVGRSSFYCLEYFPSQMLRTGNNFTFSYTFEDVPFHSSYAHSQSLGRLMNPLIDQYLYYLARTQSNAGGTAGNRELQFYQGGPTTMAEQAKNWLPGPCFRQQRVSKTLDQNNNSNFAWTGATKYHLNGRNSLVNPGVAMATHKDDEERFFPSSGVLIFGKTGAANKTTLENVLMTNEEEIRPTNPVATEEYGIVSSNLQAASTAAQTQVVNNQGALPGMVWQNRDVYLQGPIWAKIPHTDGNFHPSPLMGGFGLKHPPPQILIKNTPVPANPPEVFTPAKFASFITQYSTGQVSVEIEWELQKENSKRWNPEIQYTSNFDKQTGVDFAVDSQGVYSEP

SEQ ID NO: 32 - DNA, 1933 bp, Artificial Sequence; identical to SEQ ID NO: 30
  source: /note="Description of Artificial Sequence: Synthetic polynucleotide"

SEQ ID NO: 33 - protein, 644 aa, Artificial Sequence; identical to SEQ ID NO: 31
  source: /note="Description of Artificial Sequence: Synthetic polypeptide"

SEQ ID NO: 34 - DNA, 1933 bp, Artificial Sequence
  source: /note="Description of Artificial Sequence: Synthetic polynucleotide"
caaggcctacgaccagcagctcaaagcgggtgacaatccgtacctgcggtataaccacgccgacgccgagtttcaggagcgtcttcaagaagatacgtcttttgggggcaacctcgggcgagcagtcttccaggccaaaaagcgggttctcgaacctcttggtctggttgagacgccagctaagacggcacctggaaagaagcgaccggtagactcgccagactccacctcgggcatcggcaagaaaggccagcagcccgcgaaaaagagactcaactttgggcagactggcgactcagagtcagtccccgaccctcaaccaatcggagaaccaccagcaggcccctctggtctgggatctggtacaatggctgcaggcggtggcgcaccaatggctgacaatagcgagggcgccgacggagtgggtaatgcctcaggaaattggcattgcgattccacatggctgggcgacagagtcatcaccaccagcacccgaacctgggccctgcccacctacaacaaccacctctacaagcaaatctccagtcagtcagcagggagcaccaacgataacgtctatttcggctacagcaccccctgggggtattttgacttcaacagattccattgccacttctcaccacgtgactggcagcgacttatcaacaacaactggggattccggcccaagaagctcaacttcaagctcttcaacatccaggtcaaggaggtcacgacgaatgacggtgtcacaaccatcgctaataaccttaccagcacggttcaggtcttttcggactcggaatatcaactgccgtacgtcctcggctccgcgcaccagggctgcctgcctccgttcccggcagacgtgttcatgattccgcagtacggatacctgactctgaacaatggcagccaatcggtaggccgttcctccttctactgcctggagtactttccttctcagatgctgagaacgggcaacaacttcacctttagctacaccttcgaggacgtgcctttccacagcagctacgcgcacagccagagtctggaccggctgatgaatcccctcatcgaccagtacctgtactacttggccagaacacagagcaacgcaggaggtactgctggcaatcgggaactgcagttttatcagggcggacctaccaccatggccgaacaagcaaagaactggctgcccggaccttgcttccggcaacagagagtatccaagacgctggatcaaaataacaacagcaactttgcctggactggtgccacaaaataccatttaaatggaagaaattcattggttaatcccggtgtcgccatggcaacccacaaggacgacgaggaacgcttcttcccttcgagcggagttctaatttttggcaaaactggagcagctaataaaactacattagaaaacgtgctcatgacaaatgaagaagaaattcgtcctaccaacccggtagctaccgaggaatacgggattgtaagcagcaacttgcaggcggctagcaccgcagcccagacacaagttgttaacaaccagggagccttacctggcatggtctggcagaaccgggacgtgtacctgcaaggtcccatttgggccaagattcctcacacggacggcaactttcacccgtctcctctaatgggtggctttggactgaaacacccgcctccccagatcctgatcaaaaacacaccggtacctgctaatcctccagaagtgtttactcctgccaagcttgcttccttcatcacgcagtacagcaccgggcaagtcagcgttgagatcgagtgggagctgcagaaagagaacagcaagcgctggaacccagagattcagtacacctccaactttgacaaacagactggagtggactttgctgttgacagccagggtgtttactctgagcct

SEQ ID NO: 35 - protein, 644 aa, Artificial Sequence
  source: /note="Description of Artificial Sequence: Synthetic polypeptide"
KAYDQQLKAGDNPYLRYNHADAEFQERLQEDTSFGGNLGRAVFQAKKRVLEPLGLVETPAKTAPGKKRPVDSPDSTSGIGKKGQQPAKKRLNFGQTGDSESVPDPQPIGEPPAGPSGLGSGTMAAGGGAPMADNSEGADGVGNASGNWHCDSTWLGDRVITTSTRTWALPTYNNHLYKQISSQSAGSTNDNVYFGYSTPWGYFDFNRFHCHFSPRDWQRLINNNWGFRPKKLNFKLFNIQVKEVTTNDGVTTIANNLTSTVQVFSDSEYQLPYVLGSAHQGCLPPFPADVFMIPQYGYLTLNNGSQSVGRSSFYCLEYFPSQMLRTGNNFTFSYTFEDVPFHSSYAHSQSLDRLMNPLIDQYLYYLARTQSNAGGTAGNRELQFYQGGPTTMAEQAKNWLPGPCFRQQRVSKTLDQNNNSNFAWTGATKYHLNGRNSLVNPGVAMATHKDDEERFFPSSGVLIFGKTGAANKTTLENVLMTNEEEIRPTNPVATEEYGIVSSNLQAASTAAQTQVVNNQGALPGMVWQNRDVYLQGPIWAKIPHTDGNFHPSPLMGGFGLKHPPPQILIKNTPVPANPPEVFTPAKLASFITQYSTGQVSVEIEWELQKENSKRWNPEIQYTSNFDKQTGVDFAVDSQGVYSEP

SEQ ID NO: 36 - DNA, 1933 bp, Artificial Sequence
  source: /note="Description of Artificial Sequence: Synthetic polynucleotide"
caaggcctacgaccagcagctcaaagcgggtgacaatccgtacctgcggtataaccacgccgacgccgagtttcaggagcgtcttcaagaagatacgtcttttgggggcaacctcgggcgagcagtcttccaggccaaaaagcgggttctcgaacctcttggtctggttgagacgccagctaagacggcacctggaaagaagcgaccggtagactcgccagactccacctcgggcatcggcaagaaaggccagcagcccgcgaaaaagagactcaactttgggcagactggcgactcagagtcagtccccgaccctcaaccaatcggagaaccaccagcaggcccctctggtctgggatctggtacaatggctgcaggcggtggcgcaccaatggctgacaataacgagggcgccgacggagtgggtaatgcctcaggaaattggcattgcgattccacatggctgggcgacagagtcatcaccaccagcacccgaacctgggccctgcccacctacaacaaccacctctacaagcaaatctccagtcagtcagcagggagcaccaacgataacgtctatttcggctacagcaccccctgggggtattttgacttcaacagattccattgccacttctcaccacgtgactggcagcgacttatcaacaacaactggggattccggcccaagaagctcaacttcaagctcttcaacatccaggtcaaggaggtcacgacgaatgacggcgtcacaaccatcgctaataaccttaccagcacggttcaggtcttttcggacccggaatatcaactgccgtacgtcctcggctccgcgcaccagggctgcctgcctccgttcccggcagacgtgttcatgattccgcagtacggatacctgactctgaacaatggcagccaatcggtaggccgttcctccttctactgcctggagtactttccttctcagatgctgagaacgggcaacaacttcacctttagctacaccttcgaggacgtgcctttccacagcagctacgcgcacagccagagtctggaccggctgatgaatcccctcatcgaccagtacctgtactacttggccagaacacagagcaacgcaggaggtactgctggcaatcgggaactgcagttttatcagggcggacctaccaccatggccgaacaagcaaagaactggctgcccggaccttgcttccggcaacagagagtatccaagacgctggatcaaaataacaacagcaactttgcctggactggtgccacaaaataccatttaaatggaagaaattcattggttaatcccggtgtcgccatggcaacccacaaggacgacgaggaacgcttcttcccttcgagcggagttctaatttttggcaaaactggagcagctaataaaactacattagaaaacgtgctcatgacaaatgaagaagaaattcgtcctaccaacccggtagctaccgaggaatacgggattgtaagcagcaacttgcaggcggctagcaccgcagcccagacacaagttgttaacaaccagggagccttacctggcatggtctggcagaaccgggacgtgtacctgcaaggtcccatttgggccaagattcctcacacggacggcaactttcacccgtctcctctaatgggtggctttggactgaaacacccgcctccccagatcctgatcaaaaacacaccggtacctgctaatcctccagaagtgtttactcctgccaagattgcttccttcatcacgcagtacagcaccgggcaagtcagcgttgagatcgagtgggagctgcagaaagagaacagcaagcgctggaacccagagattcagtacacctccaactttgacaaacagactggagtggactttgctgttgacagccagggtgtttactctgagcct

SEQ ID NO: 37 - protein, 644 aa, Artificial Sequence
  source: /note="Description of Artificial Sequence: Synthetic polypeptide"
KAYDQQLKAGDNPYLRYNHADAEFQERLQEDTSFGGNLGRAVFQAKKRVLEPLGLVETPAKTAPGKKRPVDSPDSTSGIGKKGQQPAKKRLNFGQTGDSESVPDPQPIGEPPAGPSGLGSGTMAAGGGAPMADNNEGADGVGNASGNWHCDSTWLGDRVITTSTRTWALPTYNNHLYKQISSQSAGSTNDNVYFGYSTPWGYFDFNRFHCHFSPRDWQRLINNNWGFRPKKLNFKLFNIQVKEVTTNDGVTTIANNLTSTVQVFSDPEYQLPYVLGSAHQGCLPPFPADVFMIPQYGYLTLNNGSQSVGRSSFYCLEYFPSQMLRTGNNFTFSYTFEDVPFHSSYAHSQSLDRLMNPLIDQYLYYLARTQSNAGGTAGNRELQFYQGGPTTMAEQAKNWLPGPCFRQQRVSKTLDQNNNSNFAWTGATKYHLNGRNSLVNPGVAMATHKDDEERFFPSSGVLIFGKTGAANKTTLENVLMTNEEEIRPTNPVATEEYGIVSSNLQAASTAAQTQVVNNQGALPGMVWQNRDVYLQGPIWAKIPHTDGNFHPSPLMGGFGLKHPPPQILIKNTPVPANPPEVFTPAKIASFITQYSTGQVSVEIEWELQKENSKRWNPEIQYTSNFDKQTGVDFAVDSQGVYSEP

SEQ ID NO: 38 - protein, 738 aa, Artificial Sequence
  source: /note="Description of Artificial Sequence: Synthetic polypeptide"
MAADGYLPDWLEDNLSEGIREWWALKPGAPKPKANQQKQDDGRGLVLPGYKYLGPFNGLDKGEPVNAADAAALEHDKAYDQQLKAGDNPYLRYNHADAEFQERLQEDTSFGGNLGRAVFQAKKRVLEPLGLVEEGAKTAPGKKRPVEPSPQRSPDSTTGIGKKGQQPAKKRLNFGQTGDSESVPDPQPIGEPPAGPSGLGSGTMAAGGGAPMADNNEGADGVGSSSGNWHCDSTWLGDRVITTSTRTWALPTYNNHLYKQISNGTSGGSTNDNTYFGYSTPWGYFDFNRFHCHFSPRDWQRLINNNWGFRPKRLNFKLFNIQVKEVTQNEGTKTIANNLTSTIQVFTDSEYQLPYVLGSARQGCLPPFPADVFMIPQYGYLTLNNGSQAVGRSSFYCLEYFPSQMLRTGNNFEFSYQFEDVPFHSSYAHSQSLDRLMNPLIDQYLYYLSRTQSTGGTAGTQQLLFSQAGPNNMSAQAKNWLPGPCYRQQRVSTTLSQNNNSNFAWTGATKYHLNGRDSLVNPGVAMATHKDDEERFFPSSGVLMFGKQGAGKGNVDYSSVMLTSEEEIKTTNPVATEQYGVVADNLQQQNAAPIVGAVNSQGALPGMVWQNRDVYLQGPIWAKIPHTDGNFHPSPLMGGFGLKHPPPQILIKNTPVPADPPTTFSQAKLASFITQYSTGQVSVEIEWELQKENSKRWNPEIQYTSNYYKSTNVDFAVNTDGTYSEPRPIGTRYLTRNL

SEQ ID NO: 39 - DNA, 3121 bp, Artificial Sequence
  source: /note="Description of Artificial Sequence: Synthetic polynucleotide"
gaattcgcccttctacggctgcgtcaactggaccaatgagaactttcccttcaacgactgtgtcgacaagatggtgatctggtgggaggaggggaagatgaccgccaaggtcgtggagtcggccaaagccattctcggaggaagcaaggtgcgcgtggaccagaaatgcaagtcctcggcccagatagacccgactcccgtgatcgtcacctccaacaccaacatgtgcgccgtgattgacgggaactcaacgaccttcgaacaccagcagccgttgcaagaccggatgttcaaatttgaactcacccgccgtctggatcatgactttgggaaggtcaccaagcaggaagtcaaagactttttccggtgggcaaaggatcacgtggttgaggtggagcacgaattctacgtcaaaaagggtggagccaagaaaagacccgcccccagtgacgcagatataagtgagcccaaacgggtgcgcgagtcagttgcgcagccatcgacgtcagacgcggaagcttcgatcaactacgcagacaggtaccaaaacaaatgttctcgtcacgcgggcatgaatctgatgctgtttccctgcagacaatgcgagagaatgaatcagaattcaaatatctgcttcactcacggacagaaagactgtttagagtgctttcccgtgtcagaatctcaacccgtttctgtcgtcaaaaaggcgtatcagaaactgtgctacattcatcatatcatgggaaaggtgccagacgcttgcactgcctgcgatctggtcgatgtggatttggatgactgcatctttgaacaataaatgatttaaatcaggtatggctgccgatggttatcttccagattggctcgaggacaacctctctgagggcattcgcgagtggtgggcgctgaaacctggagccccgaagcccaaagccaaccagcaaaagcaggacggcggccggggtctggtgcttcctggctacaagtacctcggacccttcaacggactcgacaagggggagcccgtcaacgcggcggacgcagcggccctcgagcacgacaaggcctacgaccagcagctcaaagcgggtgacaatccgtacctgcggtataaccacgccgacgccgagtttcaggagcgtctgcaagaagatacgtcttttgggggcaacctcgggcgagcagtcttccaggccaagaagcgggttctcgaacctctcggtctggttgaggaaggcgctaagacggctcctggaaagaagagaccggtagagccatcaccccagcgttctccagactcctctacgggcatcggcaagaaaggccagcagcccgcgaaaaagagactcaactttgggcagactggcgactcagagtcagtgcccgaccctcaaccaatcggagaaccccccgcaggcccctctggtctgggatctggtacaatggctgcaggcggtggcgctccaatggcagacaataacgaaggcgccgacggagtgggtagttcctcaggaaattggcattgcgattccacatggctgggcgactgagtcatcaccaccagcacccgaacctgggccctccccacctacaacaaccacctctacaagcaaatctccaacgggacttcgggaggaagcaccaacgacaacacctacttcggctacagcaccccctgggggtattttgactttaacagattccactgccacttctcaccacgtgactggcagcgactcatcaacaacaactggggattccggcccaagagactcaacttcaagctcttcaacatccaggtcaaggaggtcacgcagaatgaaggcaccaagaccatcgccaataaccttaccagcacgattcaggtctttacggactcggaataccagctcccgtacgtcctcggctctgcgcaccagggctgcctgcctccgttcccggcggacgtcttcatgattcctcagtacgggtacctgactctgaacaatggcagtcaggccgtgggccgttcctccttctactgcctggagtactttccttctcaaatgctgagaacgggcaacaactttgagttcagctaccagtttgaggacgtgccttttcacagcagctacgcgcacagccaaagcctggaccggctgatgaaccccctcatcgaccagtacctgtactacctgtctcggactcagtccacgggaggtaccgcaggaactcagcagttgctattttctcaggccgggcctaataacatgtcggctcaggccaaaaactggctacccgggccctgctaccggcagtaacgcgtctccacgacactgtcgcaaaataacaacagcaactttgtctggaccggtgccaccaagtatcatctgaatggcagagactctctggtagatcccggtgtcgctatggcaacccacaaggacgacgaagagcgattttttccgtccagcggagtcataatgtttgggaaacagggagctggaaaagacaacgtggactatagcagcgtcatgctaaccagtgaggaagaaattaaaaccaccaacccagtggccacagaacagtacggcgtggtggccgataacctgcaacagcaaaacgccgctcctattgtaggggccgtcaacagtcaaggagccttacctggcatggtctggcagaaccgggacgtgtacctgcagggtcctacctgggccaagattcctcacacggacggaaactttcatccctcgccgctgatgggaggctttggactgaaacacccgcctcctcagatcctgattaagaatacacctgttcccgcggatcctccaactaccttcagtcaagctaagctggcgtcgttcatcacgcagtacagcaccggacaggtcagcgtggaaattgaatgggagctgcaggaagaaaacagcaaacgctggaacccagagattcaatacacttccaactactacaaatctacaaatgtggactttgctgttaacacagatggcacttattctgagcctcgccccatcggcacccgttacctcacccgtaatctgtaattgcttgttaatcaataaaccggttgattcgtttcagttgaactttggtctctgcgaagggcgaattc

SEQ ID NO: 40 - protein, 738 aa, Artificial Sequence
  source: /note="Description of Artificial Sequence: Synthetic polypeptide"
MAADGYLPDWLEDNLSEGIREWWALKPGAPKPKANQQKQDDGRGLVLPGYKYLGPFNGLDKGEPVNAADAAALEHDKAYDQQLKAGDNPYLRYNHADAEFQERLQEDTSFGGNLGRAVFQAKKRVLEPLGLVEEGAKTAPGKKRPVEPSPQRSPDSSTGIGKKGQQPAKKRLNFGQTGDSESVPDPQPIGEPPAGPSGLGSGTMAAGGGAPMADNNEGADGVGSSSGNWHCDSTWLGDGVITTSTRTWALPTYNNHLYKQISNGTSGGSTNDNTYFGYSTPWGYFDFNRFHCHFSPRDWQRLINNNWGFRPKSLNFKLFNIQVKEVTQNEGTKTIANNLTSTIQVFTDSEYQLPYVLGSAHQGCLPPFPADVFMIPQYGYLTLNNGSQAVGRSSFYCLEYFPSQMLRTGNNFEFSYQFEDVPFHSSYAHSQSLDRLMNPLIDQYLYYLSRTQSTGGTAGTQQLLFSQAGPNNMSAQAKNWLPGPCYRQQRVSTTLSQNDNSNFAWTGATKYHLNGRDSLVNPGVAMATHKDDEERFFPSSGVLMFGKQGAGKDNVDYSSVMLTSEEEIKTTNPVATEQYGVVADNLQQQNAAPIVGAVNSQGALPGMVWQNRDVYLQGPIWAKIPHTDGNFHPSPLMGGFGLKHPPPQILIKNTPVPADPPTTFSQAKLASFITQYSTGQVSVEIEWELQKENSKRWNPEIQYTSNYYKSTNVDFAVNTDGTYSEPRPIGTRYLTRNL

SEQ ID NO: 41 - DNA, 3121 bp, Artificial Sequence
  source: /note="Description of Artificial Sequence: Synthetic polynucleotide"
gaattcgcccttcgcgagaccaaagttcaactgaaacgaatcaaccggtttattgattaacaagcaattacagattacgggtgaggtaacgggtgccgatggggcgaggctcagaataagtgccatctgtgttaacagcaaagtccacatttgtagatttgtagtagttggaagtgtattgaatctctgggttccagcgtttgctgttttctttctgcagctcccattcaatttccacgctgacctgtccggtgctgtactgcgtgatgaacgacgccagcttagcttgactgaaggtagttggaggatccgcgggaacaggtgtattcttaatcaggatctgaggaggcgggtgtttcagtccaaagcctcccatcagcggcgagggatgaaagtttccgtccgtgtgaggaatcttggcccagataggaccctgcaggtacacgtcccggttctgccagaccatgccaggtaaggctccttgactgttgacggcccctacaataggagcggcgttttgctgttgcaggttatcggccaccacgccgtactgttctgtggccactgggttggtggttttaatttcttcctcactggttagcataacgctgctatagtccacgttgtcttttccagctccctgtttcccaaacattaagactccgctggacggaaaaaatcgctcttcgtcgtccttgtgggttgccatagcgacaccgggatttaccagagagtctctgccattcagatgatacttggtggcaccggtccaggcaaagttgctgttgtcattttgcgacagtgtcgtggagacgcgttgctgccggtagcagggcccgggtagccagtttttggcctgagccgacatgttattaggcccggcctgagaaaatagcaactgctgagttcctgcggtacctcccgtggactgagtccgagacaggtagtacaggtactggtcgatgagggggttcatcagccggtccaggctttggctgtgcgcgtagctgctgtgaaaaggcacgtcctcaaactggtagctgaactcaaagttgttgcccgttctcagcatttgagaaggaaagtactccaggcagtagaaggaggaacggcccacggcctgactgccattgttcagagtcaggtacccgtactgaggaatcatgaagacgtccgccgggaacggaggcaggcagccctggtgcgcagagccgaggacgtacgggagctggtattccgagtccgtaaagacctgaatcgtgctggtaaggttattggcgatggtcttggtgccttcattctgcgtgacctccttgacctggatgttgaagagcttgaagttgaggctcttgggccggaatccccagttgttgttgatgagtcgctgccagtcacgtggtgagaagtggcagtggaatctgttaaagtcaaaatacccccagggggtgctgtagccgaagtaggtgttgtcgttggtgcttcctcccgaagtcccgttggagatttgcttgtagaggtggttgttgtaggtggggagggcccaggttcgggtgctggtggtgatgactccgtcgcccagccatgtggaatcgcaatgccaatttcctgaggaactacccactccgtcggcgccttcgttattgtctgccattggagcgccaccgcctgcagccattgtaccagatcccagaccagaggggcctgcggggggttctccgattggttgagggtcgggcactgactctgagtcgccagtctgcccaaagttgagtctctttttcgcgggctgctggcctttcttgccgatgcccgtagaggagtctggagaacgctggggtgatggctctaccggtctcttctttccaggagccgtcttagcgccttcctcaaccagaccgagaggttcgagaacccgcttcttggcctggaagactgctcgcccgaggttgcccccaaaagacgtatcttcttgcagacgctcctgaaactcggcgtcggcgtggttataccgcaggtacggattgtcacccgctttgagctgctggtcgtaggccttgtcgtgctcgagggccgctgcgtccgccgcgttgacgggctcccccttgtcgagtccgttgaagggtccgaggtacttgtagccaggaagcaccagaccccggccgtcgtcctgcttttgctggttggctttgggcttcggggctccaggtttcagcgcccaccactcgcgaatgccctcagagaggttgtcctcgagccaatctggaagataaccatcggcagccatacctgatttaaatcatttattgttcaaagatgcagtcatccaaatccacattgaccagatcgcaggcagtgcaagcgtctggcacctttcccatgatatgatgaatgtagcacagtttctgatacgcctttttgacgacagaaacgggttgagattctgacacgggaaagcactctaaacagtctttctgtccgtgagtgaagcagatatttgaattctgattcattctctcgcattgtctgcagggaaacagcatcagattcatgcccacgtgacgagaacatttgttttggtacctgtctgcgtagttgatcgaagcttccgcgtctgacgtcgatggctgcgcaactgactcgcgcacccgtttgggctcacttatatctgcgtcactgggggcgggtcttttcttggctccaccctttttgacgtagaattcatgctccacctcaaccacgtgatcctttgcccaccggaaaaagtctttgacttcctgcttggtgaccttcccaaagtcatgatccagacggcgggtgagttcaaatttgaacatccggtcttgcaacggctgctggtgttcgaaggtcgttgagttcccgtcaatcacggcgcacatgttggtgttggaggtgacgatcacgggagtcgggtctatctgggccgaggacttgcatttctggtccacgcgcaccttgcttcctccgagaatggctttggccgactccacgaccttggcggtcatcttcccctcctcccaccagatcaccatcttgtcgacacagtcgttgaagggaaagttctcattggtccagttgacgcagccgtagaaagggcgaattc

SEQ ID NO: 42 - DNA, 2211 bp, Artificial Sequence
  source: /note="Description of Artificial Sequence: Synthetic polynucleotide"
atggctgctgacggttatcttccagattggctcgaggacaacctttctgaaggcattcgtgagtggtgggctctgaaacctggagtccctcaacccaaagcgaaccaacaacaccaggacaaccgtcggggtcttgtgcttccgggttacaaatacctcggacccggtaacggactcgacaaaggagagccggtcaacgaggcggacgcggcagccctcgaacacgacaaagcttacgaccagcagctcaaggccggtgacaacccgtacctcaagtacaaccacgccgacgccgagtttcaggagcgtcttcaagaagatacgtcttttgggggcaaccttggcagagcagtcttccaggccaaaaagaggatccttgagcctcttggtctggttgaggaagcagctaaaacggctcctggaaagaagggggctgtagatcagtctcctcaggaaccggactcatcatctggtgttggcaaatcgggcaaacagcctgccagaaaaagactaaatttcggtcagactggagactcagagtcagtcccagaccctcaacctctcggagaaccaccagcagcccccacaagtttgggatctaatacaatggcttcaggcggtggcgcaccaatggcagacaataacgagggtgccgatggagtgggtaattcctcaggaaattggcattgcgattcccaatggctgggcgacagagtcatcaccaccagcaccagaacctgggccctgcccacttacaacaaccatctctacaagcaaatctccagccaatcaggagcttcaaacgacaaccactactttggctacagcaccccttgggggtattttgactttaacagattccactgccacttctcaccacgtgactggcagcgactcattaacaacaactggggattccggcccaagaaactcagcttcaagctcttcaacatccaagttagaggggtcacgcagaacgatggcacgacgactattgccaataaccttaccagcacggttcaagtgtttacggactcggagtatcagctcccgtacgtgctcgggtcggcgcaccaaggctgtctcccgccgtttccagcggacgtcttcatggtccctcagtatggatacctcaccctgaacaacggaagtcaagcggtgggacgctcatccttttactgcctggagtacttcccttcgcagatgctaaggactggaaataacttccaattcagctataccttcgaggatgtaccttttcacagcagctacgctcacagccagagtttggatcgcttgatgaatcctcttattgatcagtatctgtactacctgaacagaacgcaaggaacaacctctggaacaaccaaccaatcacggctgctttttagccaggctgggcctcagtctatgtctttgcaggccagaaattggctacctgggccctgctaccggcaacagagactttcaaagactgctaacgacaacaacaacagtaactttccttggacagcggccagcaaatatcatctcaatggccgcgactcgctggtgaatccaggaccagctatggccagtcacaaggacgatgaagaaaaatttttccctatgcacggcaatctaatatttggcaaagaagggacaacggcaagtaacgcagaattagataatgtaatgattacggatgaagaagagattcgtaccaccaatcctgtggcaacagagcagtatggaactgtggcaaataacttgcagagctcaaatacagctcccacgactggaactgtcaatcatcagggggccttacctggcatggtgtggcaagatcgtgacgtgtaccttcaaggacctatctgggcaaagattcctcacacggatggacactttcatccttctcctctgatgggaggctttggactgaaacatccgcctcctcaaatcatgatcaaaaatactccggtaccggcaaatcctccgacgactttcagcccggccaagtttgcttcatttatcactcagtactccactggacaggtcagcgtggaaattgagtgggagctacagaaagaaaacagcaaacgttggaatccagagattcagtacacttccaactacaacaagtctgttaatgtggactttactgtagacactaatggtgtttatagtgaacctcgccctattggaacccggtatctcacacgaaacttgtga

SEQ ID NO: 43 - protein, 736 aa, Adeno-associated virus 3
MAADGYLPDWLEDNLSEGIREWWALKPGVPQPKANQQHQDNRRGLVLPGYKYLGPGNGLDKGEPVNEADAAALEHDKAYDQQLKAGDNPYLKYNHADAEFQERLQEDTSFGGNLGRAVFQAKKRILEPLGLVEEAAKTAPGKKGAVDQSPQEPDSSSGVGKSGKQPARKRLNFGQTGDSESVPDPQPLGEPPAAPTSLGSNTMASGGGAPMADNNEGADGVGNSSGNWHCDSQWLGDRVITTSTRTWALPTYNNHLYKQISSQSGASNDNHYFGYSTPWGYFDFNRFHCHFSPRDWQRLINNNWGFRPKKLSFKLFNIQVRGVTQNDGTTTIANNLTSTVQVFTDSEYQLPYVLGSAHQGCLPPFPADVFMVPQYGYLTLNNGSQAVGRSSFYCLEYFPSQMLRTGNNFQFSYTFEDVPFHSSYAHSQSLDRLMNPLIDQYLYYLNRTQGTTSGTTNQSRLLFSQAGPQSMSLQARNWLPGPCYRQQRLSKTANDNNNSNFPWTAASKYHLNGRDSLVNPGPAMASHKDDEEKFFPMHGNLIFGKEGTTASNAELDNVMITDEEEIRTTNPVATEQYGTVANNLQSSNTAPTTGTVNHQGALPGMVWQDRDVYLQGPIWAKIPHTDGHFHPSPLMGGFGLKHPPPQIMIKNTPVPANPPTTFSPAKFASFITQYSTGQVSVEIEWELQKENSKRWNPEIQYTSNYNKSVNVDFTVDTNGVYSEPRPIGTRYLTRNL

SEQ ID NO: 44 - DNA, 4726 bp, Adeno-associated virus 3
ttggccactccctctatgcgcactcgctcgctcggtggggcctggcgaccaaaggtcgccagacggacgtgctttgcacgtccggccccaccgagcgagcgagtgcgcatagagggagtggccaactccatcactagaggtatggcagtgacgtaacgcgaagcgcgcgaagcgagaccacgcctaccagctgcgtcagcagtcaggtgacccttttgcgacagtttgcgacaccacgtggccgctgagggtatatattctcgagtgagcgaaccaggagctccattttgaccgcgaaatttgaacgagcagcagccatgccggggttctacgagattgtcctgaaggtcccgagtgacctggacgagcgcctgccgggcatttctaactcgtttgttaactgggtggccgagaaggaatgggacgtgccgccggattctgacatggatccgaatctgattgagcaggcacccctgaccgtggccgaaaagcttcagcgcgagttcctggtggagtggcgccgcgtgagtaaggccccggaggccctcttttttgtccagttcgaaaagggggagacctacttccacctgcacgtgctgattgagaccatcggggtcaaatccatggtggtcggccgctacgtgagccagattaaagagaagctggtgacccgcatctaccgcggggtcgagccgcagcttccgaactggttcgcggtgaccaaaacgcgaaatggcgccgggggcgggaacaaggtggtggacgactgctacatccccaactacctgctccccaagacccagcccgagctccagtgggcgtggactaacatggaccagtatttaagcgcctgtttgaatctcgcggagcgtaaacggctggtggcgcagcatctgacgcacgtgtcgcagacgcaggagcagaacaaagagaatcagaaccccaattctgacgcgccggtcatcaggtcaaaaacctcagccaggtacatggagctggtcgggtggctggtggaccgcgggatcacgtcagaaaagcaatggattcaggaggaccaggcctcgtacatctccttcaacgccgcctccaactcgcggtcccagatcaaggccgcgctggacaatgcctccaagatcatgagcctgacaaagacggctccggactacctggtgggcagcaacccgccggaggacattaccaaaaatcggatctaccaaatcctggagctgaacgggtacgatccgcagtacgcggcctccgtcttcctgggctgggcgcaaaagaagttcgggaagaggaacaccatctggctctttgggccggccacgacgggtaaaaccaacatcgcggaagccatcgcccacgccgtgcccttctacggctgcgtaaactggaccaatgagaactttcccttcaacgattgcgtcgacaagatggtgatctggtgggaggagggcaagatgacggccaaggtcgtggagagcgccaaggccattctgggcggaagcaaggtgcgcgtggaccaaaagtgcaagtcatcggcccagatcgaacccactcccgtgatcgtcacctccaacaccaacatgtgcgccgtgattgacgggaacagcaccaccttcgagcatcagcagccgctgcaggaccggatgtttgaatttgaacttacccgccgtttggaccatgactttgggaaggtcaccaaacaggaagtaaaggactttttccggtgggcttccgatcacgtgactgacgtggctcatgagttctacgtcagaaagggtggagctaagaaacgccccgcctccaatgacgcggatgtaagcgagccaaaacgggagtgcacgtcacttgcgcagccgacaacgtcagacgcggaagcaccggcggactacgcggacaggtaccaaaacaaatgttctcgtcacgtgggcatgaatctgatgctttttccctgtaaaacatgcgagagaatgaatcaaatttccaatgtctgttttacgcatggtcaaagagactgtggggaatgcttccctggaatgtcagaatctcaacccgtttctgtcgtcaaaaagaagacttatcagaaactgtgtccaattcatcatatcctgggaagggcacccgagattgcctgttcggcctgcgatttggccaatgtggacttggatgactgtgtttctgagcaataaatgacttaaaccaggtatggctgctgacggttatcttccagattggctcgaggacaacctttctgaaggcattcgtgagtggtgggctctgaaacctggagtccctcaacccaaagcgaaccaacaacaccaggacaaccgtcggggtcttgtgcttccgggttacaaatacctcggacccggtaacggactcgacaaaggagagccggtcaacgaggcggacgcggcagccctcgaacacgacaaagcttacgaccagcagctcaaggccggtgacaacccgtacctcaagtacaaccacgccgacgccgagtttcaggagcgtcttcaagaagatacgtcttttgggggcaaccttggcagagcagtcttccaggccaaaaagaggatccttgagcctcttggtctggttgaggaagcagctaaaacggctcctggaaagaagggggctgtagatcagtctcctcaggaaccggactcatcatctggtgttggcaaatcgggcaaacagcctgccagaaaaagactaaatttcggtcagactggagactcagagtcagtcccagaccctcaacctctcggagaaccaccagcagcccccacaagtttgggatctaatacaatggcttcaggcggtggcgcaccaatggcagacaataacgagggtgccgatggagtgggtaattcctcaggaaattggcattgcgattcccaatggctgggcgacagagtcatcaccaccagcaccagaacctgggccctgcccacttacaacaaccatctctacaagcaaatctccagccaatcaggagcttcaaacgacaaccactactttggctacagcaccccttgggggtattttgactttaacagattccactgccacttctcaccacgtgactggcagcgactcattaacaacaactggggattccggcccaagaaactcagcttcaagctcttcaacatccaagttagaggggtcacgcagaacgatggcacgacgactattgccaataaccttaccagcacggttcaagtgtttacggactcggagtatcagctcccgtacgtgctcgggtcggcgcaccaaggctgtctcccgccgtttccagcggacgtcttcatggtccctcagtatggatacctcaccctgaacaacggaagtcaagcggtgggacgctcatccttttactgcctggagtacttcccttcgcagatgctaaggactggaaataacttccaattcagctataccttcgaggatgtaccttttcacagcagctacgctcacagccagagtttggatcgcttgatgaatcctcttattgatcagtatctgtactacctgaacagaacgcaaggaacaacctctggaacaaccaaccaatcacggctgctttttagccaggctgggcctcagtctatgtctttgcaggccagaaattggctacctgggccctgctaccggcaacagagactttcaaagactgctaacgacaacaacaacagtaactttccttggacagcggccagcaaatatcatctcaatggccgcgactcgctggtgaatccaggaccagctatggccagtcacaaggacgatgaagaaaaatttttccctatgcacggcaatctaatatttggcaaagaagggacaacggcaagtaacgcagaattagataatgtaatgattacggatgaagaagagattcgtaccaccaatcctgtggcaacagagcagtatggaactgtggcaaataacttgcagagctcaaatacagctcccacgactggaactgtcaatcatcagggggccttacctggcatggtgtggcaagatcgtgacgtgtaccttcaaggacctatctgggcaaagattcctcacacggatggacactttcatccttctcctctgatgggaggctttggactgaaacatccgcctcctcaaatcatgatcaaaaatactccggtaccggcaaatcctccgacgactttcagcccggccaagtttgcttcatttatcactcagtactccactggacaggtcagcgtggaaattgagtgggagctacagaaagaaaacagcaaacgttggaatccagagattcagtacacttccaactacaacaagtctgttaatgtggactttactgtagacactaatggtgtttatagtgaacctcgccctattggaacccggtatctcacacgaaacttgtgaatcctggttaatcaataaaccgtttaattcgtttcagttgaactttggctcttgtgcacttctttatctttatcttgtttccatggctactgcgtagataagcagcggcctgcggcgcttgcgcttcgcggtttacaactgctggttaatatttaactctcgccatacctctagtgatggagttggccactccctctatgcgcactcgctcgctcggtggggcctggcgaccaaaggtcgccagacggacgtgctttgcacgtccggccccaccgagcgagcgagtgcgcatagagggagtggccaa

SEQ ID NO: 45 - protein, 737 aa, Artificial Sequence
  source: /note="Description of Artificial Sequence: Synthetic polypeptide"
MAADGYLPDWLEDNLSEGIREWWDLKPGAPKPKANQQKQDNGRGLVLPGYKYLGPFNGLDKGEPVNAADAAALEHDKAYDQQLNAGDNPYLRYNHADAEFQERLQEDTSFGGNLGRAVFQAKKRVLEPLGLVEEGAKTAPAKKRPVEPSPQRSPDSSTGIGKKGQQPARKRLNFGQTGDSESVPDPQPLGEPPAAPSSVGSGTVAAGGGAPMADNNEGADGVGNASGNWHCDSTWLGDRVITTSTRTWALPTYNNHLYEQISSETAGSTNDNTYFGYSTPWGYFDFNRFHCHFSPRDWQRLINNNWGFRPKKLRFKLFNIQVKEVTTNDGVTTIANNLTSTIQVFSDSEYQLPYVLGSAHQGCLPPFPADVFMIPQYGYLTLNNGSQSVGRSSFYCLEYFPSQMLRTGNNFEFSYSFEDVPFHSSYAHSQSLDRLMNPLIDQYLYYLARTQSDPGGTAGNRELQFYQGGPSTMAEQAKNWLPGPCFRQQRVSKTLDQNNNSNFAWTGATKYHLNGRNSLVNPGVAMATHKDDEDRFFPSSGVLIFGKTGATNKTTLENVLMTNEEEIRPTNPVATEEYGIVSSNLQAANTAAQTQVVNNQGALPGMVWQNRDVYLQGPIWAKIPHTDGNFHPSPLMGGFGLKHPPPQILIKNTPVPANPPEVFTPAKFASFITQYSTGQVSVEIEWELQKENSKRWDPEIQYTSNFEKQTGVDFAVDSQGVYSEPRPIGTRYLTRNL

SEQ ID NO: 46 - DNA, 2211 bp, Artificial Sequence
  source: /note="Description of Artificial Sequence: Synthetic polynucleotide"
atggctgctgacggttatcttccagattggctcgaggacaacctttctgaaggcattcgtgagtggtgggctctgaaacctggagtccctcaacccaaagcgaaccaacaacaccaggacaaccgtcggggtcttgtgcttccgggttacaaatacctcggacccggtaacggactcgacaaaggagagccggtcaacgaggcggacgcggcagccctcgaacacgacaaagcttacgaccagcagctcaaggccggtgacaacccgtacctcaagtacaaccacgccgacgccgagtttcaggagcgtcttcaagaagatacgtcttttgggggcaaccttggcagagcagtcttccaggccaaaaagaggatccttgagcctcttggtctggttgaggaagcagctaaaacggctcctggaaagaagggggctgtagatcagtctcctcaggaaccggactcatcatctggtgttggcaaatcgggcaaacagcctgccagaaaaagactaaatttcggtcagactggagactcagagtcagtcccagaccctcaacctctcggagaaccaccagcagcccccacaagtttgggatctaatacaatggcttcaggcggtggcgcaccaatggcagacaataacgagggtgccgatggagtgggtaattcctcaggaaattggcattgcgattcccaatggctgggcgacagagtcatcaccaccagcaccagaacctgggccctgcccacttacaacaaccatctctacaagcaaatctccagccaatcaggagcttcaaacgacaaccactactttggctacagcaccccttgggggtattttgactttaacagattccactgccacttctcaccacgtgactggcagcgactcattaacaacaactggggattccggcccaagaaactcagcttcaagctcttcaacatccaagttagaggggtcacgcagaacgatggcacgacgactattgccaataaccttaccagcacggttcaagtgtttacggactcggagtatcagctcccgtacgtgctcgggtcggcgcaccaaggctgtctcccgccgtttccagcggacgtcttcatggtccctcagtatggatacctcaccctgaacaacggaagtcaagcggtgggacgctcatccttttactgcctggagtacttcccttcgcagatgctaaggactggaaataacttccaattcagctataccttcgaggatgtaccttttcacagcagctacgctcacagccagagtttggatcgcttgatgaatcctcttattgatcagtatctgtactacctgaacagaacgcaaggaacaacctctggaacaaccaaccaatcacggctgctttttagccaggctgggcctcagtctatgtctttgcaggccagaaattggctacctgggccctgctaccggcaacagagactttcaaagactgctaacgacaacaacaacagtaactttccttggacagcggccagcaaatatcatctcaatggccgcgactcgctggtgaatccaggaccagctatggccagtcacaaggacgatgaagaaaaatttttccctatgcacggcaatctaatatttggcaaagaagggacaacggcaagtaacgcagaattagataatgtaatgattacggatgaagaagagattcgtaccaccaatcctgtggcaacagagcagtatggaactgtggcaaataacttgcagagctcaaatacagctcccacgactggaactgtcaatcatcagggggccttacctggcatggtgtggcaagatcgtgacgtgtaccttcaaggacctatctgggcaaagattcctcacacggatggacactttcatccttctcctctgatgggaggctttggactgaaacatccgcctcctcaaatcatgatcaaaaatactccggtaccggcaaatcctccgacgactttcagcccggccaagtttgcttcatttatcactcagtactccactggacaggtcagcgtggaaattgagtgggagctacagaaagaaaacagcaaacgttggaatccagagattcagtacacttccaactacaacaagtctgttaatgtggactttactgtagacactaatggtgtttatagtgaacctcgccctattggaacccggtatctcacacgaaacttgtaa

SEQ ID NO: 47 - protein, 736 aa, Artificial Sequence; identical to SEQ ID NO: 43
  source: /note="Description of Artificial Sequence: Synthetic polypeptide"

SEQ ID NO: 48 - protein, 736 aa, Adeno-associated virus 3A; identical to SEQ ID NO: 43

SEQ ID NO: 49 - protein, 624 aa, Adeno-associated virus 3A
MPGFYEIVLKVPSDLDERLPGISNSFVNWVAEKEWDVPPDSDMDPNLIEQAPLTVAEKLQREFLVEWRRVSKAPEALFFVQFEKGETYFHLHVLIETIGVKSMVVGRYVSQIKEKLVTRIYRGVEPQLPNWFAVTKTRNGAGGGNKVVDDCYIPNYLLPKTQPELQWAWTNMDQYLSACLNLAERKRLVAQHLTHVSQTQEQNKENQNPNSDAPVIRSKTSARYMELVGWLVDRGITSEKQWIQEDQASYISFNAASNSRSQIKAALDNASKIMSLTKTAPDYLVGSNPPEDITKNRIYQILELNGYDPQYAASVFLGWAQKKFGKRNTIWLFGPATTGKTNIAEAIAHAVPFYGCVNWTNENFPFNDCVDKMVIWWEEGKMTAKVVESAKAILGGSKVRVDQKCKSSAQIEPTPVIVTSNTNMCAVIDGNSTTFEHQQPLQDRMFEFELTRRLDHDFGKVTKQEVKDFFRWASDHVTDVAHEFYVRKGGAKKRPASNDADVSEPKRECTSLAQPTTSDAEAPADYADRYQNKCSRHVGMNLMLFPCKTCERMNQISNVCFTHGQRDCGECFPGMSESQPVSVVKKKTYQKLCPIHHILGRAPEIACSACDLANVDLDDCVSEQ

SEQ ID NO: 50 - protein, 736 aa, Adeno-associated virus 3B
MAADGYLPDWLEDNLSEGIREWWALKPGVPQPKANQQHQDNRRGLVLPGYKYLGPGNGLDKGEPVNEADAAALEHDKAYDQQLKAGDNPYLKYNHADAEFQERLQEDTSFGGNLGRAVFQAKKRILEPLGLVEEAAKTAPGKKRPVDQSPQEPDSSSGVGKSGKQPARKRLNFGQTGDSESVPDPQPLGEPPAAPTSLGSNTMASGGGAPMADNNEGADGVGNSSGNWHCDSQWLGDRVITTSTRTWALPTYNNHLYKQISSQSGASNDNHYFGYSTPWGYFDFNRFHCHFSPRDWQRLINNNWGFRPKKLSFKLFNIQVKEVTQNDGTTTIANNLTSTVQVFTDSEYQLPYVLGSAHQGCLPPFPADVFMVPQYGYLTLNNGSQAVGRSSFYCLEYFPSQMLRTGNNFQFSYTFEDVPFHSSYAHSQSLDRLMNPLIDQYLYYLNRTQGTTSGTTNQSRLLFSQAGPQSMSLQARNWLPGPCYRQQRLSKTANDNNNSNFPWTAASKYHLNGRDSLVNPGPAMASHKDDEEKFFPMHGNLIFGKEGTTASNAELDNVMITDEEEIRTTNPVATEQYGTVANNLQSSNTAPTTRTVNDQGALPGMVWQDRDVYLQGPIWAKIPHTDGHFHPSPLMGGFGLKHPPPQIMIKNTPVPANPPTTFSPAKFASFITQYSTGQVSVEIEWELQKENSKRWNPEIQYTSNYNKSVNVDFTVDTNGVYSEPRPIGTRYLTRNL

SEQ ID NO: 51 - protein, 624 aa, Adeno-associated virus 3B
MPGFYEIVLKVPSDLDEHLPGISNSFVNWVAEKEWELPPDSDMDPNLIEQAPLTVAEKLQREFLVEWRRVSKAPEALFFVQFEKGETYFHLHVLIETIGVKSMVVGRYVSQIKEKLVTRIYRGVEPQLPNWFAVTKTRNGAGGGNKVVDDCYIPNYLLPKTQPELQWAWTNMDQYLSACLNLAERKRLVAQHLTHVSQTQEQNKENQNPNSDAPVIRSKTSARYMELVGWLVDRGITSEKQWIQEDQASYISFNAASNSRSQIKAALDNASKIMSLTKTAPDYLVGSNPPEDITKNRIYQILELNGYDPQYAASVFLGWAQKKFGKRNTIWLFGPATTGKTNIAEAIAHAVPFYGCVNWTNENFPFNDCVDKMVIWWEEGKMTAKVVESAKAILGGSKVRVDQKCKSSAQIEPTPVIVTSNTNMCAVIDGNSTTFEHQQPLQDRMFKFELTRRLDHDFGKVTKQEVKDFFRWASDHVTDVAHEFYVRKGGAKKRPASNDADVSEPKRQCTSLAQPTTSDAEAPADYADRYQNKCSRHVGMNLMLFPCKTCERMNQISNVCFTHGQRDCGECFPGMSESQPVSVVKKKTYQKLCPIHHILGRAPEIACSACDLANVDLDDCVSEQ

SEQ ID NO: 52 - DNA, 4722 bp, Adeno-associated virus 3B
tggccactccctctatgcgcactcgctcgctcggtggggcctggcgaccaaaggtcgccagacggacgtgctttgcacgtccggccccaccgagcgagcgagtgcgcatagagggagtggccaactccatcactagaggtatggcagtgacgtaacgcgaagcgcgcgaagcgagaccacgcctaccagctgcgtcagcagtcaggtgacccttttgcgacagtttgcgacaccacgtggccgctgagggtatatattctcgagtgagcgaaccaggagctccattttgaccgcgaaatttgaacgagcagcagccatgccggggttctacgagattgtcctgaaggtcccgagtgacctggacgagcacctgccgggcatttctaactcgtttgttaactgggtggccgagaaggaatgggagctgccgccggattctgacatggatccgaatctgattgagcaggcacccctgaccgtggccgaaaagcttcagcgcgagttcctggtggagtggcgccgcgtgagtaaggccccggaggccctcttttttgtccagttcgaaaagggggagacctacttccacctgcacgtgctgattgagaccatcggggtcaaatccatggtggtcggccgctacgtgagccagattaaagagaagctggtgacccgcatctaccgcggggtcgagccgcagcttccgaactggttcgcggtgaccaaaacgcgaaatggcgccgggggcgggaacaaggtggtggacgactgctacatccccaactacctgctccccaagacccagcccgagctccagtgggcgtggactaacatggaccagtatttaagcgcctgtttgaatctcgcggagcgtaaacggctggtggcgcagcatctgacgcacgtgtcgcagacgcaggagcagaacaaagagaatcagaaccccaattctgacgcgccggtcatcaggtcaaaaacctcagccaggtacatggagctggtcgggtggctggtggaccgcgggatcacgtcagaaaagcaatggattcaggaggaccaggcctcgtacatctccttcaacgccgcctccaactcgcggtcccagatcaaggccgcgctggacaatgcctccaagatcatgagcctgacaaagacggctccggactacctggtgggcagcaacccgccggaggacattaccaaaaatcggatctaccaaatcctggagctgaacgggtacgatccgcagtacgcggcctccgtcttcctgggctgggcgcaaaagaagttcgggaagaggaacaccatctggctctttgggccggccacgacgggtaaaaccaacatcgcggaagccatcgcccacgccgtgcccttctacggctgcgtaaactggaccaatgagaactttcccttcaacgattgcgtcgacaagatggtgatctggtgggaggagggcaagatgacggccaaggtcgtggagagcgccaaggccattctgggcggaagcaaggtgcgcgtggaccaaaagtgcaagtcatcggcccagatcgaacccactcccgtgatcgtcacctccaacaccaacatgtgcgccgtgattgacgggaacagcaccaccttcgagcatcagcagccgctgcaggaccggatgtttaaatttgaacttacccgccgtttggaccatgactttgggaaggtcaccaaacaggaagtaaaggactttttccggtgggcttccgatcacgtgactgacgtggctcatgagttctacgtcagaaagggtggagctaagaaacgccccgcctccaatgacgcggatgtaagcgagccaaaacggcagtgcacgtcacttgcgcagccgacaacgtcagacgcggaagcaccggcggactacgcggacaggtaccaaaacaaatgttctcgtcacgtgggcatgaatctgatgctttttccctgtaaaacatgcgagagaatgaatcaaatttccaatgtctgttttacgcatggtcaaagagactgtggggaatgcttccctggaatgtcagaatctcaacccgtttctgtcgtcaaaaagaagacttatcagaaactgtgtccaattcatcatatcctgggaagggcacccgagattgcctgttcggcctgcgatttggccaatgtggacttggatgactgtgtttctgagcaataaatgacttaaaccaggtatggctgctgacggttatcttccagattggctcgaggacaacctttctgaaggcattcgtgagtggtgggctctgaaacctggagtccctcaacccaaagcgaaccaacaacaccaggacaaccgtcggggtcttgtgcttccgggttacaaatacctcggacccggtaacggactcgacaaaggagagccggtcaacgaggcggacgcggcagccctcgaacacgacaaagcttacgaccagcagctcaaggccggtgacaacccgtacctcaagtacaaccacgccgacgccgagtttcaggagcgtcttcaagaagatacgtcttttgggggcaaccttggcagagcagtcttccaggccaaaaagaggatccttgagcctcttggtctggttgaggaagcagctaaaacggctcctggaaagaagaggcctgtagatcagtctcctcaggaaccggactcatcatctggtgttggcaaatcgggcaaacagcctgccagaaaaagactaaatttcggtcagactggcgactcagagtcagtcccagaccctcaacctctcggagaaccaccagcagcccccacaagtttgggatctaatacaatggcttcaggcggtggcgcaccaatggcagacaataacgagggtgccgatggagtgggtaattcctcaggaaattggcattgcgattcccaatggctgggcgacagagtcatcaccaccagcaccagaacctgggccctgcccacttacaacaaccatctctacaagcaaatctccagccaatcaggagcttcaaacgacaaccactactttggctacagcaccccttgggggtattttgactttaacagattccactgccacttctcaccacgtgactggcagcgactcattaacaacaactggggattccggcccaagaaactcagcttcaagctcttcaacatccaagttaaagaggtcacgcagaacgatggcacgacgactattgccaataaccttaccagcacggttcaagtgtttacggactcggagtatcagctcccgtacgtgctcgggtcggcgcaccaaggctgtctcccgccgtttccagcggacgtcttcatggtccctcagtatggatacctcaccctgaacaacggaagtcaagcggtgggacgctcatccttttactgcctggagtacttcccttcgcagatgctaaggactggaaataacttccaattcagctataccttcgaggatgtaccttttcacagcagctacgctcacagccagagtttggatcgcttgatgaatcctcttattgatcagtatctgtactacctgaacagaacgcaaggaacaacctctggaacaaccaaccaatcacggctgctttttagccaggctgggcctcagtctatgtctttgcaggccagaaattggctacctgggccctgctaccggcaacagagactttcaaagactgctaacgacaacaacaacagtaactttccttggacagcggccagcaaatatcatctcaatggccgcgactcgctggtgaatccaggaccagctatggccagtcacaaggacgatgaagaaaaatttttccctatgcacggcaatctaatatttggcaaagaagggacaacggcaagtaacgcagaattagataatgtaatgattacggatgaagaagagattcgtaccaccaatcctgtggcaacagagcagtatggaactgtggcaaataacttgcagagctcaaatacagctcccacgactagaactgtcaatgatcagggggccttacctggcatggtgtggcaagatcgtgacgtgtaccttcaaggacctatctgggcaaagattcctcacacggatggacactttcatccttctcctctgatgggaggctttggactgaaacatccgcctcctcaaatcatgatcaaaaatactccggtaccggcaaatcctccgacgactttcagcccggccaagtttgcttcatttatcactcagtactccactggacaggtcagcgtggaaattgagtgggagctacagaaagaaaacagcaaacgttggaatccagagattcagtacacttccaactacaacaagtctgttaatgtggactttactgtagacactaatggtgtttatagtgaacctcgccctattggaacccggtatctcacacgaaacttgtaatcctggttaatcaataaaccgtttaattcgtttcagttgaactttggctcttgtgcacttcttatcttatcttgtttccatggctactgcgtagataagcagcggcctgcggcgcttgcgcttcgcggtttacaactgctggttaatatttaactctcgccatacctctagtgatggagttggccactccctctatgcgcactcgctcgctcggtggggccggacgtgcaaagcacgtccgtctggcgacctttggtcgccaggccccaccgagcgagcgagtgcgcatagagggagtggccaa

SEQ ID NO: 53 - DNA, 1800 bp, Adeno-associated virus 4
  modified_base (342)..(342): Unknown
acggctcctggaaagaagagaccgttgattgaatccccccagcagcccgactcctccacgggtatcggcaaaaaaggcaagcagccggctaaaaagaagctcgttttcgaagacgaaactggagcaggcgacggaccccctgagggatcaacttccggagccatgtctgatgacagtgagatgcgtgcagcagctggcggagctgcagtcgagggsggacaaggtgccgatggagtgggtaatgcctcgggtgattggcattgcgattccacctggtctgagggccacgtcacgaccaccagcaccagaacctgggtcttgcccacctacaacaaccacctntacaagcgactcggagagagcctgcagtccaacacctacaacggattctccaccccctggggatactttgacttcaaccgcttccactgccacttctcaccacgtgactggcagcgactcatcaacaacaactggggcatgcgacccaaagccatgcgggtcaaaatcttcaacatccaggtcaaggaggtcacgacgtcgaacggcgagacaacggtggctaataaccttaccagcacggttcagatctttgcggactcgtcgtacgaactgccgtacgtgatggatgcgggtcaagagggcagcctgcctccttttcccaacgacgtctttatggtgccccagtacggctactgtggactggtgaccggcaacacttcgcagcaacagactgacagaaatgccttctactgcctggagtactttccttcgcagatgctgcggactggcaacaactttgaaattacgtacagttttgagaaggtgcctttccactcgatgtacgcgcacagccagagcctggaccggctgatgaaccctctcatcgaccagtacctgtggggactgcaatcgaccaccaccggaaccaccctgaatgccgggactgccaccaccaactttaccaagctgcggcctaccaacttttccaactttaaaaagaactggctgcccgggccttcaatcaagcagcagggcttctcaaagactgccaatcaaaactacaagatccctgccaccgggtcagacagtctcatcaaatacgagacgcacagcactctggacggaagatggagtgccctgacccccggacctccaatggccacggctggacctgcggacagcaagttcagcaacagccagctcatctttgcggggcctaaacagaacggcaacacggccaccgtacccgggactctgatcttcacctctgaggaggagctggcagccaccaacgccaccgatacggacatgtggggcaacctacctggcggtgaccagagcaacagcaacctgccgaccgtggacagactgacagccttgggagccgtgcctggaatggtctggcaaaacagagacatttactaccagggtcccatttgggccaagattcctcataccgatggacactttcacccctcaccgctgattggtgggtttgggctgaaacacccgcctcctcaaatttttatcaagaacaccccggtacctgcgaatcctgcaacgaccttcagctctactccggtaaactccttcattactcagtacagcactggccaggtgtcggtgcagattgactgggagatccagaaggagcggtccaaacgctggaaccccgaggtccagtttacctccaactacggacagcaaaactctctgttgtgggctcccgatgcggctgggaaatacactgagcctagggctatcggtacccgctacctcacccaccacctgtaataa

SEQ ID NO: 54 - DNA, 2208 bp, Adeno-associated virus 4
  modified_base (750)..(750): Unknown
atgactgacggttaccttccagattggctagaggacaacctctctgaaggcgttcgagagtggtgggcgctgcaacctggagcccctaaacccaaggcaaatcaacaacatcaggacaacgctcggggtcttgtgcttccgggttacaaatacctcggacccggcaacggactcgacaagggggaacccgtcaacgcagcggacgcggcagccctcgagcacgacaaggcctacgaccagcagctcaaggccggtgacaacccctacctcaagtacaaccacgccgacgcggagttccagcagcggcttcagggcgacacatcgtttgggggcaacctcggcagagcagtcttccaggccaaaaagagggttcttgaacctcttggtctggttgagcaagcgggtgagacggctcctggaaagaagagaccgttgattgaatccccccagcagcccgactcctccacgggtatcggcaaaaaaggcaagcagccggctaaaaagaagctcgttttcgaagacgaaactggagcaggcgacggaccccctgagggatcaacttccggagccatgtctgatgacagtgagatgcgtgcagcagctggcggagctgcagtcgagggsggacaaggtgccgatggagtgggtaatgcctcgggtgattggcattgcgattccacctggtctgagggccacgtcacgaccaccagcaccagaacctgggtcttgcccacctacaacaaccacctntacaagcgactcggagagagcctgcagtccaacacctacaacggattctccaccccctggggatactttgacttcaaccgcttccactgccacttctcaccacgtgactggcagcgactcatcaacaacaactggggcatgcgacccaaagccatgcgggtcaaaatcttcaacatccaggtcaaggaggtcacgacgtcgaacggcgagacaacggtggctaataaccttaccagcacggttcagatctttgcggactcgtcgtacgaactgccgtacgtgatggatgcgggtcaagagggcagcctgcctccttttcccaacgacgtctttatggtgccccagtacggctactgtggactggtgaccggcaacacttcgcagcaacagactgacagaaatgccttctactgcctggagtactttccttcgcagatgctgcggactggcaacaactttgaaattacgtacagttttgagaaggtgcctttccactcgatgtacgcgcacagccagagcctggaccggctgatgaaccctctcatcgaccagtacctgtggggactgcaatcgaccaccaccggaaccaccctgaatgccgggactgccaccaccaactttaccaagctgcggcctaccaacttttccaactttaaaaagaactggctgcccgggccttcaatcaagcagcagggcttctcaaagactgccaatcaaaactacaagatccctgccaccgggtcagacagtctcatcaaatacgagacgcacagcactctggacggaagatggagtgccctgacccccggacctccaatggccacggctggacctgcggacagcaagttcagcaacagccagctcatctttgcggggcctaaacagaacggcaacacggccaccgtacccgggactctgatcttcacctctgaggaggagctggcagccaccaacgccaccgatacggacatgtggggcaacctacctggcggtgaccagagcaacagcaacctgccgaccgtggacagactgacagccttgggagccgtgcctggaatggtctggcaaaacagagacatttactaccagggtcccatttgggccaagattcctcataccgatggacactttcacccctcaccgctgattggtgggtttgggctgaaacacccgcctcctcaaatttttatcaagaacaccccggtacctgcgaatcctgcaacgaccttcagctctactccggtaaactccttcattactcagtacagcactggccaggtgtcggtgcagattgactgggagatccagaaggagcggtccaaacgctggaaccccgaggtccagtttacctccaactacggacagcaaaactctctgttgtgggctcccgatgcggctgggaaatacactgagcctagggctatcggtacccgctacctcacccaccacctgtaataa

SEQ ID NO: 55 - DNA, 1872 bp, Adeno-associated virus 4
atgccggggttctacgagatcgtgctgaaggtgcccagcgacctggacgagcacctgcccggcatttctgactcttttgtgagctgggtggccgagaaggaatgggagctgccgccggattctgacatggacttgaatctgattgagcaggcacccctgaccgtggccgaaaagctgcaacgcgagttcctggtcgagtggcgccgcgtgagtaaggccccggaggccctcttctttgtccagttcgagaagggggacagctacttccacctgcacatcctggtggagaccgtgggcgtcaaatccatggtggtgggccgctacgtgagccagattaaagagaagctggtgacccgcatctaccgcggggtcgagccgcagcttccgaactggttcgcggtgaccaagacgcgtaatggcgccggaggcgggaacaaggtggtggacgactgctacatccccaactacctgctccccaagacccagcccgagctccagtgggcgtggactaacatggaccagtatataagcgcctgtttgaatctcgcggagcgtaaacggctggtggcgcagcatctgacgcacgtgtcgcagacgcaggagcagaacaaggaaaaccagaaccccaattctgacgcgccggtcatcaggtcaaaaacctccgccaggtacatggagctggtcgggtggctggtggaccgcgggatcacgtcagaaaagcaatggatccaggaggaccaggcgtcctacatctccttcaacgccgcctccaactcgcggtcacaaatcaaggccgcgctggacaatgcctccaaaatcatgagcctgacaaagacggctccggactacctggtgggccagaacccgccggaggacatttccagcaaccgcatctaccgaatcctcgagatgaacgggtacgatccgcagtacgcggcctccgtcttcctgggctgggcgcaaaagaagttcgggaagaggaacaccatctggctctttgggccggccacgacgggtaaaaccaacatcgcggaagccatcgcccacgccgtgcccttctacggctgcgtgaactggaccaatgagaactttccgttcaacgattgcgtcgacaagatggtgatctggtgggaggagggcaagatgacggccaaggtcgtagagagcgccaaggccatcctgggcggaagcaaggtgcgcgtggaccaaaagtgcaagtcatcggcccagatcgacccaactcccgtgatcgtcacctccaacaccaacatgtgcgcggtcatcgacggaaactcgaccaccttcgagcaccaacaaccactccaggaccggatgttcaagttcgagctcaccaagcgcctggagcacgactttggcaaggtcaccaagcaggaagtcaaagactttttccggtgggcgtcagatcacgtgaccgaggtgactcacgagttttacgtcagaaagggtggagctagaaagaggcccgcccccaatgacgcagatataagtgagcccaagcgggcctgtccgtcagttgcgcagccatcgacgtcagacgcggaagctccggtggactacgcggacaggtaccaaaacaaatgttctcgtcacgtgggtatgaatctgatgctttttccctgccggcaatgcgagagaatgaatcagaatgtggacatttgcttcacgcacggggtcatggactgtgccgagtgcttccccgtgtcagaatctcaacccgtgtctgtcgtcagaaagcggacgtatcagaaactgtgtccgattcatcacatcatggggagggcgcccgaggtggcctgctcggcctgcgaactggccaatgtggacttggatgactgtgacatggaacaataa

SEQ ID NO: 56 - DNA, 1611 bp, Adeno-associated virus 4
atgccggggttctacgagatcgtgctgaaggtgcccagcgacctggacgagcacctgcccggcatttctgactcttttgtgagctgggtggccgagaaggaatgggagctgccgccggattctgacatggacttgaatctgattgagcaggcacccctgaccgtggccgaaaagctgcaacgcgagttcctggtcgagtggcgccgcgtgagtaaggccccggaggccctcttctttgtccagttcgagaagggggacagctacttccacctgcacatcctggtggagaccgtgggcgtcaaatccatggtggtgggccgctacgtgagccagattaaagagaagctggtgacccgcatctaccgcggggtcgagccgcagcttccgaactggttcgcggtgaccaagacgcgtaatggcgccggaggcgggaacaaggtggtggacgactgctacatccccaactacctgctccccaagacccagcccgagctccagtgggcgtggactaacatggaccagtatataagcgcctgtttgaatctcgcggagcgtaaacggctggtggcgcagcatctgacgcacgtgtcgcagacgcaggagcagaacaaggaaaaccagaaccccaattctgacgcgccggtcatcaggtcaaaaacctccgccaggtacatggagctggtcgggtggctggtggaccgcgggatcacgtcagaaaagcaatggatccaggaggaccaggcgtcctacatctccttcaacgccgcctccaactcgcggtcacaaatcaaggccgcgctggacaatgcctccaaaatcatgagcctgacaaagacggctccggactacctggtgggccagaacccgccggaggacatttccagcaaccgcatctaccgaatcctcgagatgaacgggtacgatccgcagtacgcggcctccgtcttcctgggctgggcgcaaaagaagttcgggaagaggaacaccatctggctctttgggccggccacgacgggtaaaaccaacatcgcggaagccatcgcccacgccgtgcccttctacggctgcgtgaactggaccaatgagaactttccgttcaacgattgcgtcgacaagatggtgatctggtgggaggagggcaagatgacggccaaggtcgtagagagcgccaaggccatcctgggcggaagcaaggtgcgcgtggaccaaaagtgcaagtcatcggcccagatcgacccaactcccgtgatcgtcacctccaacaccaacatgtgcgcggtcatcgacggaaactcgaccaccttcgagcaccaacaaccactccaggaccggatgttcaagttcgagctcaccaagcgcctggagcacgactttggcaaggtcaccaagcaggaagtcaaagactttttccggtgggcgtcagatcacgtgaccgaggtgactcacgagttttacgtcagaaagggtggagctagaaagaggcccgcccccaatgacgcagatataagtgagcccaagcgggcctgtccgtcagttgcgcagccatcgacgtcagacgcggaagctccggtggactacgcggacagattggctagaggacaacctctctga

SEQ ID NO: 57 - DNA, 1872 bp, Adeno-associated virus 4; identical to SEQ ID NO: 55

SEQ ID NO: 58 - DNA, 1617 bp, Adeno-associated virus 4
  modified_base (162)..(162): Unknown
atgcgtgcagcagctggcggagctgcagtcgagggsggacaaggtgccgatggagtgggtaatgcctcgggtgattggcattgcgattccacctggtctgagggccacgtcacgaccaccagcaccagaacctgggtcttgcccacctacaacaaccacctntacaagcgactcggagagagcctgcagtccaacacctacaacggattctccaccccctggggatactttgacttcaaccgcttccactgccacttctcaccacgtgactggcagcgactcatcaacaacaactggggcatgcgacccaaagccatgcgggtcaaaatcttcaacatccaggtcaaggaggtcacgacgtcgaacggcgagacaacggtggctaataaccttaccagcacggttcagatctttgcggactcgtcgtacgaactgccgtacgtgatggatgcgggtcaagagggcagcctgcctccttttcccaacgacgtctttatggtgccccagtacggctactgtggactggtgaccggcaacacttcgcagcaacagactgacagaaatgccttctactgcctggagtactttccttcgcagatgctgcggactggcaacaactttgaaattacgtacagttttgagaaggtgcctttccactcgatgtacgcgcacagccagagcctggaccggctgatgaaccctctcatcgaccagtacctgtggggactgcaatcgaccaccaccggaaccaccctgaatgccgggactgccaccaccaactttaccaagctgcggcctaccaacttttccaactttaaaaagaactggctgcccgggccttcaatcaagcagcagggcttctcaaagactgccaatcaaaactacaagatccctgccaccgggtcagacagtctcatcaaatacgagacgcacagcactctggacggaagatggagtgccctgacccccggacctccaatggccacggctggacctgcggacagcaagttcagcaacagccagctcatctttgcggggcctaaacagaacggcaacacggccaccgtacccgggactctgatcttcacctctgaggaggagctggcagccaccaacgccaccgatacggacatgtggggcaacctacctggcggtgaccagagcaacagcaacctgccgaccgtggacagactgacagccttgggagccgtgcctggaatggtctggcaaaacagagacatttactaccagggtcccatttgggccaagattcctcataccgatggacactttcacccctcaccgctgattggtgggtttgggctgaaacacccgcctcctcaaatttttatcaagaacaccccggtacctgcgaatcctgcaacgaccttcagctctactccggtaaactccttcattactcagtacagcactggccaggtgtcggtgcagattgactgggagatccagaaggagcggtccaaacgctggaaccccgaggtccagtttacctccaactacggacagcaaaactctctgttgtgggctcccgatgcggctgggaaatacactgagcctagggctatcggtacccgctacctcacccaccacctgtaa

SEQ ID NO: 59 - DNA, 939 bp, Adeno-associated virus 4
atggagctggtcgggtggctggtggaccgcgggatcacgtcagaaaagcaatggatccaggaggaccaggcgtcctacatctccttcaacgccgcctccaactcgcggtcacaaatcaaggccgcgctggacaatgcctccaaaatcatgagcctgacaaagacggctccggactacctggtgggccagaacccgccggaggacatttccagcaaccgcatctaccgaatcctcgagatgaacgggtacgatccgcagtacgcggcctccgtcttcctgggctgggcgcaaaagaagttcgggaagaggaacaccatctggctctttgggccggccacgacgggtaaaaccaacatcgcggaagccatcgcccacgccgtgcccttctacggctgcgtgaactggaccaatgagaactttccgttcaacgattgcgtcgacaagatggtgatctggtgggaggagggcaagatgacggccaaggtcgtagagagcgccaaggccatcctgggcggaagcaaggtgcgcgtggaccaaaagtgcaagtcatcggcccagatcgacccaactcccgtgatcgtcacctccaacaccaacatgtgcgcggtcatcgacggaaactcgaccaccttcgagcaccaacaaccactccaggaccggatgttcaagttcgagctcaccaagcgcctggagcacgactttggcaaggtcaccaagcaggaagtcaaagactttttccggtgggcgtcagatcacgtgaccgaggtgactcacgagttttacgtcagaaagggtggagctagaaagaggcccgcccccaatgacgcagatataagtgagcccaagcgggcctgtccgtcagttgcgcagccatcgacgtcagacgcggaagctccggtggactacgcggacagattggctagaggacaacctctctga

SEQ ID NO: 60 - DNA, 1197 bp, Adeno-associated virus 4
atggagctggtcgggtggctggtggaccgcgggatcacgtcagaaaagcaatggatccaggaggaccaggcgtcctacatctccttcaacgccgcctccaactcgcggtcacaaatcaaggccgcgctggacaatgcctccaaaatcatgagcctgacaaagacggctccggactacctggtgggccagaacccgccggaggacatttccagcaaccgcatctaccgaatcctcgagatgaacgggtacgatccgcagtacgcggcctccgtcttcctgggctgggcgcaaaagaagttcgggaagaggaacaccatctggctctttgggccggccacgacgggtaaaaccaacatcgcggaagccatcgcccacgccgtgcccttctacggctgcgtgaactggaccaatgagaactttccgttcaacgattgcgtcgacaagatggtgatctggtgggaggagggcaagatgacggccaaggtcgtagagagcgccaaggccatcctgggcggaagcaaggtgcgcgtggaccaaaagtgcaagtcatcggcccagatcgacccaactcccgtgatcgtcacctccaacaccaacatgtgcgcggtcatcgacggaaactcgaccaccttcgagcaccaacaaccactccaggaccggatgttcaagttcgagctcaccaagcgcctggagcacgactttggcaaggtcaccaagcaggaagtcaaagactttttccggtgggcgtcagatcacgtgaccgaggtgactcacgagttttacgtcagaaagggtggagctagaaagaggcccgcccccaatgacgcagatataagtgagcccaagcgggcctgtccgtcagttgcgcagccatcgacgtcagacgcggaagctccggtggactacgcggacaggtaccaaaacaaatgttctcgtcacgtgggtatgaatctgatgctttttccctgccggcaatgcgagagaatgaatcagaatgtggacatttgcttcacgcacggggtcatggactgtgccgagtgcttccccgtgtcagaatctcaacccgtgtctgtcgtcagaaagcggacgtatcagaaactgtgtccgattcatcacatcatggggagggcgcccgaggtggcctgctcggcctgcgaactggccaatgtggacttggatgactgtgacatggaacaa

SEQ ID NO: 61 - DNA, 245 bp, Adeno-associated virus 4
ctccatcatctaggtttgcccactgacgtcaatgtgacgtcctagggttagggaggtccctgtattagcagtcacgtgagtgtcgtatttcgcggagcgtagcggagcgcataccaagctgccacgtcacagccacgtggtccgtttgcgacagtttgcgacaccatgtggtcaggagggtatataaccgcgagtgagccagcgaggagctccattttgcccgcgaattttgaacgagcagcagc

SEQ ID NO: 62 - protein, 313 aa, Adeno-associated virus 4
  MOD_RES (313)..(313): Unknown
MELVGWLVDRGITSEKQWIQEDQASYISFNAASNSRSQIKAALDNASKIMSLTKTAPDYLVGQNPPEDISSNRIYRILEMNGYDPQYAASVFLGWAQKKFGKRNTIWLFGPATTGKTNIAEAIAHAVPFYGCVNWTNENFPFNDCVDKMVIWWEEGKMTAKVVESAKAILGGSKVRVDQKCKSSAQIDPTPVIVTSNTNMCAVIDGNSTTFEHQQPLQDRMFKFELTKRLEHDFGKVTKQEVKDFFRWASDHVTEVTHEFYVRKGGARKRPAPNDADISEPKRACPSVAQPSTSDAEAPVDYADRLARGQPLX

SEQ ID NO: 63 - protein, 399 aa, Adeno-associated virus 4
MELVGWLVDRGITSEKQWIQEDQASYISFNAASNSRSQIKAALDNASKIMSLTKTAPDYLVGQNPPEDISSNRIYRILEMNGYDPQYAASVFLGWAQKKFGKRNTIWLFGPATTGKTNIAEAIAHAVPFYGCVNWTNENFPFNDCVDKMVIWWEEGKMTAKVVESAKAILGGSKVRVDQKCKSSAQIDPTPVIVTSNTNMCAVIDGNSTTFEHQQPLQDRMFKFELTKRLEHDFGKVTKQEVKDFFRWASDHVTEVTHEFYVRKGGARKRPAPNDADISEPKRACPSVAQPSTSDAEAPVDYADRYQNKCSRHVGMNLMLFPCRQCERMNQNVDICFTHGVMDCAECFPVSESQPVSVVRKRTYQKLCPIHHIMGRAPEVACSACELANVDLDDCDMEQ

SEQ ID NO: 64 - protein, 623 aa, Adeno-associated virus 4
MPGFYEIVLKVPSDLDEHLPGISDSFVSWVAEKEWELPPDSDMDLNLIEQAPLTVAEKLQREFLVEWRRVSKAPEALFFVQFEKGDSYFHLHILVETVGVKSMVVGRYVSQIKEKLVTRIYRGVEPQLPNWFAVTKTRNGAGGGNKVVDDCYIPNYLLPKTQPELQWAWTNMDQYISACLNLAERKRLVAQHLTHVSQTQEQNKENQNPNSDAPVIRSKTSARYMELVGWLVDRGITSEKQWIQEDQASYISFNAASNSRSQIKAALDNASKIMSLTKTAPDYLVGQNPPEDISSNRIYRILEMNGYDPQYAASVFLGWAQKKFGKRNTIWLFGPATTGKTNIAEAIAHAVPFYGCVNWTNENFPFNDCVDKMVIWWEEGKMTAKVVESAKAILGGSKVRVDQKCKSSAQIDPTPVIVTSNTNMCAVIDGNSTTFEHQQPLQDRMFKFELTKRLEHDFGKVTKQEVKDFFRWASDHVTEVTHEFYVRKGGARKRPAPNDADISEPKRACPSVAQPSTSDAEAPVDYADRYQNKCSRHVGMNLMLFPCRQCERMNQNVDICFTHGVMDCAECFPVSESQPVSVVRKRTYQKLCPIHHIMGRAPEVACSACELANVDLDDCDMEQ

SEQ ID NO: 65 - protein, 537 aa, Adeno-associated virus 4
  MOD_RES (537)..(537): Unknown
MPGFYEIVLKVPSDLDEHLPGISDSFVSWVAEKEWELPPDSDMDLNLIEQAPLTVAEKLQREFLVEWRRVSKAPEALFFVQFEKGDSYFHLHILVETVGVKSMVVGRYVSQIKEKLVTRIYRGVEPQLPNWFAVTKTRNGAGGGNKVVDDCYIPNYLLPKTQPELQWAWTNMDQYISACLNLAERKRLVAQHLTHVSQTQEQNKENQNPNSDAPVIRSKTSARYMELVGWLVDRGITSEKQWIQEDQASYISFNAASNSRSQIKAALDNASKIMSLTKTAPDYLVGQNPPEDISSNRIYRILEMNGYDPQYAASVFLGWAQKKFGKRNTIWLFGPATTGKTNIAEAIAHAVPFYGCVNWTNENFPFNDCVDKMVIWWEEGKMTAKVVESAKAILGGSKVRVDQKCKSSAQIDPTPVIVTSNTNMCAVIDGNSTTFEHQQPLQDRMFKFELTKRLEHDFGKVTKQEVKDFFRWASDHVTEVTHEFYVRKGGARKRPAPNDADISEPKRACPSVAQPSTSDAEAPVDYADRLARGQPLX

SEQ ID NO: 66 - protein, 623 aa, Adeno-associated virus 4; identical to SEQ ID NO: 64

SEQ ID NO: 67 - protein, 544 aa, Adeno-associated virus 4
MSDDSEMRAAAGGAAVEGGQGADGVGNASGDWHCDSTWSEGHVTTTSTRTWVLPTYNNHLYKRLGESLQSNTYNGFSTPWGYFDFNRFHCHFSPRDWQRLINNNWGMRPKAMRVKIFNIQVKEVTTSNGETTVANNLTSTVQIFADSSYELPYVMDAGQEGSLPPFPNDVFMVPQYGYCGLVTGNTSQQQTDRNAFYCLEYFPSQMLRTGNNFEITYSFEKVPFHSMYAHSQSLDRLMNPLIDQYLWGLQSTTTGTTLNAGTATTNFTKLRPTNFSNFKKNWLPGPSIKQQGFSKTANQNYKIPATGSDSLIKYETHSTLDGRWSALTPGPPMATAGPADSKFSNSQLIFAGPKQNGNTATVPGTLIFTSEEELAATNATDTDMWGNLPGGDQSNSNLPTVDRLTALGAVPGMVWQNRDIYYQGPIWAKIPHTDGHFHPSPLIGGFGLKHPPPQIFIKNTPVPANPATTFSSTPVNSFITQYSTGQVSVQIDWEIQKERSKRWNPEVQFTSNYGQQNSLLWAPDAAGKYTEPRAIGTRYLTHHL

SEQ ID NO: 68 - protein, 734 aa, Adeno-associated virus 4
MTDGYLPDWLEDNLSEGVREWWALQPGAPKPKANQQHQDNARGLVLPGYKYLGPGNGLDKGEPVNAADAAALEHDKAYDQQLKAGDNPYLKYNHADAEFQQRLQGDTSFGGNLGRAVFQAKKRVLEPLGLVEQAGETAPGKKRPLIESPQQPDSSTGIGKKGKQPAKKKLVFEDETGAGDGPPEGSTSGAMSDDSEMRAAAGGAAVEGGQGADGVGNASGDWHCDSTWSEGHVTTTSTRTWVLPTYNNHLYKRLGESLQSNTYNGFSTPWGYFDFNRFHCHFSPRDWQRLINNNWGMRPKAMRVKIFNIQVKEVTTSNGETTVANNLTSTVQIFADSSYELPYVMDAGQEGSLPPFPNDVFMVPQYGYCGLVTGNTSQQQTDRNAFYCLEYFPSQMLRTGNNFEITYSFEKVPFHSMYAHSQSLDRLMNPLIDQYLWGLQSTTTGTTLNAGTATTNFTKLRPTNFSNFKKNWLPGPSIKQQGFSKTANQNYKIPATGSDSLIKYETHSTLDGRWSALTPGPPMATAGPADSKFSNSQLIFAGPKQNGNTATVPGTLIFTSEEELAATNATDTDMWGNLPGGDQSNSNLPTVDRLTALGAVPGMVWQNRDIYYQGPIWAKIPHTDGHFHPSPLIGGFGLKHPPPQIFIKNTPVPANPATTFSSTPVNSFITQYSTGQVSVQIDWEIQKERSKRWNPEVQFTSNYGQQNSLLWAPDAAGKYTEPRAIGTRYLTHHL

SEQ ID NO: 69 - protein, 598 aa, Adeno-associated virus 4
TAPGKKRPLIESPQQPDSSTGIGKKGKQPAKKKLVFEDETGAGDGPPEGSTSGAMSDDSEMRAAAGGAAVEGGQGADGVGNASGDWHCDSTWSEGHVTTTSTRTWVLPTYNNHLYKRLGESLQSNTYNGFSTPWGYFDFNRFHCHFSPRDWQRLINNNWGMRPKAMRVKIFNIQVKEVTTSNGETTVANNLTSTVQIFADSSYELPYVMDAGQEGSLPPFPNDVFMVPQYGYCGLVTGNTSQQQTDRNAFYCLEYFPSQMLRTGNNFEITYSFEKVPFHSMYAHSQSLDRLMNPLIDQYLWGLQSTTTGTTLNAGTATTNFTKLRPTNFSNFKKNWLPGPSIKQQGFSKTANQNYKIPATGSDSLIKYETHSTLDGRWSALTPGPPMATAGPADSKFSNSQLIFAGPKQNGNTATVPGTLIFTSEEELAATNATDTDMWGNLPGGDQSNSNLPTVDRLTALGAVPGMVWQNRDIYYQGPIWAKIPHTDGHFHPSPLIGGFGLKHPPPQIFIKNTPVPANPATTFSSTPVNSFITQYSTGQVSVQIDWEIQKERSKRWNPEVQFTSNYGQQNSLLWAPDAAGKYTEPRAIGTRYLTHHL

SEQ ID NO: 70 - DNA, 129 bp, Adeno-associated virus 4
ttggccactccctctatgcgcgctcgctcactcactcggccctgcggccagaggccggcagtctggagacctttggtgtccagggcagggccgagtgagtgagcgagcgcgcatagagggagtggccaa

SEQ ID NO: 71 - DNA, 125 bp, Adeno-associated virus 4
ttggccactccctctatgcgcgctcgctcactcactcggccctggagaccaaaggtctccagactgccggcctctggccggcagggccgagtgagtgagcgagcgcgcatagagggagtggccaa

SEQ ID NO: 72 - DNA, 4768 bp, Adeno-associated virus 4
  modified_base (3009)..(3009): Unknown
ttggccactccctctatgcgcgctcgctcactcactcggccctggagaccaaaggtctccagactgccggcctctggccggcagggccgagtgagtgagcgagcgcgcatagagggagtggccaactccatcatctaggtttgcccactgacgtcaatgtgacgtcctagggttagggaggtccctgtattagcagtcacgtgagtgtcgtatttcgcggagcgtagcggagcgcataccaagctgccacgtcacagccacgtggtccgtttgcgacagtttgcgacaccatgtggtcaggagggtatataaccgcgagtgagccagcgaggagctccattttgcccgcgaattttgaacgagcagcagccatgccggggttctacgagatcgtgctgaaggtgcccagcgacctggacgagcacctgcccggcatttctgactcttttgtgagctgggtggccgagaaggaatgggagctgccgccggattctgacatggacttgaatctgattgagcaggcacccctgaccgtggccgaaaagctgcaacgcgagttcctggtcgagtggcgccgcgtgagtaaggccccggaggccctcttctttgtccagttcgagaagggggacagctacttccacctgcacatcctggtggagaccgtgggcgtcaaatccatggtggtgggccgctacgtgagccagattaaagagaagctggtgacccgcatctaccgcggggtcgagccgcagcttccgaactggttcgcggtgaccaagacgcgtaatggcgccggaggcgggaacaaggtggtggacgactgctacatccccaactacctgctccccaagacccagcccgagctccagtgggcgtggactaacatggaccagtatataagcgcctgtttgaatctcgcggagcgtaaacggctggtggcgcagcatctgacgcacgtgtcgcagacgcaggagcagaacaaggaaaaccagaaccccaattctgacgcgccggtcatcaggtcaaaaacctccgccaggtacatggagctggtcgggtggctggtggaccgcgggatcacgtcagaaaagcaatggatccaggaggaccaggcgtcctacatctccttcaacgccgcctccaactcgcggtcacaaatcaaggccgcgctggacaatgcctccaaaatcatgagcctgacaaagacggctccggactacctggtgggccagaacccgccggaggacatttccagcaaccgcatctaccgaatcctcgagatgaacgggtacgatccgcagtacgcggcctccgtcttcctgggctgggcgcaaaagaagttcgggaagaggaacaccatctggctctttgggccggccacgacgggtaaaaccaacatcgcggaagccatcgcccacgccgtgcccttctacggctgcgtgaactggaccaatgagaactttccgttcaacgattgcgtcgacaagatggtgatctggtgggaggagggcaagatgacggccaaggtcgtagagagcgccaaggccatcctgggcggaagcaaggtgcgcgtggaccaaaagtgcaagtcatcggcccagatcgacccaactcccgtgatcgtcacctccaacaccaacatgtgcgcggtcatcgacggaaactcgaccaccttcgagcaccaacaaccactccaggaccggatgttcaagttcgagctcaccaagcgcctggagcacgactttggcaaggtcaccaagcaggaagtcaaagactttttccggtgggcgtcagatcacgtgaccgaggtgactcacgagttttacgtcagaaagggtggagctagaaagaggcccgcccccaatgacgcagatataagtgagcccaagcgggcctgtccgtcagttgcgcagccatcgacgtcagacgcggaagctccggtggactacgcggacaggtaccaaaacaaatgttctcgtcacgtgggtatgaatctgatgctttttccctgccggcaatgcgagagaatgaatcagaatgtggacatttgcttcacgcacggggtcatggactgtgccgagtgcttccccgtgtcagaatctcaacccgtgtctgtcgtcagaaagcggacgtatcagaaactgtgtccgattcatcacatcatggggagggcgcccgaggtggcctgctcggcctgcgaactggccaatgtggacttggatgactgtgacatggaacaataaatgactcaaaccagatatgactgacggttaccttccagattggctagaggacaacctctctgaaggcgttcgagagtggtgggcgctgcaacctggagcccctaaacccaaggcaaatcaacaacatcaggacaacgctcggggtcttgtgcttccgggttacaaatacctcggacccggcaacggactcgacaagggggaacccgtcaacgcagcggacgcggcagccctcgagcacgacaaggcctacgaccagcagctcaaggccggtgacaacccctacctcaagtacaaccacgccgacgcggagttccagcagcggcttcagggcgacacaccgtttgggggcaacctcggcagagcagtcttccaggccaaaaagagggttcttgaacctcttggtctggttgagcaagcgggtgagacggctcctggaaagaagagaccgttgattgaatccccccagcagcccgactcctccacgggtatcggcaaaaaaggcaagcagccggctaaaaagaagctcgttttcgaagacgaaactggagcaggcgacggaccccctgagggatcaacttccggagccatgtctgatgacagtgagatgcgtgcagcagctggcggagctgcagtcgagggsggacaaggtgccgatggagtgggtaatgcctcgggtgattggcattgcgattccacctggtctgagggccacgtcacgaccaccagcaccagaacctgggtcttgcccacctacaacaaccacctntacaagcgactcggagagagcctgcagtccaacacctacaacggattctccaccccctggggatactttgacttcaaccgcttccactgccacttctcaccacgtgactggcagcgactcatcaacaacaactggggcatgcgacccaaagccatgcgggtcaaaatcttcaacatccaggtcaaggaggtcacgacgtcgaacggcgagacaacggtggctaataaccttaccagcacggttcagatctttgcggactcgtcgtacgaactgccgtacgtgatggatgcgggtcaagagggcagcctgcctccttttcccaacgacgtctttatggtgccccagtacggctactgtggactggtgaccggcaacacttcgcagcaacagactgacagaaatgccttctactgcctggagtactttccttcgcagatgctgcggactggcaacaactttgaaattacgtacagttttgagaaggtgcctttccactcgatgtacgcgcacagccagagcctggaccggctgatgaaccctctcatcgaccagtacctgtggggactgcaatcgaccaccaccggaaccaccctgaatgccgggactgccaccaccaactttaccaagctgcggcctaccaacttttccaactttaaaaagaactggctgcccgggccttcaatcaagcagcagggcttctcaaagactgccaatcaaaactacaagatccctgccaccgggtcagacagtctcatcaaatacgagacgcacagcactctggacggaagatggagtgccctgacccccggacctccaatggccacggctggacctgcggacagcaagttcagcaacagccagctcatctttgcggggcctaaacagaacggcaacacggccaccgtacccgggactctgatcttcacctctgaggaggagctggcagccaccaacgccaccgatacggacatgtggggcaacctacctggcggtgaccagagcaacagcaacctgccgaccgtggacagactgacagccttgggagccgtgcctggaatggtctggcaaaacagagacatttactaccagggtcccatttgggccaagattcctcataccgatggacactttcacccctcaccgctgattggtgggtttgggctgaaacacccgcctcctcaaatttttatcaagaacaccccggtacctgcgaatcctgcaacgaccttcagctctactccggtaaactccttcattactcagtacagcactggccaggtgtcggtgcagattgactgggagatccagaaggagcggtccaaacgctggaaccccgaggtccagtttacctccaactacggacagcaaaactctctgttgtgggctcccgatgcggctgggaaatacactgagcctagggctatcggtacccgctacctcacccaccacctgtaataacctgttaatcaataaaccggtttattcgtttcagttgaactttggtctccgtgtccttcttatcttatctcgtttccatggctactgcgtacataagcagcggcctgcggcgcttgcgcttcgcggtttacaactgccggttaatcagtaacttctggcaaaccatgatgatggagttggccactccctctatgcgcgctcgctcactcactcggccctggagaccaaaggtctccagactgccggcctctggccggcagggccgagtgagtgagcgagcgcgcatagagggagtggccaa

SEQ ID NO: 73 - DNA, 3098 bp, Artificial Sequence
  source: /note="Description of Artificial Sequence: Synthetic polynucleotide"
gaattcgccctttctacggctgcgtcaactggaccaatgagaactttcccttcaacgattgcgtcgacaagatggtgatctggtgggaggagggcaagatgacggccaaggtcgtggagtccgccaaggccattctcggcggcagcaaggtgcgcgtggaccaaaagtgcaagtcttccgcccagatcgatcccacccccgtgatcgtcacttccaacaccaacatgtgcgctgtgattgacgggaacagcaccaccttcgagcaccagcagccgttacaagaccggatgttcaaatttgaactcacccgccgtctggagcacgactttggcaaggtgacaaagcaggaagtcaaagagttcttccgctgggcgcaggatcacgtgaccgaggtggcgcatgagttctacgtcagaaagggtggagccaacaagagacccgcccccgatgacgcggataaaagcgagcccaagcgggcctgcccctcagtcgcggatccatcgacgtcagacgcggaaggagctccggtggactttgccgacaggtaccaaaacaaatgttctcgtcacgcgggcatgcttcagatgctgtttccctgcaagacatgcgagagaatgaatcagaatttcaacatttgcttcacgcacgggaccagagactgttcagaatgtttccccggcgtgtcagaatctcaaccggtcgtcagaaagaggacgtatcggaaactctgtgccattcatcatctgctggggcgggctcccgagattgcttgctcggcctgcgatctggtcaacgtggacctggatgaccgtgtttctgagcaataaatgacttaaaccaggtatggctgccgatggttatcttccagattggctcgaggacaacctctctgagggcattcgcgagtggtgggacttgaaacctggagccccgaaacccaaagccaaccagcaaaagcaggacgacggccggggtctggtgcttcctggctacaagtacctcggacccttcaacggactcgacaagggagagccggtcaacgaggcagacgccgcggccctcgagcacgacaaggcctacgacaagcagctcgagcagggggacaacccgtacctcaagtacaaccacgccgacgccgagtttcaggagcgtcttcaagaagatacgtcttttgggggcaacctcgggcgagcagtcttccaggccaagaagcgggttctcgaacctctcggtctggttgaggaaggcgctaagacggctcctggaaagaagagacccatagaatcccccgactcctccacgggcatcggcaagaaaggccagcagcccgctaaaaagaagctcaactttgggcagactggcgactcagagtcagtgcccgacccccaacctctcggagaacctcccgccgcgccctcaggtctgggatctggtacaatggctgcaggcggtggcgcaccaatggcagacaataacgaaggcgccgacggagtgggtaatgcctccggaaattggcattgcgattccacatggctgggcgacagagtcatcaccaccagcacccgcacctgggccctgcccacctacaacaaccacctctacaagcagatatcaagtcagagcggggctaccaacgacaaccacttcttcggctacagcaccccctggggctattttgacttcaacagattccactgccacttctcaccacgtgactggcagcgactcatcaacaacaactggggattccggcccagaaagctgcggttcaagttgttcaacatccaggtcaaggaggtcacgacgaacgacggcgttacgaccatcgctaataaccttaccagcacgattcaggtcttctcggactcggagtaccaactgccgtacgtcctcggctctgcgcaccagggctgcctccctccgttccctgcggacgtgttcatgattcctcagtacggatatctgactctaaacaacggcagtcagtctgtgggacgttcctccttctactgcctggagtactttccttctcagatgctgagaacgggcaataactttgaattcagctacacctttgaggaagtgcctttccacagcagctatgcgcacagccagagcctggaccggctgatgaatcccctcatcgaccagtacctgtactacctggcccggacccagagcactacggggtccacaagggagctgcagttccatcaggctgggcccaacaccatggccgagcaatcaaagaactggctgcccggaccctgttatcggcagcagagactgtcaaaaaacatagacagcaacaacaacagtaactttgcctggaccggggccactaaataccatctgaatggtagaaattcattaaccaacccgggcgtagccatggccaccaacaaggacgacgaggaccagttctttcccatcaacggagtgctggtttttggcgaaacgggggctgccaacaagacaacgctggaaaacgtgctaatgaccagcgaggaggagatcaaaaccaccaatcccgtggctacagaagaatacggtgtggtctccagcaacctgcaatcgtctacggccggaccccagacacagactgtcaacagccagggggctctgcccggcatggtctggcagaaccgggacgtgtacctgcagggtcccatctgggccaaaattcctcacacggacggcaactttcacccgtctcccctgatgggcggatttggactcaaacacccgcctcctcaaattctcatcaaaaacaccccggtacctgctaatcctccagaggtgtttactcctgccaagtttgcctcatttatcacgcagtacagcaccggccaggtcagcgtggagatcgagtgggaactgcagaaagaaaacagcaaacgctggaatccagagattcagtacacctcaaattatgccaagtctaataatgtggaatttgctgtcaacaacgaaggggtttatactgagcctcgccccattggcacccgttacctcacccgtaacctgtaattgcctgttaatcaataaaccggttaattcgtttcagttgaactttggtctctgcgaagggcgaattc

SEQ ID NO: 74 - protein, 728 aa, Artificial Sequence
  source: /note="Description of Artificial Sequence: Synthetic polypeptide"
MAADGYLPDWLEDNLSEGIREWWDLKPGAPKPKANQQKQDDGRGLVLPGYKYLGPFNGLDKGEPVNEADAAALEHDKAYDKQLEQGDNPYLKYNHADAEFQERLQEDTSFGGNLGRAVFQAKKRVLEPLGLVEEGAKTAPGKKRPIESPDSSTGIGKKGQQPAKKKLNFGQTGDSESVPDPQPLGEPPAAPSGLGSGTMAAGGGAPMADNNEGADGVGNASGNWHCDSTWLGDRVITTSTRTWALPTYNNHLYKQISSQSGATNDNHFFGYSTPWGYFDFNRFHCHFSPRDWQRLINNNWGFRPRKLRFKLFNIQVKEVTTNDGVTTIANNLTSTIQVFSDSEYQLPYVLGSAHQGCLPPFPADVFMIPQYGYLTLNNGSQSVGRSSFYCLEYFPSQMLRTGNNFEFSYTFEEVPFHSSYAHSQSLDRLMNPLIDQYLYYLARTQSTTGSTRELQFHQAGPNTMAEQSKNWLPGPCYRQQRLSKNIDSNNNSNFAWTGATKYHLNGRNSLTNPGVAMATNKDDEDQFFPINGVLVFGETGAANKTTLENVLMTSEEEIKTTNPVATEEYGVVSSNLQSSTAGPQTQTVNSQGALPGMVWQNRDVYLQGPIWAKIPHTDGNFHPSPLMGGFGLKHPPPQILIKNTPVPANPPEVFTPAKFASFITQYSTGQVSVEIEWELQKENSKRWNPEIQYTSNYAKSNNVEFAVNNEGVYTEPRPIGTRYLTRNL

SEQ ID NO: 75 - DNA, 2495 bp, Artificial Sequence
  source: /note="Description of Artificial Sequence: Synthetic polynucleotide"
gaattcgccctttctacggctgcgtcaactagaccaatgagaactttcccttcaacgattgcgtcgacaagatggtgatctggtgggaggagggcaagatgacggccaaggtcgtggagtccgccaaggccattcatcatctgctggggcgggctcccgagattgcttgctcggcctgcgatctggtcaacgtggacctggatgactgtgtttctgagcaataaatgacttaaaccaggtatggctgccgatggttatcttccagattggctcgaggacaacctctctgagggcattcgcgagtggtgggacttgaaacctggagccccgaaacccaaagccaaccagcaaaagcaggacgacggccggggtctggtgcttcctggctacaagtacctcggacccttcaacggactcgacaagggagagccggtcaacgaggcagacgccgcggccctcgagcacgacaaggcctacgacaagcagctcgagcagggggacaacccgtacctcaagtacaaccacgccgacgccgagtttcaggagcgtcttcaagaagatacgtcttttgggggcaacctcgggcgagcagtcttccaggccaagaagcgggttctcgaacctctcggtctggttgaggaaggcgctaagacggctcctggaaagaagagacccatagaatcccccgactcctccacgggcatcggcaagaaaggccagcagcccgctaaaaagaagctcaactttgggcagactggcgactcagagtcagtgcccgaccctcaaccaatcggagaaccccccgcaggcccctctggtctgggatctggtacaatggctgcaggcggtggcgctccaatggcagacaataacgaaggcgccgacggagtgggtaatgcctccggaaattggcattgcgattccacatggctgggcgacagagtcatcaccaccagcacccgcacctgggccctgcccacctacaacaaccacctctacaagcagatatcaagtcagagcggggctaccaacgacaaccacttcttcggctacagcaccccctggggctattttgacttcaacagattccactgccacttctcaccacgtgactggcagcgactcatcaacaacaactggggattccggcccagaaagctgcggttcaagttgttcaacatccaggtcaaggaggtcacgacgaacgacggcgttacgaccatcgctaataaccttaccagcacgattcaggtcttctcggactcggagtaccaactgccgtacgtcctcggctctgcgcaccagggctgcctccctccgttccctgcggacgtgttcatgattcctcagtacggatatctgactctaaacaacggcagtcagtctgtgggacgttcctccttctactgcctggagtactttccttctcagatgctgagaacgggcaataactttgaattcagctacacctttgaggaagtgcctttccacagcagctatgcgcacagccagagcctggaccggctgatgaatcccctcatcgaccagtacctgtactacctggcccggacccagagcactacggggtccacaagggagctgcagttccatcaggctgggcccaacaccatggccgagcaatcaaagaactggctgcccggaccctgttatcggcagcagagactgtcaaaaaacatagacagcaacaacaccagtaactttgcctggaccggggccactaaataccatctgaatggtagaaattcattaaccaacccgggcgtagccatggccaccaacaaggacgacgaggaccagttctttcccatcaacggagtgctggtttttggcaaaacgggggctgccaacaagacaacgctggaaaacgtgctaatgaccagcgaggaggagatcaaaaccaccaatcccgtggctacagaacagtacggtgtggtctccagcaacctgcaatcgtctacggccggaccccagacacagactgtcaacagccagggggctctgcccggcatggtctggcagaaccgggacgtgtacctgcagggtcccatctgggccaaaattcctcacacggacggcaactttcacccgtctcccctgatgggcggatttggactcaaacacccgcctcctcaaattctcatcaaaaacaccccggtacctgctaatcctccagaggtgtttactcctgccaagtttgcctcatttatcacgcagtacagcaccggccaggtcagcgtggagatcgagtgggaactgcagaaagaaaacagcaaacgctggaatccagagattcagtacacctcaaattatgccaagtctaataatgtggaatttgctgtcaacaacgaaggggtttatactgagcctcgccccattggcacccgttacctcacccgtaacctgtaattgcctgttaatcaataaaccggttaattcgtttcagttgaactttggtctctgcgaagggcgaattc

SEQ ID NO: 76 - protein, 728 aa, Artificial Sequence
  source: /note="Description of Artificial Sequence: Synthetic polypeptide"
MAADGYLPDWLEDNLSEGIREWWDLKPGAPKPKANQQKQDDGRGLVLPGYKYLGPFNGLDKGEPVNEADAAALEHDKAYDKQLEQGDNPYLKYNHADAEFQERLQEDTSFGGNLGRAVFQAKKRVLEPLGLVEEGAKTAPGKKRPIESPDSSTGIGKKGQQPAKKKLNFGQTGDSESVPDPQPIGEPPAGPSGLGSGTMAAGGGAPMADNNEGADGVGNASGNWHCDSTWLGDRVITTSTRTWALPTYNNHLYKQISSQSGATNDNHFFGYSTPWGYFDFNRFHCHFSPRDWQRLINNNWGFRPRKLRFKLFNIQVKEVTTNDGVTTIANNLTSTIQVFSDSEYQLPYVLGSAHQGCLPPFPADVFMIPQYGYLTLNNGSQSVGRSSFYCLEYFPSQMLRTGNNFEFSYTFEEVPFHSSYAHSQSLDRLMNPLIDQYLYYLARTQSTTGSTRELQFHQAGPNTMAEQSKNWLPGPCYRQQRLSKNIDSNNTSNFAWTGATKYHLNGRNSLTNPGVAMATNKDDEDQFFPINGVLVFGKTGAANKTTLENVLMTSEEEIKTTNPVATEQYGVVSSNLQSSTAGPQTQTVNSQGALPGMVWQNRDVYLQGPIWAKIPHTDGNFHPSPLMGGFGLKHPPPQILIKNTPVPANPPEVFTPAKFASFITQYSTGQVSVEIEWELQKENSKRWNPEIQYTSNYAKSNNVEFAVNNEGVYTEPRPIGTRYLTRNL

SEQ ID NO: 77 - DNA, 2504 bp, Artificial Sequence
  source: /note="Description of Artificial Sequence: Synthetic polynucleotide"
gaattcgccctttctacggctgcgtcaactggaccaatgagaactttcccttcaacgattgcgtcgacaagatggtgatctggtgggaggagggcaagatgacggccaaggtcgtggagtccgccaaggccattcatcatctgctggggcgggctcccgagattgcttgctcggcctgcgatctggtcaacgtggacctggatgactgtgtttctgagcaataaatgacttaaaccaggtatggctgccgatggttatcttccagattggctcgaggacaacctctctgagggcattcgcgagtggtgggacttgaaacctggagccccgaaacccaaagccaaccagcaaaagcaggacgacggccggggtctggtgcttcctggctacaagtacctcggacccttcaacggactcgacaagggagagccggtcaacgaggcagacgccgcggccctcgagcacgacaaggcctacgacaagcagctcgagcagggggacaacccgtacctcaagtacaaccacgccgacgccgagtttcaggagcgtcttcaagaagatacgtcttttgggggcaacctcgggcgagcagtcttccaggccaagaagcgggttctcgaacctctcggtctggttgaggaaggcgctaagacggctcctggaaagaagagacccatagaatcccccgactcctccacgggcatcggcaagaaaggccagcagcccgctaaaaagaagctcaactttgggcagactggcgactcagagtcagtgcccgaccctcaaccaatcggagaaccccccgcaggcccctctggtctgggatctggtacaatggctgcaggcggtggcgctccaatggcagacaataacgaaggcgccgacggagtgggtaatgcctccggaaattggcattgcgattccacatggctgggcgacagagtcatcaccaccagcacccgcacctgggccctgcccacctacaacaaccacctctacaagcagatatcaagtcagagcggggctaccaacgacaaccacttcttcggctacagcaccccctggggctattttgacttcaacagattccactgccacttctcatcacgtgactggcagcgactcatcaacaacaactggggattccggcccaagagactcaacttcaagctcttcaacatccaggtcaaggaggtcacgcagaatgaaggcaccaagaccatcgccaataaccttaccagcacgattcaggtctttacggactcggaataccggctcccgtacgtcctcggctctgcgcaccagggctgcctgcctccgttcccggcggacgtcttcatgattcctcagtacgggtacctgactctgaacaacggcagtcaggccgtgggccgttcctccttctactgcctggagtactttccttctcaaatgctgagaacgggcaacaactttgagttcagctaccagtttgaggacgtgccttttcacagcagctacgcgcacagccaaagcctggaccggctgatgaaccccctcatcgaccagtacctgtactacctgtctcggactcagtccacgggaggtaccgcaggaactcagcagttgctattttctcaggccgggcctaataacatgtcggctcaggccaaaaactggctacccgggccctgctaccggcagcaacgcgtctccacgacactgtcgcaaaataacaacagcaactttgcttggaccggtgccaccaagtatcatctgaatggcagagactctctggtaaatcccggtgtcgctatggcaacgcacaaggacgacgaagagcgattttttccatccagcggagtcttgatgtttgggaaacagggagctggaaaagacaacgtggactatagcagcgttatgctaaccagtgaggaagaaatcaaaaccaccaacccagtggccacagaacagtacggcgtggtggccgataacctgcaacagcaaaacgccgctcctattgtaggggccgtcaacagtcaaggagccttacctggcatggtctggcagaaccgggacgtgtacctgcagggtcctatctgggccaagattcctcacacggacggcaactttcatccttcgccgctgatgggaggctttggactgaaacacccgcctcctcagatcctgattaagaatacacctgttcccgcggatcctccaactaccttcagtcaagccaagccggcgtcgttcatcacgcagtacagcaccggacaggtcagcgtggaaattgaatgggagctgcagaaagagaacagcaagcgctggaacccagagattcagtatacttccaactactacaaatctacaaatgtggactttgctgtcaatactgagggtacttattcagagcctcgccccattggcacccgttacctcacccgtaacctgtaattgcctgttaatcaataaaccggttaattcgtttcagttgaactttggtctctgcgaagggcgaattc

SEQ ID NO: 78 - protein, 731 aa, Artificial Sequence
  source: /note="Description of Artificial Sequence: Synthetic polypeptide"
MAADGYLPDWLEDNLSEGIREWWDLKPGAPKPKANQQKQDDGRGLVLPGYKYLGPFNGLDKGEPVNEADAAALEHDKAYDKQLEQGDNPYLKYNHADAEFQERLQEDTSFGGNLGRAVFQAKKRVLEPLGLVEEGAKTAPGKKRPIESPDSSTGIGKKGQQPAKKKLNFGQTGDSESVPDPQPIGEPPAGPSGLGSGTMAAGGGAPMADNNEGADGVGNASGNWHCDSTWLGDRVITTSTRTWALPTYNNHLYKQISSQSGATNDNHFFGYSTPWGYFDFNRFHCHFSSRDWQRLINNNWGFRPKRLNFKLFNIQVKEVTQNEGTKTIANNLTSTIQVFTDSEYRLPYVLGSAHQGCLPPFPADVFMIPQYGYLTLNNGSQAVGRSSFYCLEYFPSQMLRTGNNFEFSYQFEDVPFHSSYAHSQSLDRLMNPLIDQYLYYLSRTQSTGGTAGTQQLLFSQAGPNNMSAQAKNWLPGPCYRQQRVSTTLSQNNNSNFAWTGATKYHLNGRDSLVNPGVAMATHKDDEERFFPSSGVLMFGKQGAGKDNVDYSSVMLTSEEEIKTTNPVATEQYGVVADNLQQQNAAPIVGAVNSQGALPGMVWQNRDVYLQGPIWAKIPHTDGNFHPSPLMGGFGLKHPPPQILIKNTPVPADPPTTFSQAKPASFITQYSTGQVSVEIEWELQKENSKRWNPEIQYTSNYYKSTNVDFAVNTEGTYSEPRPIGTRYLTRNL

SEQ ID NO: 79 - DNA, 3128 bp, Artificial Sequence
  source: /note="Description of Artificial Sequence: Synthetic polynucleotide"
gaattcgccctttctacggctgcgtcaactggaccaatgagaactttcccttcaacgattgcgtcgacaagatggtgatctggtgggaggagggcaagatgacggccaaggtcgtggagtccgccaaggccattctcggcggcagcaaggtgcgcgtggaccaaaagtgcaagtcttccgcccagatcgatcccacccccgtgatcgtcacttccaacaccaacatgtgcgccgtgattgacgggaacagcaccaccttcgagcaccagcagccgttacaagaccggatgttcaaatttgaactcacccgccgtctggagcacgactttggcaaggtgacaaagcaggaagtcaaagagttcttccgctgggcgcaggatcacgtgaccgaggtggcgcatgagttctacgtcagaaagggtggagccaacaagagacccgcccccgatgacgcggataaaagcgagcccaagcgggcctgcccctcagtcgcggatccatcgacgtcagacgcggaaggagctccggtggactttgccgacaggtaccaaaacaaatgttctcgtcacgcgggcatgcttcagatgctgtttccctgcaagacatgcgagagaatgaatcagaatttcaacatttgcttcacgcacgggaccagagactgttcagaatgtttccccggcgtgtcagaatctcaaccggtcgtcagaaagaggacgtatcggaaactctgtgccattcatcatctgctagggcgggctcccgagattgcttgctcggcctgcgatctggtcaacgtggacctggatgactgtgtttctgagcaataaatgacttaaaccaggtatggctgccgatggttatcttccagattggctcgaggacaacctctctgagggcattcgcgagtggtgggacttgaaacctggagccccgaaacccaaagccaaccagcaaaagcaggacgacggccggggtctggtgcttcctggctacaagtacctcggacccttcaacggactcgacaagggggagcccgtcaacgcggcggacgcagcggccctcgagcacgacaaggcctacgaccagcagctcaaagcgggtgacaatccgtacctgcggtataaccacgccgacgccgagtttcaggagcgtctgcaagaagatacgtcttttgggggcaacctcgggcgagcagtcttccaggccaagaagcgggttctcgaacctctcggtctggttgaggaaggcgctaagacggctcctggaaagaagagaccggtagagccatcaccccagcgttctccagactcctctacgggcatcggcaagacaggccagcagcccgcgaaaaagagactcaactttgggcagactggcgactcagagtcagtgcccgaccctcaaccaatcggagaaccccccgcaggcccctctggtctgggatctggtacaatggctgcaggcggtggcgctccaatggcagacaataacgaaggcgccgacggagtgggtagttcctcaggaaattggcattgcgattccacatggctgggcgacagagtcatcaccaccagcacccgaacctgggccctccccacctacaacaaccacctctacaagcaaatctccaacgggacatcgggaggaagcaccaacgacaacacctacttcggctacagcaccccctgggggtattttgactttaacagattccactgccacttctcaccacgtgactggcagcgactcatcaacaacaactggggattccggcccaagagactcaacttcaagctcttcaacatccaggtcaaggaggtcacgcagaatgaaggcaccaagaccatcgccaataaccttaccagcacgattcaggtctttacggactcggaataccagctcccgtacgtcctcggctctgcgcaccagggctgcctgcctccgttcccggcggacgtcttcatgattcctcagtacgggtacctgactctgaacaacggcagtcaggccgtgggccgttcctccttctactgcctggagtactttccttctcaaatgctgagaacgggcaacaactttgagttcagctaccagtttgaggacgtgccttttcacagcagctacgcgcacagccaaagcctggaccggctgatgaaccccctcatcgaccagtacctgtactacctgtctcggactcagtccacgggaggtaccgcaggaactcagcagttgctattttctcaggccgggcctaataacatgtcggctcaggccaaaaactggctacccgggccctgctaccggcagcaacgcgtctccacgacactgtcgcaaaataacaacagcaactttgcttggaccggtgccaccaagtatcatctgaatggcagagactctctggtaaatcccggtgtcgctatggcaacgcacaaggacgacgaagagcgattttttccatccagcggagtcttgatgtttgggaaacagggagctggaaaagacaacgtggactatagcagcgttatgctaaccagtgaggaagaaatcaaaaccaccaacccagtggccacagaacagtacggcgtggtggccgataacctgcaacagcaaaacgccgctcctattgtaggggccgtcaacagtcaaggagccttacctggcatggtctggcagaaccgggacgtgtacctgcagggtcctatctgggccaagattcctcacacggacggcaactttcatccttcgccgctgatgggaggctttggactgaaacacccgcctcctcagatcctgattaagaatacacctgttcccgcggatcctccaactaccttcagtcaagccaagctggcgtcgttcatcacgcagtacagcaccggacaggtcagcgtggaaattgaatgggagctgcagaaagagaacagcaagcgctggaacccagagattcagtatacttccaactactacaaatctacaaatgtggactttgctgtcaatactgagggtacttattcagagcctcgccccattggcacccgttacctcacccgtaacctgtaattgcctgttaatcaataaaccggctaattcgtttcagttgaactttggtctctgcgaagggcgaattc

SEQ ID NO: 80 - protein, 738 aa, Artificial Sequence
  source: /note="Description of Artificial Sequence: Synthetic polypeptide"
MAADGYLPDWLEDNLSEGIREWWDLKPGAPKPKANQQKQDDGRGLVLPGYKYLGPFNGLDKGEPVNAADAAALEHDKAYDQQLKAGDNPYLRYNHADAEFQERLQEDTSFGGNLGRAVFQAKKRVLEPLGLVEEGAKTAPGKKRPVEPSPQRSPDSSTGIGKTGQQPAKKRLNFGQTGDSESVPDPQPIGEPPAGPSGLGSGTMAAGGGAPMADNNEGADGVGSSSGNWHCDSTWLGDRVITTSTRTWALPTYNNHLYKQISNGTSGGSTNDNTYFGYSTPWGYFDFNRFHCHFSPRDWQRLINNNWGFRPKRLNFKLFNIQVKEVTQNEGTKTIANNLTSTIQVFTDSEYQLPYVLGSAHQGCLPPFPADVFMIPQYGYLTLNNGSQAVGRSSFYCLEYFPSQMLRTGNNFEFSYQFEDVPFHSSYAHSQSLDRLMNPLIDQYLYYLSRTQSTGGTAGTQQLLFSQAGPNNMSAQAKNWLPGPCYRQQRVSTTLSQNNNSNFAWTGATKYHLNGRDSLVNPGVAMATHKDDEERFFPSSGVLMFGKQGAGKDNVDYSSVMLTSEEEIKTTNPVATEQYGVVADNLQQQNAAPIVGAVNSQGALPGMVWQNRDVYLQGPIWAKIPHTDGNFHPSPLMGGFGLKHPPPQILIKNTPVPADPPTTFSQAKLASFITQYSTGQVSVEIEWELQKENSKRWNPEIQYTSNYYKSTNVDFAVNTEGTYSEPRPIGTRYLTRNL

SEQ ID NO: 81 - DNA, 3084 bp, Artificial Sequence
  source: /note="Description of Artificial Sequence: Synthetic polynucleotide"
gaattcgccctttctacggctgcatcaactggaccaatgagaactttcccttcaacgattgcgtcgacaagatggtgatctggtgggaggagggcaagatgacggccaaggtcgtggagtccgccaaggccattctcggcggcagcaaggtgcgcgtggaccaaaagtgcaagtcgtccgcccagatcgaccccacccccgtgatcgtcacctccaacaccaacatgtgcgccgtgattgacgggaacagcaccaccttcgagcaccagcagccgttgcaggaccggatgttcaagttcgaactcacccgccgtctggagcacgactttggcaaggtgaccaagcaggaagtcaaagagttcttccgctgggcgcaggatcacgtgaccgaggtggcgcatgagttctacgtcagaaagggcggagccagcaaaagacccgcccccgatgacgcggatataagcgagcccaagcgggcctgcccctcagtcgcggatccatcgacgtcagacgcggaaggagctccggtggactttgccgacaggtaccaaaacaaatgttctcgtcacgcgggcatgcttcagatgctgtttccctgcaaaacgtgcgagaaaatgaatcagaatttcaacatttgcttcacgcacggggtcagagactgctcagaatgtttccccggtgcatcagaatctcaaccggtcgtcagaaaaaaaacgtatcagaaactgtgtgccattcatcatctgctggggcgggcacccgagattgcttgctcggcctgcgatctggtcaacgtggacctggacgactgtgtttctgagcaataaatgacttaaaccaggtatggctgccgatggttatcttccagattggcttgaggacaacctctctgagggcattcgcgagtggtgggacctgaaacctggagccccgaaacccaaagccaaccagcaaaagcaggacgacggccggggtctggtgcttcctggctacaagtacctcggacccttcaacggactcgacaagggggagcccgtcaacgcggcggacgcagcggccctcgagcacgacaaggcctacgaccagcagctcaaagcgggtgacaatccgtacctgcggtataaccacgccgacgccgagtttcaggagcgtctgcaagaagatacgtcttttgggggcaacctcgggcgagcagtcttccaggccaagaagcgggttctcgaacctctcggtctggttgaggaaggcgctaagacggctcctggaaagaagagaccggtagagccatcacctcagcgttcccccgactcctccacgggcatcggcaagaaaggccaccagcccgcgagaaagagactgaactttgggcagactggcgactcggagtcagtccccgaccctcaaccaatcggagaaccaccagcaggcccctctggtctgggatctggtacaatggctgcaggcggtggcgctccaatggcagacaataacgaaggcgccgacggagtgggtagttcctcaggaaattggcattgcgattccacatggctgggcgacagagtcatcaccaccagcacccgaacctgggccctgcccacctacaacaaccatctctacaagcaaatctccaacgggacatcgggaggaagcactaacgacaacacctactttggctacagcaccccctgggggtattttgacttcaacagattccactgccacttctcaccacgtgactggcagcgactcatcaacaataactggggattccggcccaagagactcaacttcaagctcttcaacatccaggtcaaggaggtcacgcagaatgaaggcaccaagaccatcgccaataaccttaccagcacgattcaggtgtttacggactcggaataccagctcccgtacgtccccggctctgcgcaccagggctgcctccctccgttcccggcggacgtcttcatgattcctcagtacgggtatctgaccctaaacaatggcagtcaggctgtgggccgttcctccttctactgcctggaatacttcccttctcaaatgctgaggacgggcaacaactttgaattcagctacaccttcgaggacgtgcctttccacagcagctacgcgcacagccagagcctggaccggctgatgaaccctctcatcgaccagtacctgtattacttatccagaactcagtccacaggaggaactcaaggtactcagcaattgttattttctcaagccgggcccgcaaacatgtcggctcaggccaagaactggctacctggaccgtgttaccgtcagcaacgagtttccacgacactgtcgcaaaacaacaacagcaattttgcttggaccggtgccaccaagtatcacctgaatggcagagactccctggttaatcccggcgttgccatggctacccacaaggacgacgaggagcgcttcttcccgtcaagcggagttctaatgtttggcaagcagggggctggaaaagacaatgtggactacagcagcgtgatgctcaccagcgaagaagaaattaaaactactaacccagtggctacagagcagtatggtgtggtggcagacaacctgcagcagaccaacggagctcccattgtgggaactgtcaacagccagggggccttacctggtatggtctggcaaaaccgggacgtgtacctgcagggccccatctgggccaaaattcctcacacggacggcaactttcatccttcgccgctgatgggaggctttggactgaaacacccgcctcctcagatcctggtgaaaaacactcctgttcctgcggatcctccgaccaccttcagccaggccaagctggcttcttttatcacgcagtacagcaccggacaggtcagcgtggaaatcgaatgggagctgcagaaagaaaacagcaagcgctggaacccagagattcagtatacttccaactactacaaatctacaaatgtggactttgctgtcaatactgagggtacttattcagagcctcgccccattggcactcgttatctcacccgtaatctgtaattgcttgttaatcaataaaccggt

SEQ ID NO: 82 - protein, 738 aa, Artificial Sequence
  source: /note="Description of Artificial Sequence: Synthetic polypeptide"
MAADGYLPDWLEDNLSEGIREWWDLKPGAPKPKANQQKQDDGRGLVLPGYKYLGPFNGLDKGEPVNAADAAALEHDKAYDQQLKAGDNPYLRYNHADAEFQERLQEDTSFGGNLGRAVFQAKKRVLEPLGLVEEGAKTAPGKKRPVEPSPQRSPDSSTGIGKKGHQPARKRLNFGQTGDSESVPDPQPIGEPPAGPSGLGSGTMAAGGGAPMADNNEGADGVGSSSGNWHCDSTWLGDRVITTSTRTWALPTYNNHLYKQISNGTSGGSTNDNTYFGYSTPWGYFDFNRFHCHFSPRDWQRLINNNWGFRPKRLNFKLFNIQVKEVTQNEGTKTIANNLTSTIQVFTDSEYQLPYVPGSAHQGCLPPFPADVFMIPQYGYLTLNNGSQAVGRSSFYCLEYFPSQMLRTGNNFEFSYTFEDVPFHSSYAHSQSLDRLMNPLIDQYLYYLSRTQSTGGTQGTQQLLFSQAGPANMSAQAKNWLPGPCYRQQRVSTTLSQNNNSNFAWTGATKYHLNGRDSLVNPGVAMATHKDDEERFFPSSGVLMFGKQGAGKDNVDYSSVMLTSEEEIKTTNPVATEQYGVVADNLQQTNGAPIVGTVNSQGALPGMVWQNRDVYLQGPIWAKIPHTDGNFHPSPLMGGFGLKHPPPQILVKNTPVPADPPTTFSQAKLASFITQYSTGQVSVEIEWELQKENSKRWNPEIQYTSNYYKSTNVDFAVNTEGTYSEPRPIGTRYLTRNL

SEQ ID NO: 83 - DNA, 3123 bp, Artificial Sequence
  source: /note="Description of Artificial Sequence: Synthetic polynucleotide"
gaattcgcccttggctgcgtcaactggaccaatgagaactttcccttcaacgattgcgtcgacaagatggtgatctggtgggaggagggcaagatgacggccaaggtcgtggagtccgccaaggccattctcggcggcagcaaggtgcgcgtggaccaaaagtgcaagtcgtccgcccagatcgaccccacccccgtgatcgtcacctccaacaccaacatgtgcgccgtgattgacgggaacagcaccaccttcgagcaccagcagccgttgcaggaccggatgttcaagttcgaactcacccgccgtctggagcacgactttggcaaggtgaccaagcaggaagtcaaagagttcttccgctgggcgcaggatcacgtgaccgaggtggcgcatgagttctacgtcagaaagggcggagccagcaaaagacccgcccccgatgacgcggatataagcgagcccaagcgggcctgcccctcagtcgcggatccatcgacgtcagacgcggaaggagctccggtggactttgccgacaggtaccaaaacaaatgttctcgtcacgcgggcatgctccagatgctgtttccctgcaaaacgtgcgagagaatgaatcagaatttcaacatttgcttcacgcacggggtcagagactgctcagaatgtttccccggtgcatcagaatctcaaccggtcgtcagaaaaaaaacgtatcagaaactgtgtgccattcatcatctgctggggcgggcacccgagattgcttgctcggcctgcgatctggtcaacgtggacctggacgactgtgtttctgagcaataaatgacttaaaccaggtatggctgccgatggttatcttccagattggcttgaggacaacctctctgagggcattcgcgagtggtgggacctgaaacctggagccccgaaacccaaagccaaccagcaaaagcaggacgacggccggggtctggtgcttcctggctacaagtacctcggacccttcaacggactcgacaagggggagcccgtcaacgcggcggacgcagcggccctcgagcacgacaaggcctacgaccagcagctcaaagcgggtgacaatccgtacctgcggtataaccacgccgacgccgagtttcaggagcgtctgcaagaagatacgtcttttgggggcaacctcgggcgagcagtcttccaggccaagaagcgggttctcgaacctctcggtctggttgaggaaggcgctaagacggctcctggaaagaagagaccggtagagccatcacctcagcgttcccccgactcctccacgggcatcggcaagaaaggccaccagcccgcgagaaagagactgaactttgggcagactggcgactcggagtcagtccccgaccctcaaccaatcggagaaccaccagcaggcccctctggtctgggatctggtacaatggctgcaggcggtggcgctccaatggcagacaataacgaaggcgccgacggagtgggtagttcctcaggaaattggcattgcgattccacatggctgggcgacagagtcatcaccaccagcacccgaacctgggccctgcccacctacaacaaccatctctacaagcaaatctccaacgggacatcgggaggaagcactaacgacaacacctactttggctacagcaccccctgggggtattttgacttcaacagattccactgccacttctcaccacgtgactggcagcgactcatcaacaataactggggattccggcccaagagactcaacttcaagctcttcaacatccaggtcaaggaggtcacgcagaatgaaggcaccaagaccatcgccaataaccttaccagcacgattcaggtgtttacggactcggaataccagctcccgtacgtcctcggctctgcgcaccagggctgcctccctccgttcccggcggacgtcttcatgattcctcagtacgggtatctgaccctaaacaatggcagtcaggctgtgggccgttcctccttctactgcctggaatacttcccttctcaaatgctgaggacgggcaacaactttgaattcagctacaccttcgaggacgtgcctttccacagcagctacgcgcacagccagagcctggaccggctgatgaaccctctcatcgaccagtacctgtattacttatccagaactcagtccacaggaggaactcaaggtactcagcaattgttattttctcaagccgggcccgcaaacatgtcggctcaggccaagaactggctacctggaccgtgttaccgtcagcaacgagtttccacgacactgtcgcaaaacaacaacagcaattttgcttggaccggtgccaccaagtatcacctgaatggcagagactccctggttaatcccggcgttgccatggctacccacaaggacgacgaggagcgcttcttcccgtcaagcggagttctaatgtttggcaagcagggggctggaaaagacaatgtggactacagcagcgtgatgctcaccagcgaagaagaaattaaaactactaacccagtggctacagagcagtatggtgtggtggcagacaacctgcagcagaccaacggagctcccattgtgggaactgtcaacagccagggggccttacctggtatggtctggcaaaaccgggacgtgtacctgcagggccccatctgggccaaaattcctcacacggacggcaactttcatccttcgccgctgatgggaggctttggactgaaacacccgcctcctcagatcctggtgaaaaacactcctgttcctgcggatcctccgaccaccttcagccaggccaagctggcttcttttatcacgcagtacagcaccggacaggtcagcgtggaaatcgaatgggagctgcagaaagaaaacagcaagcgctggaacccagagattcagtatacttccaactactacaaatctacaaatgtggactttgctgtcaatactgagggtacttattcagagcctcgccccattggcactcgttatctcacccgtaatctgtaattgcttgttaatcaataaaccggttaattcgtttcagttgaactttggtctctgcgaagggcgaattc

SEQ ID NO: 84 - protein, 738 aa, Artificial Sequence
  source: /note="Description of Artificial Sequence: Synthetic polypeptide"
MAADGYLPDWLEDNLSEGIREWWDLKPGAPKPKANQQKQDDGRGLVLPGYKYLGPFNGLDKGEPVNAADAAALEHDKAYDQQLKAGDNPYLRYNHADAEFQERLQEDTSFGGNLGRAVFQAKKRVLEPLGLVEEGAKTAPGKKRPVEPSPQRSPDSSTGIGKKGHQPARKRLNFGQTGDSESVPDPQPIGEPPAGPSGLGSGTMAAGGGAPMADNNEGADGVGSSSGNWHCDSTWLGDRVITTSTRTWALPTYNNHLYKQISNGTSGGSTNDNTYFGYSTPWGYFDFNRFHCHFSPRDWQRLINNNWGFRPKRLNFKLFNIQVKEVTQNEGTKTIANNLTSTIQVFTDSEYQLPYVLGSAHQGCLPPFPADVFMIPQYGYLTLNNGSQAVGRSSFYCLEYFPSQMLRTGNNFEFSYTFEDVPFHSSYAHSQSLDRLMNPLIDQYLYYLSRTQSTGGTQGTQQLLFSQAGPANMSAQAKNWLPGPCYRQQRVSTTLSQNNNSNFAWTGATKYHLNGRDSLVNPGVAMATHKDDEERFFPSSGVLMFGKQGAGKDNVDYSSVMLTSEEEIKTTNPVATEQYGVVADNLQQTNGAPIVGTVNSQGALPGMVWQNRDVYLQGPIWAKIPHTDGNFHPSPLMGGFGLKHPPPQILVKNTPVPADPPTTFSQAKLASFITQYSTGQVSVEIEWELQKENSKRWNPEIQYTSNYYKSTNVDFAVNTEGTYSEPRPIGTRYLTRNL

SEQ ID NO: 85 - DNA, 3122 bp, Artificial Sequence
  source: /note="Description of Artificial Sequence: Synthetic polynucleotide"
gaattcgccctttctacggctgcgtcaactggaccaatgagaactttcccttcaacgattgcgtcgacaagatggtgatctggtgggaggagggcaagatgacggccaaggtcgtggagtccgccaaggccattctcggcggcagcaaggtgcgtgtggaccaaaagtgcaagtcttccgcccagatcgatcccacccccgtgatcgtcacctccaacaccaacatgtgcgccgtgattgacgggaacagcgccaccttcgagcaccagcagccgttgcaggaccggatgttcaaatttgaactcacccgccgtctggagcatgactttggcaaggtgacgaagcaggaagtcaaagagttcttccgctgggcgcaggatcacgtgaccgaggtggcgcatgagttccacgtcagaaagggtggagccaacaagagacccgcccccgatgacgcggatataagcgagcccaagcgggcctgcccctcagtcgcggatccatcgacgtcagacgcggaaggagctccggtggactttgccgacaggtaccaaaacaaatgttctcgtcacgcgggcatgcttcagatgctgtttccctgcaagacatgcgagagaatgaatcagaatttcaacatttgcttcacgcacgggaccagagactgttcagaatgtttccccggcgtgtcagaatctcaaccggtcgtcagaaagaggacgtatcggaaactctgtgcgattcatcatctgctggggcgggctcccgagattgcttgctcggcctgcgatctggtcaacgtggacctggatgactgtgtttctgagcaataaatgacttaaaccaggtatggctgccgatggttatcttccagattggctcgaggacaacctctctgagggcattcgcgagtggtgggacttgaaacctggagccccgaaacccaaagccaaccagcaaaagcaggacgacggccggggtctggtgcttcctggctacaagtacctcggacccttcaacggactcgacaagggggagcccgtcaacgcggcggacgcagcggccctcgagcacgacaaagcctacgaccagcagctcaaagcgggtgacaatccgtacctgcggtataatcacgccgacgccgagtttcaggagcgtctgcaagaagatacgtcttttgggggcaacctcgggcgagcagtcttccaggccaagaagcgggttctcgaacctctcggtctggttgaggaaggcgctaagacggctcctggaaagaagagactggtagagcagtcgccacaagagccagactcctcctcgggcatcggcaagacaggccagcagcccgctaaaaagagactcaattttggtcagactggcgactcagagtcagtccccgacccacaacctctcggagaacctccagcagccccctcaggtctgggacctaatacaatggcttcaggcggtggcgctccaatggcagacaataacgaaggcgccgacggagtgggtaattcctcgggaaattggcattgcgattccacatggctgggggacagagtcatcaccaccagcacccgaacctgggccctgcccacctacaacaaccacctctacaagcaaatctccaacggcacctcgggaggaagcaccaacgacaacacctattttggctacagcaccccctgggggtattttgacttcaacagattccactgtcacttttcaccacgtgactggcaacgactcatcaacaacaattggggattccggcccaaaagactcaacttcaagctgttcaacatccaggtcaaggaagtcacgacgaacgaaggcaccaagaccatcgccaataatctcaccagcaccgtgcaggtctttacggactcggagtaccagttaccgtacgtgctaggatccgctcaccagggatgtctgcctccgttcccggcggacgtcttcacggttcctcagtacggctatttaactttaaacaatggaagccaagccctgggacgttcctccttctactgtctggagtatttcccatcgcagatgctgagaaccggcaacaactttcagttcagctacaccttcgaggacgtgcctttccacagcagctacgcgcacagccagagcctggacaggctgatgaatcccctcatcgaccagtacctgtactacctggtcagaacgcaaacgactggaactggagggacgcagactctggcattcagccaagcgggtcctagctcaatggccaaccaggctagaaattgggtgcccggaccttgctaccggcagcagcgcgtctccacgacaaccaaccagaacaacaacagcaactttgcctggacgggagctgccaagtttaagctgaacggccgagactctctaatgaatccgggcgtggcaatggcttcccacaaggatgacgacgaccgcttcttcccttcgagcggggtcctgatttttggcaagcaaggagccgggaacgatggagtggattacagccaagtgctgattacagatgaggaagaaatcaaggctaccaaccccgtggccacagaagaatatggagcagtggccatcaacaaccaggccgccaatacgcaggcgcagaccggactcgtgcacaaccagggggtgattcccggcatggtgtggcagaatagagacgtgtacctgcagggtcccatctgggccaaaattcctcacacggacggcaactttcacccgtctcccctgatgggcggctttggactgaagcacccgcctcctcaaattctcatcaagaacacaccggttccagcggacccgccgcttaccttcaaccaggccaagctgaactctttcatcacgcagtacagcaccggacaggtcagcgtggaaatcgagtgggagctgcagaaagaaaacagcaaacgctggaatccagagattcaatacacttccaactactacaaatctacaaatgtggactttgctgtcaacacggaaggagtttatagcgagcctcgccccattggcacccgttacctcacccgcaacctgtaattacatgttaatcaataaaccggttaattcgtttcagttgaactttggtctctgcgaagggcgaattc

SEQ ID NO: 86 - protein, 736 aa, Artificial Sequence
  source: /note="Description of Artificial Sequence: Synthetic polypeptide"
MAADGYLPDWLEDNLSEGIREWWDLKPGAPKPKANQQKQDDGRGLVLPGYKYLGPFNGLDKGEPVNAADAAALEHDKAYDQQLKAGDNPYLRYNHADAEFQERLQEDTSFGGNLGRAVFQAKKRVLEPLGLVEEGAKTAPGKKRLVEQSPQEPDSSSGIGKTGQQPAKKRLNFGQTGDSESVPDPQPLGEPPAAPSGLGPNTMASGGGAPMADNNEGADGVGNSSGNWHCDSTWLGDRVITTSTRTWALPTYNNHLYKQISNGTSGGSTNDNTYFGYSTPWGYFDFNRFHCHFSPRDWQRLINNNWGFRPKRLNFKLFNIQVKEVTTNEGTKTIANNLTSTVQVFTDSEYQLPYVLGSAHQGCLPPFPADVFTVPQYGYLTLNNGSQALGRSSFYCLEYFPSQMLRTGNNFQFSYTFEDVPFHSSYAHSQSLDRLMNPLIDQYLYYLVRTQTTGTGGTQTLAFSQAGPSSMANQARNWVPGPCYRQQRVSTTTNQNNNSNFAWTGAAKFKLNGRDSLMNPGVAMASHKDDDDRFFPSSGVLIFGKQGAGNDGVDYSQVLITDEEEIKATNPVATEEYGAVAINNQAANTQAQTGLVHNQGVIPGMVWQNRDVYLQGPIWAKIPHTDGNFHPSPLMGGFGLKHPPPQILIKNTPVPADPPLTFNQAKLNSFITQYSTGQVSVEIEWELQKENSKRWNPEIQYTSNYYKSTNVDFAVNTEGVYSEPRPIGTRYLTRNL

SEQ ID NO: 87 - DNA, 3117 bp, Artificial Sequence
  source: /note="Description of Artificial Sequence: Synthetic polynucleotide"
gaattcgcccttggctgcgtcaactggaccaatgagaactttcccttcaacgattgcgtcgacaagatggtgatctggtgggaggagggcaagatgacggccaaggtcgtggagtccgccaaggccattctcggcggcagcaaggtgcgtgtggaccaaaagtgcaagtcttccgcccagatcgatcccacccccgtgatcgtcacctccaacaccaacatgtgcgccgtgattgacgggaacagcaccaccttcgagcaccagcagccgttgcaggaccggatgttcaaatttgaactcacccgccgtctggagcatgactttggcaaggtgacgaagcaggaagtcaaagagttcttccgctgggcgcaggatcacgtgaccgaggtggcgcatgagttccacgtcagaaagggtggagccaacaagagacccgcccccgatgacgcggatataagcgagcccaagcgggcctgcccctcagtcgcggatccatcgacgtcagacgcggaaggagctccggtggactttgccgacaggtaccaaaacaaatgttctcgtcacgcgggcatgcttcagatgctgtttccctgcaagacatgcgagagaatgaatcagaatttcaacatttgcttcacgcacgggaccagagactgttcagaatgtttccccggcgtgtcagaatctcaaccggtcgtcagaaagaggacgtatcggaaactctgtgcgattcatcatctgctggggcgggctcccgagattgcttgctcggcctgcgatctggtcaacgtggacctggatgactgtgtttctgagcaataaatgacttaaaccaggtatggctgccgatggttatcttccagattggctcgaggacaacctctctgagggcattcgcgagtggtgggacttgaaacctggagccccgaaacccaaagccaaccagcaaaagcaggacgacggccggggtctggtgcttcctggctacaagtacctcggacccttcaacggactcgacaagggggagcccgtcaacgcggcggacgcagcggccctcgagcacgacaaagcctacgaccagcagctcaaagcgggtgacaatccgtacctgcggtataatcacgccgacgccgagtttcaggagcgtctgcaagaagatacgtcttttgggggcaacctcgggcgagcagtcttccaggccaagaagcgggttctcgaacctctcggtctggttgaggaaggcgctaagacggctcctggaaagaagagaccggtagagcagtcgccacaagagccagactcctcctcgggcatcggcaagacaggccagcagcccgctaaaaagagactcaattttggtcagactggcgactcagagtcagtccccgacccacaacctctcggagaacctccagcagccccctcaggtctgggacctaatacaatggcttcaggcggtggcgctccaatggcagacaataacgaaggcgccgacggagtgggtaattcctcgggaaattggcattgcgattccacatggctgggggacagagtcatcaccaccagcacccgaacctgggccctgcccacctacaacaaccacctctacaagcaaatctccaacggcacctcgggaggaagcaccaacgacaacacctattttggctacagcaccccctgggggtattttgacttcaacagattccactgtcacttttcaccacgtgactggcaacgactcatcaacaacaattggggattccggcccaaaagactcaacttcaagctgttcaacatccaggtcaaggaagtcacgacgaacgaaggcaccaagaccatcgccaataatctcaccagcaccgtgcgggtctttacggactcggagtaccagttaccgtacgtgctaggatccgctcaccagggatgtctgcctccgttcccggcggacgtcttcatggttcctcagtacggctatttaactttaaacaatggaagccaagccctgggacgttcctccttctactgtctggagtatttcccatcgcagatgctgagaaccggcaacaactttcagttcagctacaccttcgaggacgtgcctttccacagcagctacgcgcacagccagagcctggacaggctgatgaatcccctcatcgaccagtacctgtactacctggtcagaacgcaaacgactggaactggagggacgcagactctggcattcagccaagcgggtcctagctcaatggccaaccaggctagaaattgggtgcccggaccttgctaccggcagcagcgcgtctccacgacaaccaaccagagcaacaacagcaactttgcctggacgggagctgccaagtttaagctgaacggccgagactctctaatgaatccgggcgtggcaatggcttcccacaaggatgacgacgaccgcttcttcccttcgagcggggtcctgatttttggcaagcaaggagccgggaacgatggagtggattacagccaagtgctgattacagatgaggaagaaatcaaggctaccaaccccgtggccacagaagaatatggagcagtggccatcaacaaccaggccgccaatacgcaggcgcagaccggactcgtgcacaaccagggggtgattcccggcatggtgtggcagaatagagacgtgtacctgcagggtcccatctgggccaaaattcctcacacggacggcaactttcacccgtctcccctgatgggcggctttggactgaagcacccgcctcctcaaattctcatcaagaacacaccggttccagcggacccgccgcttaccttcaaccaggccaagctgaactctttcatcacgcagtacagcaccggacaggtcagcgtggaaatcgagtgggagctgcagaaagaaaacagcaaacgctggaatccagagattcaatacacttccaactactacaaatctacaaatgtggactttgctgtcaacacggaaggagtttatagcgagcctcgccccattggcacccgttacctcacccgcaacctgtaattacatgttaatcaataaaccggttaattcgtttcagttgaactttggtctctgcgaagggcgaattc

SEQ ID NO: 88 - protein, 736 aa, Artificial Sequence
  source: /note="Description of Artificial Sequence: Synthetic polypeptide"
MAADGYLPDWLEDNLSEGIREWWDLKPGAPKPKANQQKQDDGRGLVLPGYKYLGPFNGLDKGEPVNAADAAALEHDKAYDQQLKAGDNPYLRYNHADAEFQERLQEDTSFGGNLGRAVFQAKKRVLEPLGLVEEGAKTAPGKKRPVEQSPQEPDSSSGIGKTGQQPAKKRLNFGQTGDSESVPDPQPLGEPPAAPSGLGPNTMASGGGAPMADNNEGADGVGNSSGNWHCDSTWLGDRVITTSTRTWALPTYNNHLYKQISNGTSGGSTNDNTYFGYSTPWGYFDFNRFHCHFSPRDWQRLINNNWGFRPKRLNFKLFNIQVKEVTTNEGTKTIANNLTSTVRVFTDSEYQLPYVLGSAHQGCLPPFPADVFMVPQYGYLTLNNGSQALGRSSFYCLEYFPSQMLRTGNNFQFSYTFEDVPFHSSYAHSQSLDRLMNPLIDQYLYYLVRTQTTGTGGTQTLAFSQAGPSSMANQARNWVPGPCYRQQRVSTTTNQSNNSNFAWTGAAKFKLNGRDSLMNPGVAMASHKDDDDRFFPSSGVLIFGKQGAGNDGVDYSQVLITDEEEIKATNPVATEEYGAVAINNQAANTQAQTGLVHNQGVIPGMVWQNRDVYLQGPIWAKIPHTDGNFHPSPLMGGFGLKHPPPQILIKNTPVPADPPLTFNQAKLNSFITQYSTGQVSVEIEWELQKENSKRWNPEIQYTSNYYKSTNVDFAVNTEGVYSEPRPIGTRYLTRNL

SEQ ID NO: 89 - DNA, 3121 bp, Artificial Sequence
  source: /note="Description of Artificial Sequence: Synthetic polynucleotide"
gaattcgcccttctacggctgcgtcaactggaccaatgagaactttcccttcaacgattgcgtcgacaagatggtgatctggtgggaggagggcaagatgacggccaaggtcgtggagtccgccaaggccattctcggcggcagcaaggtgcgtgtggaccaaaagtgcaagtcttccgcccagatcgatcccacccccgtgatcgtcacctccaacaccaacatgtgcgccgtgattgacgggaacagcaccaccttcgagcaccagcagccgttgcaggaccggatgttcaaatttgaactcacccgccgtctggagcatgactttggcaaggtgacgaagcaggaagtcaaagagttcttccgctgggcgcaggatcacgtgaccgaggtggcgcatgagttccacgtcagaaagggtggcgccaacaagagacccgcccccgatgacgcggatataagcgagcccaagcgggcctgcccctcagtcgcggatccatcgacgtcagacgcggaaggagctccggtggactttgccgacaggtaccaaaacaaatgttctcgtcacgcgggcatgcttcagatgctgtttccctgcaagacatgcgagagaatgaatcagaatttcaacatttgcttcacgcacgggaccagagactgttcagaatgtttccccggcgtgtcagaatctcaaccggtcgtcagaaagaggacgtatcggaaactctgtgcgattcatcatctgctggggcgggctcccgagattgcttgctcggcctgcgatctggtcaacgtggacctggatgactgtgtttctgagcaataaatgacttaaaccaggtatggctgccgatggttatcttccagattggctcgaggacaacctctctgagggcattcgcgagtggtgggacttgaaacctggagccccgaaacccaaagccaaccagcaaaagcaggacgacggccggggtctggtgcttcctggctacaagtacctcggacccttcaacggactcgacaagggggagcccgtcaacgcggcggacgcagcggccctcgagcacgacaaagcctacgaccagcagctcaaagcgggtgacaatccgtacctgcggtataatcacgccgacgccgagtttcaggagcgtctgcaagaagatacgtcctttgggggcaacctcgggcgagcagtcttccaggccaagaagcgggttctcgaacctctcggtctggttgaggaaggcgctaagacggctcctggaaagaagagaccggtagagcagtcgccacaagagccagactcctcctcgggcatcggcaagacaggccagcagcccgctaaaaagagactcaattttggtcagactggcgactcagagtcagtccccgacccacaacctctcggagaacctccagcagccccctcaggtctgggacctaatacaatggcttcaggcggtggcgctccaatggcagacaataacgaaggcgccgacggagtgggtaattcctcgggaaattggcattgcgattccacatggctgggggacagagtcatcaccaccagcacccgaacctgggccctgcccacctacaacaaccacctctacaagcaaatctccaacggcacctcgggaggaagcaccaacgacaacacctattttggctacagcaccccctgggggtattttgacttcaacagattccactgtcacttttcaccacgtgactggcaacgactcatcaacaacaattggggattccggcccaaaagactcaacttcaagctgttcaacatccaggtcaaggaagtcacgacgaacgaaggcaccaagaccatcgccaataatctcaccagcaccgtgcaggtctttacggacttggagtaccagttaccgtacgtgctaggatccgctcaccagggatgtctgcctccgttcccggcggacgtcttcatggttcctcagtacggctatttaactttaaacaatggaagccaagccctgggacgttcctccttctactgtctggagtatttcccatcgcagatgccgagaaccggcaacaactttcagttcagctacaccttcgaggacgtgcctttccacagcagctacgcgcacagccagagcctggacaggctgatgaatcccctcatcgaccagtacctgtactacctggtcagaacgcaaacgactggaactggagggacgcagactctggcattcagccaagcgggtcctagctcaatggccaaccaggctagaaattgggtgcccggaccttgctaccggcagcagcgcgtctccacgacaaccaaccagaacaacaacagcaactttgcctggacgggagctgccaagtttaagctgaacggccgagactctctaatgaatccgggcgtggcaatggcttcccacaaggatgacgacgaccgcttcttcccttcgagcggggtcctgatttttggcaagcaaggagccgggaacgatggagtggattacagccaagtgctgattacagatgaggaagaaatcaaggctaccaaccccgtggccacagaagaatatggagcagtggccatcaacaaccaggccgccaatacgcaggcgcagaccggactcgtgcacaaccagggggtgattcccggcatggtgtggcagaatagagacgtgtacctgcagggtcccatctgggccaaaattcctcacacggacggcaactttcacccgtctcccctgatgggcggctttggactgaagcacccgcctcctcaaattctcatcaagaacacaccggttccagcggacccgccgcttaccttcaaccaggccaagctgaactctttcatcacgcagtacagcaccggacaggtcagcgtggaaatcgagtgggagctgcagaaagaaaacagcaaacgctggaatccagagattcaatacacttccaactactacaaatctacaaatgtggactttgctgtcaacacggaaggagtttatagcgagcctcgccccattggcacccgttacctcacccgcaacctgtaattacatgttaatcaataaaccggttaattcgtttcagttgaactttggtctctgcgaagggcgaattc

SEQ ID NO: 90 - protein, 736 aa, Artificial Sequence
  source: /note="Description of Artificial Sequence: Synthetic polypeptide"
MAADGYLPDWLEDNLSEGIREWWDLKPGAPKPKANQQKQDDGRGLVLPGYKYLGPFNGLDKGEPVNAADAAALEHDKAYDQQLKAGDNPYLRYNHADAEFQERLQEDTSFGGNLGRAVFQAKKRVLEPLGLVEEGAKTAPGKKRPVEQSPQEPDSSSGIGKTGQQPAKKRLNFGQTGDSESVPDPQPLGEPPAAPSGLGPNTMASGGGAPMADNNEGADGVGNSSGNWHCDSTWLGDRVITTSTRTWALPTYNNHLYKQISNGTSGGSTNDNTYFGYSTPWGYFDFNRFHCHFSPRDWQRLINNNWGFRPKRLNFKLFNIQVKEVTTNEGTKTIANNLTSTVQVFTDLEYQLPYVLGSAHQGCLPPFPADVFMVPQYGYLTLNNGSQALGRSSFYCLEYFPSQMPRTGNNFQFSYTFEDVPFHSSYAHSQSLDRLMNPLIDQYLYYLVRTQTTGTGGTQTLAFSQAGPSSMANQARNWVPGPCYRQQRVSTTTNQNNNSNFAWTGAAKFKLNGRDSLMNPGVAMASHKDDDDRFFPSSGVLIFGKQGAGNDGVDYSQVLITDEEEIKATNPVATEEYGAVAINNQAANTQAQTGLVHNQGVIPGMVWQNRDVYLQGPIWAKIPHTDGNFHPSPLMGGFGLKHPPPQILIKNTPVPADPPLTFNQAKLNSFITQYSTGQVSVEIEWELQKENSKRWNPEIQYTSNYYKSTNVDFAVNTEGVYSEPRPIGTRYLTRNL

SEQ ID NO: 91 - DNA, 3122 bp, Artificial Sequence
  source: /note="Description of Artificial Sequence: Synthetic polynucleotide"
gaattcgccctttctacggctgcgtcaactggaccaatgagaactttcccttcaacgattgcgtcgacaagatggtgatctggtgggaggagggcaagatgacggccaaggtcgtggagtccgccaaggccattctcggcggcagcaaggtgcgtgtggaccaaaagtgcaagtcttccgcccagatcgatcccacccccgtgatcgtcacctccaacaccaacatgtgcgccgtgattgacgggaacagcaccaccttcgagcaccagcagccgttgcaggaccggatgttcaaatttgaactcacccgccgtctggagcatgactttggcaaggtgacgaagcaggaagtcaaagggttcttccgctgggcgcaggatcacgtgaccgaggtggcgcatgagttccacgtgcgagcccaagcgggcctgcccctcagtcgcggatccatcgacgtcagaccagaaagggtggagccaacaagagacccgcccccgatgacgcggatataagcggaaggagctccggtggactttgccgacaggtaccaaaacaaatgttctcgtcacgcgggcatgcttcagatgctgtttccctgcaagacatgcgagagaatgaatcagaatttcaacatttgcttcacgcacgggaccagagactgttcagaatgtttccccggcgtgtcagaatctcaaccggtcgtcagaaagaggacgtatcggaaactctgtgcgattcatcatctgctggggcgggctcccgagattgcttgctcggcctgcgatctggtcaacgtggacctggatgactgtgtttctgagcaataaatgacttaaaccaggtatggctgccgatggttatcttccagattggctcgaggacaacctctctgagggcattcgcgagtggtgggacttgaaacctggagccccgaaacccaaagccaaccagcaaaagcaggacgacggccggggtctggtgcttcctggctacaagtacctcggacccttcaacggactcgacaagggggagcccgtcaacgcggcggacgcagcggccctcgagcacgacaaagcctacgaccagcagctcaaagcgggtgacaatccgtacctgcggtataatcacgccgacgccgagtttcaggagcgtctgcaagaagatacgtcttttgggggcaacctcgggcgagcagtcttccaggccaagaagcgggttctcgaacctctcggtctggttgaggaaggcgctaagacggctcctggaaagaagagaccggtagagcagtcgccacaagagccagactcctcctcgggcatcggcaagacaggccagcagcccgctaaaaagagactcaattttggtcagactggcgactcagagtcagtccccgacccacaacctctcggagaacctccagcagccccctcaggtctgggacctaatacaatggcttcaggcggtggcgctccaatggcagacaataacgaaggcgccgacggagtgggtaattcctcgggaaattggcattgcgattccacatggctgggggacagagtcatcaccaccagcacccgaacctgggccctgcccacctacaacaaccacctctacaagcaaatctccaacggcacctcgggaggaagcaccaacgacaacacctattttggctacagcaccccctgggggtattttgacttcaacagattccactgtcacttttcaccacgtgactggcaacgactcatcaacaacaattggggattccggcccaaaagactcaacttcaagctgttcaacatccaggtcaaggaagtcacgacgaacgaaggcaccaagaccatcgccaataatctcaccagcaccgtgcaggtctttacggactcggagtaccagttaccgtacgtgctaggatccgctcaccagggatgtctgcctccgttcccggcggacgtcttcatggttcctcagtacggctatttaactttaaacaatggaagccaagccctgggacgttcctccttctactgtctggagtatttcccatcgcagatgctgagaaccggcaacaactttcagttcagctacaccttcgaggacgtgcctttccacagcagctacgcgcacagccagagcctggacaggctgatgaatcccctcatcgaccagtacctgtactacctggtcagaacgcaaacgactggaactggagggacgcagactctggcattcagccaagcgggtcctagctcaatggccaaccaggctagaaattgggtgcccggaccttgctaccggcagcagcgcgtctccacgacaaccaaccagaacaacaacagcaactttgcctggacgggagctgccaagtttaagctgaacggccgagactctctaatgaatccgggcgtggcaatggcttcccacaaggatgacgacgaccgcttcttcccttcgagcggggtcctgatttttggcaagcaaggagccgggaacgatggagtggattacagccaagtgctgattacagatgaggaagaaatcaaggctaccaaccccgtggccacagaagaatatggagcagtggccatcaacaaccaggccgccaatacgcaggcgcagaccggactcgtgcacaaccagggggtgattcccggcatggtgtggcagaatagagacgtgtacctgcagggtcccatctgggccaaaattcctcacacggacggcaactttcacccgtctcccctgatgggcggctttggactgaagcacccgcctcctcaaattctcatcaagaacacaccggttccagcggacccgccgcttaccttcaaccaggccaagctgaactctttcatcacgcagtacagcaccggacaggtcagcgtggaaatcgagtgggagctgcagaaagaaaacagcaaacgctggaatccagagattcaatacacttccaactactacaaatctacaaatgtggactttgctgtcaacacggagggggtttatagcgagcctcgccccattggcacccgttacctcacccgcaacctgtaattacatgttaatcaataaaccggttaattcgtttcagttgaactttggtctctgcgaagggcgaattc

SEQ ID NO: 92 - protein, 736 aa, Artificial Sequence
  source: /note="Description of Artificial Sequence: Synthetic polypeptide"
MAADGYLPDWLEDNLSEGIREWWDLKPGAPKPKANQQKQDDGRGLVLPGYKYLGPFNGLDKGEPVNAADAAALEHDKAYDQQLKAGDNPYLRYNHADAEFQERLQEDTSFGGNLGRAVFQAKKRVLEPLGLVEEGAKTAPGKKRPVEQSPQEPDSSSGIGKTGQQPAKKRLNFGQTGDSESVPDPQPLGEPPAAPSGLGPNTMASGGGAPMADNNEGADGVGNSSGNWHCDSTWLGDRVITTSTRTWALPTYNNHLYKQISNGTSGGSTNDNTYFGYSTPWGYFDFNRFHCHFSPRDWQRLINNNWGFRPKRLNFKLFNIQVKEVTTNEGTKTIANNLTSTVQVFTDSEYQLPYVLGSAHQGCLPPFPADVFMVPQYGYLTLNNGSQALGRSSFYCLEYFPSQMLRTGNNFQFSYTFEDVPFHSSYAHSQSLDRLMNPLIDQYLYYLVRTQTTGTGGTQTLAFSQAGPSSMANQARNWVPGPCYRQQRVSTTTNQNNNSNFAWTGAAKFKLNGRDSLMNPGVAMASHKDDDDRFFPSSGVLIFGKQGAGNDGVDYSQVLITDEEEIKATNPVATEEYGAVAINNQAANTQAQTGLVHNQGVIPGMVWQNRDVYLQGPIWAKIPHTDGNFHPSPLMGGFGLKHPPPQILIKNTPVPADPPLTFNQAKLNSFITQYSTGQVSVEIEWELQKENSKRWNPEIQYTSNYYKSTNVDFAVNTEGVYSEPRPIGTRYLTRNL

SEQ ID NO: 93 - DNA, 2370 bp, Artificial Sequence
  source: /note="Description of Artificial Sequence: Synthetic polynucleotide"
gaattcgccctttctacggctgcgtcaactggaccaatgagaactttcccttcaacgattgcgtcgacaagatggtgatctggtgggaggagggcaagatgacggccaaggtcgtggagtccgccaaggccattctcggcggcagcaaggtgcgcgtggaccaaaagtgcaagtcgtccgcccagatcgaccccacccccgtgatcgtcacctccaacaccaacatgtgcgccgtgattgacgggaacagcaccaccttcgagcaccagcagccgttgcaggaccggatgttcaagttcgaactcacccgccgtctggagcacgactttggcaaggtgaccaagcaggaagtcaaagagttcttccgctgggcgcaggatcacgtgaccgaggtggcgcatgagttctacgtcagaaagggcggagccagcaaaagacccgcccccgatgacgcggatataagcgagcccaagcgggcctgcccctcagtcgcggatccatcgacgtcagacgcggaaggagctccggtggactttgccgacaggtaccaaaacaaatgttctcgtcacgcgggcatgcttcagacgctgtttccctgcaaaacgtgcgagagaatgaatcagaatttcaacatttgcttcacgcacggggtcagagactgctcagaatgtttccccggtgcatcagaatctcaaccggtcgtcagaaaaaaaacgtatcagaaactgtgtgccattcatcatctgctggggcgggcacccgagattgcttgctcggcctgcgatctggtcaacgtggacctggacgactgtgtttctgagcaataaatgacttaaaccaggtatggctgccgatggttatcttccagattggcttgaggacaacctctctgagggcattcgcgagtggtgggacctgaaacctggagccccgaaacccaaagccaaccagcaaaagcaggacgacggccggggtctggtgcttcctggctacaagtacctcggacccttcaacggactcgacaagggggagcccgtcaacgcggcggacgcagcggccctcgagcacgacaaggcctacgaccagcagctcaaagcgggtgacaatccgtacctgcggtataaccacgccgacgccgagtttcaggagcgtctgcaagaagatacgtcttttgggggcaacctcgggcgagcagtcttccaggccaagaagcgggttctcgaacctctcggtctggttgaggaaggcgctaagacggctcctggaaagaagagaccggtagagccatcacctcagcgttcccccgactcctccacgggcatcggcaagaaaggccaccagcccgcgagaaagagactgaactttgggcagactggcgactcggagtcagtccccgaccctcaaccaatcggagaaccaccagcaggcccctctggtctgggatctggtacaatggctgcaggcggtggcgctccaatggcagacaataacgaaggcgccgacggagtgggtagttcctcaggaaattggcattgcgattccacatggctgggcgacagagtcatcaccaccagcacccgaacctgggccctgcccacctacaacaaccatctctacaagcaaatctccaacgggacatcgggaggaagcactaacgacaacacctactttggctacagcaccccctgggggtattttgacttcaacagattccactgccacttctcaccacgtgactggcagcgactcatcaacaataactggggattccggcccaagagactcaacttcaagctcttcaacatccaggtcaaggaggtcacgcagaatgaaggcaccaagaccatcgccaataaccttaccagcacgattcaggtgtttacggactcggaataccagctcccgtacgtcctcggctctgcgcaccagggctgcctccctccgttcccggcggacgtcttcatgattcctcagtacgggtatctgaccctaaacaatggcagtcaggctgtgggccgttcctccttctactgcctggaatacttcccttctcaaatgctgaggacgggcaacaactttgaattcagctacaccttcgaggacgtgcctttccacagcagctacgcgcacagccagagcctggaccggctgatgaaccctctcatcgaccagtacctgtattacttatccagaactcagtccacaggaggaactcaaggtactcagcaattgttattttctcaagccgggcccgcaaacatgtyggctcaggccaagaactggctacctggaccgtgttaccgtcagcaacgagtttccacgacactgtcgcaaaacaacaacagcaattttgctggaccggtgccacca

SEQ ID NO: 94 - protein, 738 aa, Artificial Sequence; identical to SEQ ID NO: 84
  source: /note="Description of Artificial Sequence: Synthetic polypeptide"

SEQ ID NO: 95 - DNA, 2205 bp, Artificial Sequence
  source: /note="Description of Artificial Sequence: Synthetic polynucleotide"
atgactgacggttaccttccagattggctagaggacaacctctctgaaggcgttcgagagtggtgggcgctgcaacctggagcccctaaacccaaggcaaatcaacaacatcaggacaacgctcggggtcttgtgcttccgggttacaaatacctcggacccggcaacggactcgacaagggggaacccgtcaacgcagcggacgcggcagccctcgagcacgacaaggcctacgaccagcagctcaaggccggtgacaacccctacctcaagtacaaccacgccgacgcggagttccagcagcggcttcagggcgacacatcgtttgggggcaacctcggcagagcagtcttccaggccaaaaagagggttcttgaacctcttggtctggttgagcaagcgggtgagacggctcctggaaagaagagaccgttgattgaatccccccagcagcccgactcctccacgggtatcggcaaaaaaggcaagcagccggctaaaaagaagctcgttttcgaagacgaaactggagcaggcgacggaccccctgagggatcaacttccggagccatgtctgatgacagtgagatgcgtgcagcagctggcggagctgcagtcgagggcggacaaggtgccgatggagtgggtaatgcctcgggtgattggcattgcgattccacctggtctgagggccacgtcacgaccaccagcaccagaacctgggtcttgcccacctacaacaaccacctctacaagcgactcggagagagcctgcagtccaacacctacaacggattctccaccccctggggatactttgacttcaaccgcttccactgccacttctcaccacgtgactggcagcgactcatcaacaacaactggggcatgcgacccaaagccatgcgggtcaaaatcttcaacatccaggtcaaggaggtcacgacgtcgaacggcgagacaacggtggctaataaccttaccagcacggttcagatctttgcggactcgtcgtacgaactgccgtacgtgatggatgcgggtcaagagggcagcctgcctccttttcccaacgacgtctttatggtgccccagtacggctactgtggactggtgaccggcaacacttcgcagcaacagactgacagaaatgccttctactgcctggagtactttccttcgcagatgctgcggactggcaacaactttgaaattacgtacagttttgagaaggtgcctttccactcgatgtacgcgcacagccagagcctggaccggctgatgaaccctctcatcgaccagtacctgtggggactgcaatcgaccaccaccggaaccaccctgaatgccgggactgccaccaccaactttaccaagctgcggcctaccaacttttccaactttaaaaagaactggctgcccgggccttcaatcaagcagcagggcttctcaaagactgccaatcaaaactacaagatccctgccaccgggtcagacagtctcatcaaatacgagacgcacagcactctggacggaagatggagtgccctgacccccggacctccaatggccacggctggacctgcggacagcaagttcagcaacagccagctcatctttgcggggcctaaacagaacggcaacacggccaccgtacccgggactctgatcttcacctctgaggaggagctggcagccaccaacgccaccgatacggacatgtggggcaacctacctggcggtgaccagagcaacagcaacctgccgaccgtggacagactgacagccttgggagccgtgcctggaatggtctggcaaaacagagacatttactaccagggtcccatttgggccaagattcctcataccgatggacactttcacccctcaccgctgattggtgggtttgggctgaaacacccgcctcctcaaatttttatcaagaacaccccggtacctgcgaatcctgcaacgaccttcagctctactccggtaaactccttcattactcagtacagcactggccaggtgtcggtgcagattgactgggagatccagaaggagcggtccaaacgctggaaccccgaggtccagtttacctccaactacggacagcaaaactctctgttgtgggctcccgatgcggctgggaaatacactgagcctagggctatcggtacccgctacctcacccaccacctgtaa

SEQ ID NO: 96 - protein, 734 aa, Artificial Sequence; identical to SEQ ID NO: 68
  source: /note="Description of Artificial Sequence: Synthetic polypeptide"

SEQ ID NO: 97 - DNA, 3128 bp, Artificial Sequence
  source: /note="Description of Artificial Sequence: Synthetic polynucleotide"
gaattcgccctttctacggctgcgtcaactggaccaatgagaactttcccttcaacgattgcgtcgacaagatgttgatctggtgggaggagggcaagatgacggccaaggtcgtggagtccgccaaggccattctcggcggcagcaaagtgcgcgtggaccaaaagtgcaagccgtccgcccagatcgaccccacccccgtgatcgtcacctccaacaccaacatgtgcgccgtgattgacgggaacagcaccaccttcgagcaccagcagccgttgcgggaccggatgttcaagtttgaactcacccgccgtctggagcacgactttggcaaggtgacaaagcaggaagtcagagagttcttccgctgggcgcaggatcacgtgaccgaggtggcgcacgagttctacgtcagaaagggtggagccaacaagagacccgcccccgatgacgcggataaaagcgagcccaagcgggcctgcccctcagtcgcggatccatcgacgtcagacgcggaaggagctccggtggactttgccgacaggtaccaaaacaaatgttctcgtcacgcgggcatgcttcagatgctgtttccctgcaaaacatgcgagagaatgaatcagaatttcaacatttgcttcacgcacgggaccagagactgttcagaatgtttccccggcgtgtcagaatctcaaccggtcgtcagaaaaaagacgtatcggaaactctgtgcgattcatcatctgctggggcgggcacccgagattgcttgctcggcctgcgatctggtcaacgtggacctagatgactgtgtttctgagcaataaatgacttaaaccaggtatggctgccgatggttatcttccagattggctcgaggacaacctctctgagggcattcgcgagtggtgggacttgaaacctggagccccgaaacccaaagccaaccagcaaaagcaggacgacggccggggtctggtgcttcctggctacaagtacctcggacccttcaacggactcgacaagggggagcccgtcaacgcggcggacgcagcggccctcgagcacgacaaggcctacgaccagcagctcaaagcgggtgacaatccgtacctgcggtataaccacgccgacgccgagtttcaggagcgtctgcaagaagatacgtcttttgggggcaacctcgggcgagcagtcttccaggccaagaagcgggttctcgaacctctcggtctggttgaggaaggcgctaagacggctcctggaaagaagagaccggtagagccatcaccccagcgttctccagactcctctacgggcatcggcaagaaaggccagcagcccgcgaaaaagagactcaactttgggcagactggcgactcagagtcagtgcccgaccctcaaccaatcggagaaccccccgcaggcccctctggtctgggatctggtacaatggctgcaggcggtggcgctccaatggcagacaataacgaaggcgccgacggagtgggtagttcctcaggaaattggcattgcgattccacatggctgggcgacagagtcatcaccaccagcacccgaacctgggccctccccacctacaacaaccacctctacaagcaaatctccaacgggacttcgggaggaagcaccaacgacaacacctacttcggctacagcaccccctgggggtattttgactttaacagattccactgccacttctcaccacgtgactggcagcgactcatcaacaacaactggggattccggcccaagagactcaacttcaagctcttcaacatccaggtcaaggaggtcacgcagaatgaaggcaccaagaccatcgccaataaccttaccagcacgattcaggtctttacggactcggaataccagctcccgtacgtcctcggctctgcgcaccagggctgcctgcctccgttcccggcggacgtcttcatgattcctcagtacgggtacctgactctgaacaatggcagtcaggccgtgggccgttcctccttctactgcctggagtactttccttctcaaatgctgagaacgggcaacaactttgagttcagctaccagtttgaggacgtgccttttcacagcagctacgcgcacagccaaagcctggaccggctgatgaaccccctcatcgaccagtacctgtactacctgtctcggactcagtccacgggaggtaccgcaggaactcagcagttgctattttctcaggccgggcctaataacatgtcggctcaggccaaaaactggctacccgggccctgctaccggcagcaacgcgtctccacgacactgtcgcaaaataacaacagcaactgtaaatcccggtgtcgctatggcaacccacaaggacgacgaagagcgattttgcctggaccggtgccaccaagtatcatctgaatggcagagactctctgttttccgtccagcggagtcttaatgtttgggaaacagggagctggaaaagacaacgtggactatagcagcgttatgctaaccagtgaggaagaaattaaaaccaccaacccagtggccacggaacagtacggcgtggtggccgataacctgcaacagcaaaacgccgctcctattgtaggggccgtcaacagtcaaggagccttacctggcatggtctggcagaaccgggacgtgtacctgcagggtcctatctgggccaagattcctcacacggacggaaactttcatccctcgccgctgatgggaggctttggactgaaacacccgcctcctcagatcctgattaagaatacacctgttcccgcggatcctccaactaccttcagtcaagctaagctggcgtcgttcatcacgcagtacagcaccggacaggtcagcgtggaaattgaatgggagctgcagaaagaaaacagcaaacgctggaacccagagattcaatacacttccaactactacaaatctacaaatgtggacttcgctgttaacacagatggcacttattctgagcctcgccccattggcacccgttacctcacccgtaatctgtaattgctcgttaatcaataaaccggttgattcgtttcagttgaactttggtctctgcgaagggcgaattc

SEQ ID NO: 98 - protein, 738 aa, Artificial Sequence; identical to SEQ ID NO: 18
  source: /note="Description of Artificial Sequence: Synthetic polypeptide"

SEQ ID NO: 99 - DNA, 3128 bp, Artificial Sequence
  source: /note="Description of Artificial Sequence: Synthetic polynucleotide"
gaattcgccctttctacggctgcgtcaactggaccaatgagaactttcccttcaacgattgcgtcgacaagatggtgatctggtgggaggagggcaagatgacggccaaggtcgtggagtccgccaaggccattctcggcggcagcaaagtgcgcgtggaccaaaagtgcaagtcgtccgcccagatcgaccccacccccgtgatcgtcacctccaacaccaacatgtgcgccgtgattgacgggaacagcaccaccttcgagcaccagcagccgttgcaggaccggatgttcaagtttgaactcacccgccgtctggagcacgactttggcaaggtgacaaagcaggaagtcagagagttcttccgctgggcgcaggatcacgtgaccgaggtggcgcacgagttctacgtcagaaagggtggagccaacaagagacccgcccccgatgacgcggataaaagcgagcccaagcgggcctgcccctcagtcgcggatccatcgacgtcagacgcggaaggagctccggtggactttgccgacaggtaccaaaacaaatgttctcgtcacgcgggcatgcttcagatgctgtttccctgcaaaacatgcgagagaatgaatcagaatttcaacatttgcttcacgcacgggaccagagactgttcagaatgtttccccggcgtgtcagaatctcaaccggttgtcagaaaaaagacgtatcggaaactctgtgcgattcatcatctgctggggcgggcacccgagattgcttgctcggcctgcgatctggtcaacgtggacctagatgactgtgtttctgagcaataaatgacttaaaccaggtatggctgccgatggttatcttccagattggctcgaggacaacctctctgagggcattcgcgagtggtgggacttgaaacctggagccccgaaacccaaagccaaccagcaaaagcaggacgacggccggggtctggtgcttcctggctacaagtacctcggacccttcaacggactcgacaagggggagcccgtcaacgcggcggacgcagcggccctcgagcacgacaaggcctacgaccagcagctcaaagcgggtgacaatccgtacctgcggtataaccacgccgacgccgagtttcaggagcgtctgcaagaagatacgtcttttgggggcaacctcgggcgagcagtcttccaggccaagaagcgggttctcgaacctctcggtctggttgaggaaggcgctaagacggctcctggaaagaagagaccggtagagccatcaccccagcgttctccagactcctctacgggcatcggcaagaaaggccagcagcccgcgaaaaagagactcaactttgggcagactggcgactcagagtcagtgcccgaccctcaaccaatcggagaaccccccgcaggcccctctggtctgggatctggtacaatggctgcaggcggtggcgctccaatggcagacaataacgaaggcgccgacggagtgggtagttcctcaggaaattggcattgcgattccacatggctgggcgacagagtcatcaccaccagcacccgaacctgggccctccccacctacaacaaccacctctacaagcaaatctccaacgggacttcgggaggaagcaccaacgacaacacctacttcggctacagcaccccctgggggtattttgactttaacagattccactgccacttctcaccacgtgactggcagcgactcatcaacaacaactggggattccggcccaagagacccaacttcaagctcttcaacatccaggtcaaggaggtcacgcagaatgaaggcaccaagaccatcgccaataaccttaccagcacgattcaggtctttacggactcggaataccagctcccgtacgtcctcggctctgcgcaccagggctgcctgcctccgttcccggcggacgtcttcatgattcctcagtacgggtacctgactctgaacaatggcagtcaggccgtgggccgttcctccttctactgcctggagtactttccttctcaaatgctgagaacgggcaacaactttgagttcagctaccagtttgaggacgtgccttttcacagcagctacgcgcacagccaaagcctggaccggctgatgaaccccctcatcgaccagtacctgtactacctgtctcggactcagtccacgggaggtaccgcaggaactcagcagttgctattttctcaggccgggcctaataacatgtcggctcaggccaaaaactggctacccgggccctgctaccggcagcaacgcgtctccacgacactgtcgcaaaataacaacagcaactttgcctggaccggtgccaccaagtatcatctgaatggcagagactctctggtaaatcccggtgtcgctatggcaacccacaaggacgacgaagagcgattttttccgtccagcggagtcttaatgtttgggaaacagggagctggaaaagacaacgtggactatagcagcgttatgctaaccagtgaggaagaaattaaaaccaccaacccagtggccacagaacagtacggcgtggtggccgataacctgcaacagcaaaacgccgctcctattgtaggggccgtcaacagtcaaggagccttacctggcatggtctggcagaaccgggacgtgtacctgcagggtcctatctgggccaagattcctcacacggacggaaactttcatccctcgccgctgatgggaggctttggactgaaacacccgcctcctcagatcctgattaagaatacacctgttcccgcggatcctccaactaccttcagtcaagctaagctggcgtcgttcatcacgcagtacagcaccggacaggtcagcgtggaaattgaatgggagctgcagaaagaaaacagcaaacgctggaacccagagattcaatacacttccaactactacaaatctacaaatgtggactttgctgttaacacagatggcacttattctgagcctcgccccattggcacccgttacctcacccgtaatctgtaattgcttgttaatcaataaaccggttgattcgtttcagttgaactttggtctctgcgaagggcgaattc

SEQ ID NO: 100 - protein, 738 aa, Artificial Sequence
  source: /note="Description of Artificial Sequence: Synthetic polypeptide"
MAADGYLPDWLEDNLSEGIREWWDLKPGAPKPKANQQKQDDGRGLVLPGYKYLGPFNGLDKGEPVNAADAAALEHDKAYDQQLKAGDNPYLRYNHADAEFQERLQEDTSFGGNLGRAVFQAKKRVLEPLGLVEEGAKTAPGKKRPVEPSPQRSPDSSTGIGKKGQQPAKKRLNFGQTGDSESVPDPQPIGEPPAGPSGLGSGTMAAGGGAPMADNNEGADGVGSSSGNWHCDSTWLGDRVITTSTRTWALPTYNNHLYKQISNGTSGGSTNDNTYFGYSTPWGYFDFNRFHCHFSPRDWQRLINNNWGFRPKRPNFKLFNIQVKEVTQNEGTKTIANNLTSTIQVFTDSEYQLPYVLGSAHQGCLPPFPADVFMIPQYGYLTLNNGSQAVGRSSFYCLEYFPSQMLRTGNNFEFSYQFEDVPFHSSYAHSQSLDRLMNPLIDQYLYYLSRTQSTGGTAGTQQLLFSQAGPNNMSAQAKNWLPGPCYRQQRVSTTLSQNNNSNFAWTGATKYHLNGRDSLVNPGVAMATHKDDEERFFPSSGVLMFGKQGAGKDNVDYSSVMLTSEEEIKTTNPVATEQYGVVADNLQQQNAAPIVGAVNSQGALPGMVWQNRDVYLQGPIWAKIPHTDGNFHPSPLMGGFGLKHPPPQILIKNTPVPADPPTTFSQAKLASFITQYSTGQVSVEIEWELQKENSKRWNPEIQYTSNYYKSTNVDFAVNTDGTYSEPRPIGTRYLTRNL

SEQ ID NO: 101 - protein, 738 aa, Artificial Sequence
  source: /note="Description of Artificial Sequence: Synthetic polypeptide"
MAADGYLPDWLEDNLSEGIREWWDLKPGAPKPKANQQKQDDGRGLVLPGYKYLGPFNGLDKGEPVNAADAAALEHDKAYDQQLKAGDNPYLRYNHADAEFQERLQEDTSFGGNLGRAVFQAKKRVLEPLGLVEEAAKTAPGKKRPVEPSPQRSPDSSTGIGKKGQQPAKKRLNFGQTGDSESVPDPQPIGEPPAGPSGLGSGTMAAGGGAPMADNNEGADGVGSSSGNWHCDSTWLGDRVITTSTRTWALPTYNNHLYKQISNGTSGGSTNDNTYFGYSTPWGYFDFNRFHCHFSPRDWQRLINNNWGFRPKRLSFKLFNIQVKEVTQNEGTKTIANNLTSTIQVFTDSEYQLPYVLGSAHQGCLPPFPADVFMIPQYGYLTLNNGSQAVGRSSFYCLEYFPSQMLRTGNNFEFSYTFEDVPFHSSYAHSQSLDRLMNPLIDQYLYYLSRTQSTGGTQGTQQLLFSQAGPANMSAQAKNWLPGPCYRQQRVSTTLSQNNNSNFAWTGATKYHLNGRDSLVNPGVAMATHKDDEERFFPSSGVLMFGKQGAGRDNVDYSSVMLTSEEEIKTTNPVATEQYGVVADNLQQTNTGPIVGNVNSQGALPGMVWQNRDVYLQGPIWAKIPHTDGNFHPSPLMGGFGLKHPPPQILIKNTPVPADPPTTFSQAKLASFITQYSTGQVSVEIEWELQKENSKRWNPEIQYTSNYYKSTNVDFAVNTEGTYSEPRPIGTRYLTRNL

SEQ ID NO: 102 - DNA, 2172 bp, Artificial Sequence
  source: /note="Description of Artificial Sequence: Synthetic polynucleotide"
atgtcttttgttgatcaccctccagattggttggaagaagttggtgaaggtcttcgcgagtttttgggccttgaagcgggcccaccgaaaccaaaacccaatcagcagcatcaagatcaagcccgtggtcttgtgctgcctggttataactatctcggacccggaaacggtctcgatcgaggagagcctgtcaacagggcagacgaggtcgcgcgagagcacgacatctcgtacaacgagcagcttgaggcgggagacaacccctacctcaagtacaaccacgcggacgccgagtttcaggagaagctcgccgacgacacatccttcgggggaaacctcggaaaggcagtctttcaggccaagaaaagggttctcgaaccttttggcctggttgaagagggtgctaagacggcccctaccggaaagcggatagacgaccactttccaaaaagaaagaaggctcggaccgaagaggactccaagccttccacctcgtcagacgccgaagctggacccagcggatcccagcagctgcaaatcccagcccaaccagcctcaagtttgggagctgatacaatgtctgcgggaggtggcggcccattgggcgacaataaccaaggtgccgatggagtgggcaatgcctcgggagattggcattgcgattccacgtggatgggggacagagtcgtcaccaagtccacccgaacctgggtgctgcccagctacaacaaccaccagtaccgagagatcaaaagcggctccgtcgacggaagcaacgccaacgcctactttggatacagcaccccctgggggtactttgactttaaccgcttccacagccactggagcccccgagactggcaaagactcatcaacaactactggggcttcagaccccggtccctcagagtcaaaatcttcaacattcaagtcaaagaggtcacggtgcaggactccaccaccaccatcgccaacaacctcacctccaccgtccaagtgtttacggacgacgactaccagctgccctacgtcgtcggcaacgggaccgagggatgcctgccggccttccctccgcaggtctttacgctgccgcagtacggttacgcgacgctgaaccgcgacaacacagaaaatcccaccgagaggagcagcttcttctgcctagagtactttcccagcaagatgctgagaacgggcaacaactttgagtttacctacaactttgaggaggtgcccttccactccagcttcgctcccagtcagaacctgttcaagctggccaacccgctggtggaccagtacttgtaccgcttcgtgagcacaaataacactggcggagtccagttcaacaagaacctggccgggagatacgccaacacctacaaaaactggttcccggggcccatgggccgaacccagggctggaacctgggctccggggtcaaccgcgccagtgtcagcgccttcgccacgaccaataggatggagctcgagggcgcgagttaccaggtgcccccgcagccgaacggcatgaccaacaacctccagggcagcaacacctatgccctggagaacactatgatcttcaacagccagccggcgaacccgggcaccaccgccacgtacctcgagggcaacatgctcatcaccagcgagagcgagacgcagccggtgaaccgcgtggcgtacaacgtcggcgggcagatggccaccaacaaccagagctccaccactgcccccgcgaccggcacgtacaacctccaggaaatcgtgcccggcagcgtgtggatggagagggacgtgtacctccaaggacccatctgggccaagatcccagagacgggggcgcactttcacccctctccggccatgggcggattcggactcaaacacccaccgcccatgatgctcatcaagaacacgcctgtgcccggaaatatcaccagcttctcggacgtgcccgtcagcagcttcatcacccagtacagcaccgggcaggtcaccgtggagatggagtgggagctcaagaaggaaaactccaagaggtggaacccagagatccagtacacaaacaactacaacgacccccagtttgtggactttgccccggacagcaccggggaatacagaaccaccagacctatcggaacccgataccttacccgacccctt

SEQ ID NO: 103 - protein, 720 aa, Artificial Sequence
  source: /note="Description of Artificial Sequence: Synthetic polypeptide"
MSFVDHPPDWLEEVGEGLREFLGLEAGPPKPKPNQQHQDQARGLVLPGYNYLGPGNGLDRGEPVNRADEVAREHDISYNEQLEAGDNPYLKYNHADAEFQEKLADDTSFGGNLGKAVFQAKKRVLEPFGLVEEGAKTAPTGKRIDDHFPKRKKARTEEDSKPSTSSDAEAGPSGSQQLQIPAQPASSLGADTMSAGGGGPLGDNNQGADGVGNASGDWHCDSTWMGDRVVTKSTRTWVLPSYNNHQYREIKSGSVDGSNANAYFGYSTPWGYFDFNRFHSHWSPRDWQRLINNYWGFRPRSLRVKIFNIQVKEVTVQDSTTTIANNLTSTVQVFTDDDYQLPYVVGNGTEGCLPAFPPQVFTLPQYGYATLNRDNTENPTERSSFFCLEYFPSKMLRTGNNFEFTYNFEEVPFHSSFAPSQNLFKLANPLVDQYLYRFVSTNNTGGVQFNKNLAGRYANTYKNWFPGPMGRTQGWNLGSGVNRASVSAFATTNRMELEGASYQVPPQPNGMTNNLQGSNTYALENTMIFNSQPANPGTTATYLEGNMLITSESETQPVNRVAYNVGGQMATNNQSSTTAPATGTYNLQEIVPGSVWMERDVYLQGPIWAKIPETGAHFHPSPAMGGFGLKHPPPMMLIKNTPVPGNITSFSDVPVSSFITQYSTGQVTVEMEWELKKENSKRWNPEIQYTNNYNDPQFVDFAPDSTGEYRTTRPIGTRYL

SEQ ID NO: 104 - protein, 724 aa, Adeno-associated virus 5
MSFVDHPPDWLEEVGEGLREFLGLEAGPPKPKPNQQHQDQARGLVLPGYNYLGPGNGLDRGEPVNRADEVAREHDISYNEQLEAGDNPYLKYNHADAEFQEKLADDTSFGGNLGKAVFQAKKRVLEPFGLVEEGAKTAPTGKRIDDHFPKRKKARTEEDSKPSTSSDAEAGPSGSQQLQIPAQPASSLGADTMSAGGGGPLGDNNQGADGVGNASGDWHCDSTWMGDRVVTKSTRTWVLPSYNNHQYREIKSGSVDGSNANAYFGYSTPWGYFDFNRFHSHWSPRDWQRLINNYWGFRPRSLRVKIFNIQVKEVTVQDSTTTIANNLTSTVQVFTDDDYQLPYVVGNGTEGCLPAFPPQVFTLPQYGYATLNRDNTENPTERSSFFCLEYFPSKMLRTGNNFEFTYNFEEVPFHSSFAPSQNLFKLANPLVDQYLYRFVSTNNTGGVQFNKNLAGRYANTYKNWFPGPMGRTQGWNLGSGVNRASVSAFATTNRMELEGASYQVPPQPNGMTNNLQGSNTYALENTMIFNSQPANPGTTATYLEGNMLITSESETQPVNRVAYNVGGQMATNNQSSTTAPATGTYNLQEIVPGSVWMERDVYLQGPIWAKIPETGAHFHPSPAMGGFGLKHPPPMMLIKNTPVPGNITSFSDVPVSSFITQYSTGQVTVEMEWELKKENSKRWNPEIQYTNNYNDPQFVDFAPDSTGEYRTTRPIGTRYLTRPL

SEQ ID NO: 105 - DNA, 2175 bp, Artificial Sequence
  source: /note="Description of Artificial Sequence: Synthetic polynucleotide"
atgtcttttgttgatcaccctccagattggttggaagaagttggtgaaggtcttcgcgagtttttgggccttgaagcgggcccaccgaaaccaaaacccaatcagcagcatcaagatcaagcccgtggtcttgtgctgcctggttataactatctcggacccggaaacggtctcgatcgaggagagcctgtcaacagggcagacgaggtcgcgcgagagcacgacatctcgtacaacgagcagcttgaggcgggagacaacccctacctcaagtacaaccacgcggacgccgagtttcaggagaagctcgccgacgacacatccttcgggggaaacctcggaaaggcagtctttcaggccaagaaaagggttctcgaaccttttggcctggttgaagagggtgctaagacggcccctaccggaaagcggatagacgaccactttccaaaaagaaagaaggctcggaccgaagaggactccaagccttccacctcgtcagacgccgaagctggacccagcggatcccagcagctgcaaatcccagcccaaccagcctcaagtttgggagctgatacaatgtctgcgggaggtggcggcccattgggcgacaataaccaaggtgccgatggagtgggcaatgcctcgggagattggcattgcgattccacgtggatgggggacagagtcgtcaccaagtccacccgaacctgggtgctgcccagctacaacaaccaccagtaccgagagatcaaaagcggctccgtcgacggaagcaacgccaacgcctactttggatacagcaccccctgggggtactttgactttaaccgcttccacagccactggagcccccgagactggcaaagactcatcaacaactactggggcttcagaccccggtccctcagagtcaaaatcttcaacattcaagtcaaagaggtcacggtgcaggactccaccaccaccatcgccaacaacctcacctccaccgtccaagtgtttacggacgacgactaccagctgccctacgtcgtcggcaacgggaccgagggatgcctgccggccttccctccgcaggtctttacgctgccgcagtacggttacgcgacgctgaaccgcgacaacacagaaaatcccaccgagaggagcagcttcttctgcctagagtactttcccagcaagatgctgagaacgggcaacaactttgagtttacctacaactttgaggaggtgcccttccactccagcttcgctcccagtcagaacctgttcaagctggccaacccgctggtggaccagtacttgtaccgcttcgtgagcacaaataacactggcggagtccagttcaacaagaacctggccgggagatacgccaacacctacaaaaactggttcccggggcccatgggccgaacccagggctggaacctgggctccggggtcaaccgcgccagtgtcagcgccttcgccacgaccaataggatggagctcgagggcgcgagttaccaggtgcccccgcagccgaacggcatgaccaacaacctccagggcagcaacacctatgccctggagaacactatgatcttcaacagccagccggcgaacccgggcaccaccgccacgtacctcgagggcaacatgctcatcaccagcgagagcgagacgcagccggtgaaccgcgtggcgtacaacgtcggcgggcagatggccaccaacaaccagagctccaccactgcccccgcgaccggcacgtacaacctccaggaaatcgtgcccggcagcgtgtggatggagagggacgtgtacctccaaggacccatctgggccaagatcccagagacgggggcgcactttcacccctctccggccatgggcggattcggactcaaacacccaccgcccatgatgctcatcaagaacacgcctgtgcccggaaatatcaccagcttctcggacgtgcccgtcagcagcttcatcacccagtacagcaccgggcaggtcaccgtggagatggagtgggagctcaagaaggaaaactccaagaggtggaacccagagatccagtacacaaacaactacaacgacccccagtttgtggactttgccccggacagcaccggggaatacagaaccaccagacctatcggaacccgataccttacccgacccctttaa

SEQ ID NO: 106 - DNA, 2208 bp, Artificial Sequence
  source: /note="Description of Artificial Sequence: Synthetic polynucleotide"
atggctgccgatggttatcttccagattggctcgaggacaacctctctgagggcattcgcgagtggtgggacttgaaacctggagccccgaaacccaaagccaaccagcaaaagcaggacgacggccggggtctggtgcttcctggctacaagtacctcggacccttcaacggactcgacaagggggagcccgtcaacgcggcggatgcagcggccctcgagcacgacaaggcctacgaccagcagctcaaagcgggtgacaatccgtacctgcggtataaccacgccgacgccgagtttcaggagcgtctgcaagaagatacgtcttttgggggcaacctcgggcgagcagtcttccaggccaagaagagggttctcgaaccttttggtctggttgaggaaggtgctaagacggctcctggaaagaaacgtccggtagagcagtcgccacaagagccagactcctcctcgggcattggcaagacaggccagcagcccgctaaaaagagactcaattttggtcagactggcgactcagagtcagtccccgacccacaacctctcggagaacctccagcaacccccgctgctgtgggacctactacaatggcttcaggcggtggcgcaccaatggcagacaataacgaaggcgccgacggagtgggtaatgcctcaggaaattggcattgcgattccacatggctgggcgacagagtcatcaccaccagcacccgaacatgggccttgcccacctataacaaccacctctacaagcaaatctccagtgcttcaacgggggccagcaacgacaaccactacttcggctacagcaccccctgggggtattttgatttcaacagattccactgccatttctcaccacgtgactggcagcgactcatcaacaacaattggggattccggcccaagagactcaacttcaagctcttcaacatccaagtcaaggaggtcacgacgaatgatggcgtcacgaccatcgctaataaccttaccagcacggttcaagtcttctcggactcggagtaccagttgccgtacgtcctcggctctgcgcaccagggctgcctccctccgttcccggcggacgtgttcatgattccgcagtacggctacctaacgctcaacaatggcagccaggcagtgggacggtcatccttttactgcctggaatatttcccatcgcagatgctgagaacgggcaataactttaccttcagctacaccttcgaggacgtgcctttccacagcagctacgcgcacagccagagcctggaccggctgatgaatcctctcatcgaccagtacctgtattacctgaacagaactcagaatcagtccggaagtgcccaaaacaaggacttgctgtttagccgggggtctccagctggcatgtctgttcagcccaaaaactggctacctggaccctgttaccggcagcagcgcgtttctaaaacaaaaacagacaacaacaacagcaactttacctggactggtgcttcaaaatataaccttaatgggcgtgaatctataatcaaccctggcactgctatggcctcacacaaagacgacaaagacaagttctttcccatgagcggtgtcatgatttttggaaaggagagcgccggagcttcaaacactgcattggacaatgtcatgatcacagacgaagaggaaatcaaagccactaaccccgtggccaccgaaagatttgggactgtggcagtcaatctccagagcagcagcacagaccctgcgaccggagatgtgcatgttatgggagccttacctggaatggtgtggcaagacagagacgtatacctgcagggtcctatttgggccaaaattcctcacacggatggacactttcacccgtctcctctcatgggcggctttggacttaagcacccgcctcctcagatcctcatcaaaaacacgcctgttcctgcgaatcctccggcagagttttcggctacaaagtttgcttcattcatcacccagtattccacaggacaagtgagcgtggagattgaatgggagctgcagaaagaaaacagcaaacgctggaatcccgaagtgcagtatacatctaactatgcaaaatctgccaacgttgatttcactgtggacaacaatggactttatactgagcctcgccccattggcacccgttacctcacccgtcccctg

SEQ ID NO: 107 - protein, 736 aa, Adeno-associated virus 6
MAADGYLPDWLEDNLSEGIREWWDLKPGAPKPKANQQKQDDGRGLVLPGYKYLGPFNGLDKGEPVNAADAAALEHDKAYDQQLKAGDNPYLRYNHADAEFQERLQEDTSFGGNLGRAVFQAKKRVLEPFGLVEEGAKTAPGKKRPVEQSPQEPDSSSGIGKTGQQPAKKRLNFGQTGDSESVPDPQPLGEPPATPAAVGPTTMASGGGAPMADNNEGADGVGNASGNWHCDSTWLGDRVITTSTRTWALPTYNNHLYKQISSASTGASNDNHYFGYSTPWGYFDFNRFHCHFSPRDWQRLINNNWGFRPKRLNFKLFNIQVKEVTTNDGVTTIANNLTSTVQVFSDSEYQLPYVLGSAHQGCLPPFPADVFMIPQYGYLTLNNGSQAVGRSSFYCLEYFPSQMLRTGNNFTFSYTFEDVPFHSSYAHSQSLDRLMNPLIDQYLYYLNRTQNQSGSAQNKDLLFSRGSPAGMSVQPKNWLPGPCYRQQRVSKTKTDNNNSNFTWTGASKYNLNGRESIINPGTAMASHKDDKDKFFPMSGVMIFGKESAGASNTALDNVMITDEEEIKATNPVATERFGTVAVNLQSSSTDPATGDVHVMGALPGMVWQDRDVYLQGPIWAKIPHTDGHFHPSPLMGGFGLKHPPPQILIKNTPVPANPPAEFSATKFASFITQYSTGQVSVEIEWELQKENSKRWNPEVQYTSNYAKSANVDFTVDNNGLYTEPRPIGTRYLTRPL

SEQ ID NO: 108 - protein, 623 aa, Adeno-associated virus 6
MPGFYEIVIKVPSDLDEHLPGISDSFVNWVAEKEWELPPDSDMDLNLIEQAPLTVAEKLQRDFLVQWRRVSKAPEALFFVQFEKGESYFHLHILVETTGVKSMVLGRFLSQIRDKLVQTIYRGIEPTLPNWFAVTKTRNGAGGGNKVVDECYIPNYLLPKTQPELQWAWTNMEEYISACLNLAERKRLVAHDLTHVSQTQEQNKENLNPNSDAPVIRSKTSARYMELVGWLVDRGITSEKQWIQEDQASYISFNAASNSRSQIKAALDNAGKIMALTKSAPDYLVGPAPPADIKTNRIYRILELNGYDPAYAGSVFLGWAQKRFGKRNTIWLFGPATTGKTNIAEAIAHAVPFYGCVNWTNENFPFNDCVDKMVIWWEEGKMTAKVVESAKAILGGSKVRVDQKCKSSAQIDPTPVIVTSNTNMCAVIDGNSTTFEHQQPLQDRMFKFELTRRLEHDFGKVTKQEVKEFFRWAQDHVTEVAHEFYVRKGGANKRPAPDDADKSEPKRACPSVADPSTSDAEGAPVDFADRYQNKCSRHAGMLQMLFPCKTCERMNQNFNICFTHGTRDCSECFPGVSESQPVVRKRTYRKLCAIHHLLGRAPEIACSACDLVNVDLDDCVSEQ

SEQ ID NO: 109 - DNA, 4683 bp, Adeno-associated virus 6
ttggccactccctctctgcgcgctcgctcgctcactgaggccgggcgaccaaaggtcgcccgacgcccgggctttgcccgggcggcctcagtgagcgagcgagcgcgcagagagggagtggccaactccatcactaggggttcctggaggggtggagtcgtgacgtgaattacgtcatagggttagggaggtcctgtattagaggtcacgtgagtgttttgcgacattttgcgacaccatgtggtcacgctgggtatttaagcccgagtgagcacgcagggtctccattttgaagcgggaggtttgaacgcgcagcgccatgccggggttttacgagattgtgattaaggtccccagcgaccttgacgagcatctgcccggcatttctgacagctttgtgaactgggtggccgagaaggaatgggagttgccgccagattctgacatggatctgaatctgattgagcaggcacccctgaccgtggccgagaagctgcagcgcgacttcctggtccagtggcgccgcgtgagtaaggccccggaggccctcttctttgttcagttcgagaagggcgagtcctacttccacctccatattctggtggagaccacgggggtcaaatccatggtgctgggccgcttcctgagtcagattagggacaagctggtgcagaccatctaccgcgggatcgagccgaccctgcccaactggttcgcggtgaccaagacgcgtaatggcgccggaggggggaacaaggtggtggacgagtgctacatccccaactacctcctgcccaagactcagcccgagctgcagtgggcgtggactaacatggaggagtatataagcgcgtgtttaaacctggccgagcgcaaacggctcgtggcgcacgacctgacccacgtcagccagacccaggagcagaacaaggagaatctgaaccccaattctgacgcgcctgtcatccggtcaaaaacctccgcacgctacatggagctggtcgggtggctggtggaccggggcatcacctccgagaagcagtggatccaggaggaccaggcctcgtacatctccttcaacgccgcctccaactcgcggtcccagatcaaggccgctctggacaatgccggcaagatcatggcgctgaccaaatccgcgcccgactacctggtaggccccgctccgcccgccgacattaaaaccaaccgcatttaccgcatcctggagctgaacggctacgaccctgcctacgccggctccgtctttctcggctgggcccagaaaaggttcggaaaacgcaacaccatctggctgtttgggccggccaccacgggcaagaccaacatcgcggaagccatcgcccacgccgtgcccttctacggctgcgtcaactggaccaatgagaactttcccttcaacgattgcgtcgacaagatggtgatctggtgggaggagggcaagatgacggccaaggtcgtggagtccgccaaggccattctcggcggcagcaaggtgcgcgtggaccaaaagtgcaagtcgtccgcccagatcgatcccacccccgtgatcgtcacctccaacaccaacatgtgcgccgtgattgacgggaacagcaccaccttcgagcaccagcagccgttgcaggaccggatgttcaaatttgaactcacccgccgtctggagcatgactttggcaaggtgacaaagcaggaagtcaaagagttcttccgctgggcgcaggatcacgtgaccgaggtggcgcatgagttctacgtcagaaagggtggagccaacaagagacccgcccccgatgacgcggataaaagcgagcccaagcgggcctgcccctcagtcgcggatccatcgacgtcagacgcggaaggagctccggtggactttgccgacaggtaccaaaacaaatgttctcgtcacgcgggcatgcttcagatgctgtttccctgcaaaacatgcgagagaatgaatcagaatttcaacatttgcttcacgcacgggaccagagactgttcagaatgtttccccggcgtgtcagaatctcaaccggtcgtcagaaagaggacgtatcggaaactctgtgccattcatcatctgctggggcgggctcccgagattgcttgctcggcctgcgatctggtcaacgtggatctggatgactgtgtttctgagcaataaatgacttaaaccaggtatggctgccgatggttatcttccagattggctcgaggacaacctctctgagggcattcgcgagtggtgggacttgaaacctggagccccgaaacccaaagccaaccagcaaaagcaggacgacggccggggtctggtgcttcctggctacaagtacctcggacccttcaacggactcgacaagggggagcccgtcaacgcggcggatgcagcggccctcgagcacgacaaggcctacgaccagcagctcaaagcgggtgacaatccgtacctgcggtataaccacgccgacgccgagtttcaggagcgtctgcaagaagatacgtcttttgggggcaacctcgggcgagcagtcttccaggccaagaagagggttctcgaaccttttggtctggttgaggaaggtgctaagacggctcctggaaagaaacgtccggtagagcagtcgccacaagagccagactcctcctcgggcattggcaagacaggccagcagcccgctaaaaagagactcaattttggtcagactggcgactcagagtcagtccccgacccacaacctctcggagaacctccagcaacccccgctgctgtgggacctactacaatggcttcaggcggtggcgcaccaatggcagacaataacgaaggcgccgacggagtgggtaatgcctcaggaaattggcattgcgattccacatggctgggcgacagagtcatcaccaccagcacccgaacatgggccttgcccacctataacaaccacctctacaagcaaatctccagtgcttcaacgggggccagcaacgacaaccactacttcggctacagcaccccctgggggtattttgatttcaacagattccactgccatttctcaccacgtgactggcagcgactcatcaacaacaattggggattccggcccaagagactcaacttcaagctcttcaacatccaagtcaaggaggtcacgacgaatgatggcgtcacgaccatcgctaataaccttaccagcacggttcaagtcttctcggactcggagtaccagttgccgtacgtcctcggctctgcgcaccagggctgcctccctccgttcccggcggacgtgttcatgattccgcagtacggctacctaacgctcaacaatggcagccaggcagtgggacggtcatccttttactgcctggaatatttcccatcgcagatgctgagaacgggcaataactttaccttcagctacaccttcgaggacgtgcctttccacagcagctacgcgcacagccagagcctggaccggctgatgaatcctctcatcgaccagtacctgtattacctgaacagaactcagaatcagtccggaagtgcccaaaacaaggacttgctgtttagccgggggtctccagctggcatgtctgttcagcccaaaaactggctacctggaccctgttaccggcagcagcgcgtttctaaaacaaaaacagacaacaacaacagcaactttacctggactggtgcttcaaaatataaccttaatgggcgtgaatctataatcaaccctggcactgctatggcctcacacaaagacgacaaagacaagttctttcccatgagcggtgtcatgatttttggaaaggagagcgccggagcttcaaacactgcattggacaatgtcatgatcacagacgaagaggaaatcaaagccactaaccccgtggccaccgaaagatttgggactgtggcagtcaatctccagagcagcagcacagaccctgcgaccggagatgtgcatgttatgggagccttacctggaatggtgtggcaagacagagacgtatacctgcagggtcctatttgggccaaaattcctcacacggatggacactttcacccgtctcctctcatgggcggctttggacttaagcacccgcctcctcagatcctcatcaaaaacacgcctgttcctgcgaatcctccggcagagttttcggctacaaagtttgcttcattcatcacccagtattccacaggacaagtgagcgtggagattgaatgggagctgcagaaagaaaacagcaaacgctggaatcccgaagtgcagtatacatctaactatgcaaaatctgccaacgttgatttcactgtggacaacaatggactttatactgagcctcgccccattggcacccgttacctcacccgtcccctgtaattgtgtgttaatcaataaaccggttaattcgtgtcagttgaactttggtctcatgtcgttattatcttatctggtcaccatagcaaccggttacacattaactgcttagttgcgcttcgcgaatacccctagtgatggagttgcccactccctctatgcgcgctcgctcgctcggtggggccggcagagcagagctctgccgtctgcggacctttggtccgcaggccccaccgagcgagcgagcgcgcatagagggagtgggcaa

SEQ ID NO: 110 - DNA, 2211 bp, Artificial Sequence
  source: /note="Description of Artificial Sequence: Synthetic polynucleotide"
atggctgccgatggttatcttccagattggctcgaggacaacctctctgagggcattcgcgagtggtgggacttgaaacctggagccccgaaacccaaagccaaccagcaaaagcaggacgacggccggggtctggtgcttcctggctacaagtacctcggacccttcaacggactcgacaagggggagcccgtcaacgcggcggatgcagcggccctcgagcacgacaaggcctacgaccagcagctcaaagcgggtgacaatccgtacctgcggtataaccacgccgacgccgagtttcaggagcgtctgcaagaagatacgtcttttgggggcaacctcgggcgagcagtcttccaggccaagaagagggttctcgaaccttttggtctggttgaggaaggtgctaagacggctcctggaaagaaacgtccggtagagcagtcgccacaagagccagactcctcctcgggcattggcaagacaggccagcagcccgctaaaaagagactcaattttggtcagactggcgactcagagtcagtccccgacccacaacctctcggagaacctccagcaacccccgctgctgtgggacctactacaatggcttcaggcggtggcgcaccaatggcagacaataacgaaggcgccgacggagtgggtaatgcctcaggaaattggcattgcgattccacatggctgggcgacagagtcatcaccaccagcacccgaacatgggccttgcccacctataacaaccacctctacaagcaaatctccagtgcttcaacgggggccagcaacgacaaccactacttcggctacagcaccccctgggggtattttgatttcaacagattccactgccatttctcaccacgtgactggcagcgactcatcaacaacaattggggattccggcccaagagactcaacttcaagctcttcaacatccaagtcaaggaggtcacgacgaatgatggcgtcacgaccatcgctaataaccttaccagcacggttcaagtcttctcggactcggagtaccagttgccgtacgtcctcggctctgcgcaccagggctgcctccctccgttcccggcggacgtgttcatgattccgcagtacggctacctaacgctcaacaatggcagccaggcagtgggacggtcatccttttactgcctggaatatttcccatcgcagatgctgagaacgggcaataactttaccttcagctacaccttcgaggacgtgcctttccacagcagctacgcgcacagccagagcctggaccggctgatgaatcctctcatcgaccagtacctgtattacctgaacagaactcagaatcagtccggaagtgcccaaaacaaggacttgctgtttagccgggggtctccagctggcatgtctgttcagcccaaaaactggctacctggaccctgttaccggcagcagcgcgtttctaaaacaaaaacagacaacaacaacagcaactttacctggactggtgcttcaaaatataaccttaatgggcgtgaatctataatcaaccctggcactgctatggcctcacacaaagacgacaaagacaagttctttcccatgagcggtgtcatgatttttggaaaggagagcgccggagcttcaaacactgcattggacaatgtcatgatcacagacgaagaggaaatcaaagccactaaccccgtggccaccgaaagatttgggactgtggcagtcaatctccagagcagcagcacagaccctgcgaccggagatgtgcatgttatgggagccttacctggaatggtgtggcaagacagagacgtatacctgcagggtcctatttgggccaaaattcctcacacggatggacactttcacccgtctcctctcatgggcggctttggacttaagcacccgcctcctcagatcctcatcaaaaacacgcctgttcctgcgaatcctccggcagagttttcggctacaaagtttgcttcattcatcacccagtattccacaggacaagtgagcgtggagattgaatgggagctgcagaaagaaaacagcaaacgctggaatcccgaagtgcagtatacatctaactatgcaaaatctgccaacgttgatttcactgtggacaacaatggactttatactgagcctcgccccattggcacccgttacctcacccgtcccctgtaa

SEQ ID NO: 111 - protein, 736 aa, Artificial Sequence; identical to SEQ ID NO: 107
  source: /note="Description of Artificial Sequence: Synthetic polypeptide"

SEQ ID NO: 112 - protein, 736 aa, Artificial Sequence
  source: /note="Description of Artificial Sequence: Synthetic polypeptide"
MAADGYLPDWLEDNLSEGIREWWDLKPGAPKPKANQQKQDDGRGLVLPGYKYLGPFNGLDKGEPVNAADAAALEHDKAYDQQLKAGDNPYLRYNHADAEFQERLQEDTSFGGNLGRAVFQAKKRVLEPFGLVEEGAKTAPGKKRPVEQSPQEPDSSSGIGKTGQQPAKKRLNFGQTGDSESVPDPQPLGEPPATPAAVGPTTMASGGGAPMADNNEGADGVGNASGNWHCDSTWLGDRVITTSTRTWALPTYNNHLYKQISSASTGASNDNHYFGYSTPWGYFDFNRFHCHFSPRDWQRLINNNWGFRPKRLNFKLFNIQVKEVTTNDGVTTIANNLTSTVQVFSDSEYQLPYVLGSAHQGCLPPFPADVFMIPQYGYLTLNNGSQAVGRSSFYCLEYFPSQMLRTGNNFTFSYTFEDVPFHSSYAHSQSLDRLMNPLIDQYLYYLNRTQNQSGSAQNKDLLFSRGSPAGMSVQPKNWLPGPCYRQQRVSKTKTDNNNSNFTWTGASKYNLNGRESIINPGTAMASHKDDEDKFFPMSGVMIFGKESAGASNTALDNVMITDEEEIKATNPVATERFGTVAVNLQSSSTDPATGDVHVMGALPGMVWQDRDVYLQGPIWAKIPHTDGHFHPSPLMGGFGLKHPPPQILIKNTPVPANPPAEFSATKFASFITQYSTGQVSVEIEWELQKENSKRWNPEVQYTSNYAKSANVDFTVDNNGLYTEPRPIGTRYLTRPL

SEQ ID NO: 113 - protein, 736 aa, Artificial Sequence
  source: /note="Description of Artificial Sequence: Synthetic polypeptide"
MAADGYLPDWLEDNLSEGIREWWDLKPGAPKPKANQQKQDDGRGLVLPGYKYLGPFNGLDKGEPVNAADAAALEHDKAYDQQLKAGDNPYLRYNHADAEFQERLQEDTSFGGNLGRAVFQAKKRVLEPLGLVEEGAKTAPGKKRPVEQSPQEPDSSSGIGKTGQQPAKKRLNFGQTGDSESVPDPQPLGEPPATPAAVGPTTMASGGGAPMADNNEGADGVGNASGNWHCDSTWLGDRVITTSTRTWALPTYNNHLYKQISSASTGASNDNHYFGYSTPWGYFDFNRFHCHFSPRDWQRLINNNWGFRPKRLNFKLFNIQVKEVTTNDGVTTIANNLTSTVQVFSDSEYQLPYVLGSAHQGCLPPFPADVFMIPQYGYLTLNNGSQAVGRSSFYCLEYFPSQMLRTGNNFTFSYTFEDVPFHSSYAHSQSLDRLMNPLIDQYLYYLNRTQNQSGSAQNKDLLFSRGSPAGMSVQPKNWLPGPCYRQQRVSKTKTDNNNSNFTWTGASKYNLNGRESIINPGTAMASHKDDEDKFFPMSGVMIFGKESAGASNTALDNVMITDEEEIKATNPVATERFGTVAVNLQSSSTDPATGDVHVMGALPGMVWQDRDVYLQGPIWAKIPHTDGHFHPSPLMGGFGLKHPPPQILIKNTPVPANPPAEFSATKFASFITQYSTGQVSVEIEWELQKENSKRWNPEVQYTSNYAKSANVDFTVDNNGLYTEPRPIGTRYLTRPL

SEQ ID NO: 114 - protein, 736 aa, Artificial Sequence
  source: /note="Description of Artificial Sequence: Synthetic polypeptide"
MAADGYLPDWLEDNLSEGIREWWDLKPGAPKPKANQQKQDDGRGLVLPGYKYLGPFNGLDKGEPVNAADAAALEHDKAYDQQLKAGDNPYLRYNHADAEFQERLQEDTSFGGNLGRAVFQAKKRVLEPLGLVEEGAKTAPGKKRPVEQSPQEPDSSSGIGKTGQQPAKKRLNFGQTGDSESVPDPQPLGEPPATPAAVGPTTMASGGGAPMADNNEGADGVGNASGNWHCDSTWLGDRVITTSTRTWALPTYNNHLYKQISSASTGASNDNHYFGYSTPWGYFDFNRFHCHFSPRDWQRLINNNWGFRPKRLNFKLFNIQVKEVTTNDGVTTIANNLTSTVQVFSDSEYQLPYVLGSAHQGCLPPFPADVFMIPQYGYLTLNNGSQAVGRSSFYCLEYFPSQMLRTGNNFTFSYTFEDVPFHSSYAHSQSLDRLMNPLIDQYLYYLNRTQNQSGSAQNKDLLFSRGSPAGMSVQPKNWLPGPCYRQQRVSKTKTDNNNSNFTWTGASKYNLNGRESIINPGTAMASHKDDKDKFFPMSGVMIFGKESAGASNTALDNVMITDEEEIKATNPVATERFGTVAVNLQSSSTDPATGDVHVMGALPGMVWQDRDVYLQGPIWAKIPHTDGHFHPSPLMGGFGLKHPPPQILIKNTPVPANPPAEFSATKFASFITQYSTGQVSVEIEWELQKENSKRWNPEVQYTSNYAKSANVDFTVDNNGLYTEPRPIGTRYLTRPL

SEQ ID NO: 115 - DNA, 2214 bp, Artificial Sequence
  source: /note="Description of Artificial Sequence: Synthetic polynucleotide"
atggctgccgatggttatcttccagattggctcgaggacaacctctctgagggcattcgcgagtggtgggacctgaaacctggagccccgaaacccaaagccaaccagcaaaagcaggacaacggccggggtctggtgcttcctggctacaagtacctcggacccttcaacggactcgacaagggggagcccgtcaacgcggcggacgcagcggccctcgagcacgacaaggcctacgaccagcagctcaaagcgggtgacaatccgtacctgcggtataaccacgccgacgccgagtttcaggagcgtctgcaagaagatacgtcatttgggggcaacctcgggcgagcagtcttccaggccaagaagcgggttctcgaacctctcggtctggttgaggaaggcgctaagacggctcctgcaaagaagagaccggtagagccgtcacctcagcgttcccccgactcctccacgggcatcggcaagaaaggccagcagcccgccagaaagagactcaatttcggtcagactggcgactcagagtcagtccccgaccctcaacctctcggagaacctccagcagcgccctctagtgtgggatctggtacagtggctgcaggcggtggcgcaccaatggcagacaataacgaaggtgccgacggagtgggtaatgcctcaggaaattggcattgcgattccacatggctgggcgacagagtcattaccaccagcacccgaacctgggccctgcccacctacaacaaccacctctacaagcaaatctccagtgaaactgcaggtagtaccaacgacaacacctacttcggctacagcaccccctgggggtattttgactttaacagattccactgccacttctcaccacgtgactggcagcgactcatcaacaacaactggggattccggcccaagaagctgcggttcaagctcttcaacatccaggtcaaggaggtcacgacgaatgacggcgttacgaccatcgctaataaccttaccagcacgattcaggtattctcggactcggaataccagctgccgtacgtcctcggctctgcgcaccagggctgcctgcctccgttcccggcggacgtcttcatgattcctcagtacggctacctgactctcaacaatggcagtcagtctgtgggacgttcctccttctactgcctggagtacttcccctctcagatgctgagaacgggcaacaactttgagttcagctacagcttcgaggacgtgcctttccacagcagctacgcacacagccagagcctggaccggctgatgaatcccctcatcgaccagtacttgtactacctggccagaacacagagtaacccaggaggcacagctggcaatcgggaactgcagttttaccagggcgggccttcaactatggccgaacaagccaagaattggttacctggaccttgcttccggcaacaaagagtctccaaaacgctggatcaaaacaacaacagcaactttgcttggactggtgccaccaaatatcacctgaacggcagaaactcgttggttaatcccggcgtcgccatggcaactcacaaggacgacgaggaccgctttttcccatccagcggagtcctgatttttggaaaaactggagcaactaacaaaactacattggaaaatgtgttaatgacaaatgaagaagaaattcgtcctactaatcctgtagccacggaagaatacgggatagtcagcagcaacttacaagcggctaatactgcagcccagacacaagttgtcaacaaccagggagccttacctggcatggtctggcagaaccgggacgtgtacctgcagggtcccatctgggccaagattcctcacacggatggcaactttcacccgtctcctttgatgggcggctttggacttaaacatccgcctcctcagatcctgatcaagaacactcccgttcccgctaatcctccggaggtgtttactcctgccaagtttgcttcgttcatcacacagtacagcaccggacaagtcagcgtggaaatcgagtgggagctgcagaaggaaaacagcaagcgctggaacccggagattcagtacacctccaactttgaaaagcagactggtgtggactttgccgttgacagccagggtgtttactctgagcctcgccctattggcactcgttacctcacccgtaatctgtaa

SEQ ID NO: 116 - protein, 738 aa, Artificial Sequence
  source: /note="Description of Artificial Sequence: Synthetic polypeptide"
MAADGYLPDWLEDNLSEGIREWWALKPGAPKPKANQQKQDDGRGLVLPGYKYLGPFNGLDKGEPVNAADAAALEHDKAYDQQLQAGDNPYLRYNHADAEFQERLQEDTSFGGNLGRAVFQAKKRVLEPLGLVEEGAKTAPGKKRPVEPSPQRSPDSSTGIGKKGQQPARKRLNFGQTGDSESVPDPQPLGEPPAAPSGVGPNTMAAGGGAPMADNNEGADGVGSSSGNWHCDSTWLGDRVITTSTRTWALPTYNNHLYKQISNGTSGGATNDNTYFGYSTPWGYFDFNRFHCHFSPRDWQRLINNNWGFRPKRLSFKLFNIQVKEVTQNEGTKTIANNLTSTIQVFTDSEYQLPYVLGSAHQGCLPPFPADVFMIPQYGYLTLNNGSQAVGRSSFYCLEYFPSQMLRTGNNFQFTYTFEDVPFHSSYAHSQSLDRLMNPLIDQYLYYLSRTQTTGGTANTQTLGFSQGGPNTMANQAKNWLPGPCYRQQRVSTTTGQNNNSNFAWTAGTKYHLNGRNSLANPGIAMATHKDDEERFFPSNGILIFGKQNAARDNADYSDVMLTSEEEIKTTNPVATEEYGIVADNLQQQNTAPQIGTVNSQGALPGMVWQNRDVYLQGPIWAKIPHTDGNFHPSPLMGGFGLKHPPPQILIKNTPVPADPPTTFNQSKLNSFITQYSTGQVSVEIEWELQKENSKRWNPEIQYTSNYYKSTSVDFAVNTEGVYSEPRPIGTRYLTRNL

SEQ ID NO: 117 - protein, 737 aa, Adeno-associated virus 7
MAADGYLPDWLEDNLSEGIREWWDLKPGAPKPKANQQKQDNGRGLVLPGYKYLGPFNGLDKGEPVNAADAAALEHDKAYDQQLKAGDNPYLRYNHADAEFQERLQEDTSFGGNLGRAVFQAKKRVLEPLGLVEEGAKTAPAKKRPVEPSPQRSPDSSTGIGKKGQQPARKRLNFGQTGDSESVPDPQPLGEPPAAPSSVGSGTVAAGGGAPMADNNEGADGVGNASGNWHCDSTWLGDRVITTSTRTWALPTYNNHLYKQISSETAGSTNDNTYFGYSTPWGYFDFNRFHCHFSPRDWQRLINNNWGFRPKKLRFKLFNIQVKEVTTNDGVTTIANNLTSTIQVFSDSEYQLPYVLGSAHQGCLPPFPADVFMIPQYGYLTLNNGSQSVGRSSFYCLEYFPSQMLRTGNNFEFSYSFEDVPFHSSYAHSQSLDRLMNPLIDQYLYYLARTQSNPGGTAGNRELQFYQGGPSTMAEQAKNWLPGPCFRQQRVSKTLDQNNNSNFAWTGATKYHLNGRNSLVNPGVAMATHKDDEDRFFPSSGVLIFGKTGATNKTTLENVLMTNEEEIRPTNPVATEEYGIVSSNLQAANTAAQTQVVNNQGALPGMVWQNRDVYLQGPIWAKIPHTDGNFHPSPLMGGFGLKHPPPQILIKNTPVPANPPEVFTPAKFASFITQYSTGQVSVEIEWELQKENSKRWNPEIQYTSNFEKQTGVDFAVDSQGVYSEPRPIGTRYLTRNL

SEQ ID NO: 118 - protein, 623 aa, Adeno-associated virus 7
MPGFYEIVIKVPSDLDEHLPGISDSFVNWVAEKEWELPPDSDMDLNLIEQAPLTVAEKLQRDFLVQWRRVSKAPEALFFVQFEKGESYFHLHVLVETTGVKSMVLGRFLSQIREKLVQTIYRGVEPTLPNWFAVTKTRNGAGGGNKVVDECYIPNYLLPKTQPELQWAWTNMEEYISACLNLAERKRLVAQHLTHVSQTQEQNKENLNPNSDAPVIRSKTSARYMELVGWLVDRGITSEKQWIQEDQASYISFNAASNSRSQIKAALDNAGKIMALTKSAPDYLVGPSLPADIKTNRIYRILELNGYDPAYAGSVFLGWAQKKFGKRNTIWLFGPATTGKTNIAEAIAHAVPFYGCVNWTNENFPFNDCVDKMVIWWEEGKMTAKVVESAKAILGGSKVRVDQKCKSSAQIDPTPVIVTSNTNMCAVIDGNSTTFEHQQPLQDRMFKFELTRRLEHDFGKVTKQEVKEFFRWASDHVTEVAHEFYVRKGGASKRPAPDDADISEPKRACPSVADPSTSDAEGAPVDFADRYQNKCSRHAGMIQMLFPCKTCERMNQNFNICFTHGVRDCLECFPGVSESQPVVRKKTYRKLCAIHHLLGRAPEIACSACDLVNVDLDDCVSEQ

SEQ ID NO: 119 - DNA, 4721 bp, Adeno-associated virus 7
ttggccactccctctatgcgcgctcgctcgctcggtggggcctgcggaccaaaggtccgcagacggcagagctctgctctgccggccccaccgagcgagcgagcgcgcatagagggagtggccaactccatcactaggggtaccgcgaagcgcctcccacgctgccgcgtcagcgctgacgtaaatcacgtcataggggagtggtcctgtattagctgtcacgtgagtgcttttgcgacattttgcgacaccacgtggccatttgaggtatatatggccgagtgagcgagcaggatctccattttgaccgcgaaatttgaacgagcagcagccatgccgggtttctacgagatcgtgatcaaggtgccgagcgacctggacgagcacctgccgggcatttctgactcgtttgtgaactgggtggccgagaaggaatgggagctgcccccggattctgacatggatctgaatctgatcgagcaggcacccctgaccgtggccgagaagctgcagcgcgacttcctggtccaatggcgccgcgtgagtaaggccccggaggccctgttctttgttcagttcgagaagggcgagagctacttccaccttcacgttctggtggagaccacgggggtcaagtccatggtgctaggccgcttcctgagtcagattcgggagaagctggtccagaccatctaccgcggggtcgagcccacgctgcccaactggttcgcggtgaccaagacgcgtaatggcgccggcggggggaacaaggtggtggacgagtgctacatccccaactacctcctgcccaagacccagcccgagctgcagtgggcgtggactaacatggaggagtatataagcgcgtgtttgaacctggccgaacgcaaacggctcgtggcgcagcacctgacccacgtcagccagacgcaggagcagaacaaggagaatctgaaccccaattctgacgcgcccgtgatcaggtcaaaaacctccgcgcgctacatggagctggtcgggtggctggtggaccggggcatcacctccgagaagcagtggatccaggaggaccaggcctcgtacatctccttcaacgccgcctccaactcgcggtcccagatcaaggccgcgctggacaatgccggcaagatcatggcgctgaccaaatccgcgcccgactacctggtggggccctcgctgcccgcggacattaaaaccaaccgcatctaccgcatcctggagctgaacgggtacgatcctgcctacgccggctccgtctttctcggctgggcccagaaaaagttcgggaagcgcaacaccatctggctgtttgggcccgccaccaccggcaagaccaacattgcggaagccatcgcccacgccgtgcccttctacggctgcgtcaactggaccaatgagaactttcccttcaacgattgcgtcgacaagatggtgatctggtgggaggagggcaagatgacggccaaggtcgtggagtccgccaaggccattctcggcggcagcaaggtgcgcgtggaccaaaagtgcaagtcgtccgcccagatcgaccccacccccgtgatcgtcacctccaacaccaacatgtgcgccgtgattgacgggaacagcaccaccttcgagcaccagcagccgttgcaggaccggatgttcaaatttgaactcacccgccgtctggagcacgactttggcaaggtgacgaagcaggaagtcaaagagttcttccgctgggccagtgatcacgtgaccgaggtggcgcatgagttctacgtcagaaagggcggagccagcaaaagacccgcccccgatgacgcggatataagcgagcccaagcgggcctgcccctcagtcgcggatccatcgacgtcagacgcggaaggagctccggtggactttgccgacaggtaccaaaacaaatgttctcgtcacgcgggcatgattcagatgctgtttccctgcaaaacgtgcgagagaatgaatcagaatttcaacatttgcttcacacacggggtcagagactgtttagagtgtttccccggcgtgtcagaatctcaaccggtcgtcagaaaaaagacgtatcggaaactctgcgcgattcatcatctgctggggcgggcgcccgagattgcttgctcggcctgcgacctggtcaacgtggacctggacgactgcgtttctgagcaataaatgacttaaaccaggtatggctgccgatggttatcttccagattggctcgaggacaacctctctgagggcattcgcgagtggtgggacctgaaacctggagccccgaaacccaaagccaaccagcaaaagcaggacaacggccggggtctggtgcttcctggctacaagtacctcggacccttcaacggactcgacaagggggagcccgtcaacgcggcggacgcagcggccctcgagcacgacaaggcctacgaccagcagctcaaagcgggtgacaatccgtacctgcggtataaccacgccgacgccgagtttcaggagcgtctgcaagaagatacgtcatttgggggcaacctcgggcgagcagtcttccaggccaagaagcgggttctcgaacctctcggtctggttgaggaaggcgctaagacggctcctgcaaagaagagaccggtagagccgtcacctcagcgttcccccgactcctccacgggcatcggcaagaaaggccagcagcccgccagaaagagactcaatttcggtcagactggcgactcagagtcagtccccgaccctcaacctctcggagaacctccagcagcgccctctagtgtgggatctggtacagtggctgcaggcggtggcgcaccaatggcagacaataacgaaggtgccgacggagtgggtaatgcctcaggaaattggcattgcgattccacatggctgggcgacagagtcattaccaccagcacccgaacctgggccctgcccacctacaacaaccacctctacaagcaaatctccagtgaaactgcaggtagtaccaacgacaacacctacttcggctacagcaccccctgggggtattttgactttaacagattccactgccacttctcaccacgtgactggcagcgactcatcaacaacaactggggattccggcccaagaagctgcggttcaagctcttcaacatccaggtcaaggaggtcacgacgaatgacggcgttacgaccatcgctaataaccttaccagcacgattcaggtattctcggactcggaataccagctgccgtacgtcctcggctctgcgcaccagggctgcctgcctccgttcccggcggacgtcttcatgattcctcagtacggctacctgactctcaacaatggcagtcagtctgtgggacgttcctccttctactgcctggagtacttcccctctcagatgctgagaacgggcaacaactttgagttcagctacagcttcgaggacgtgcctttccacagcagctacgcacacagccagagcctggaccggctgatgaatcccctcatcgaccagtacttgtactacctggccagaacacagagtaacccaggaggcacagctggcaatcgggaactgcagttttaccagggcgggccttcaactatggccgaacaagccaagaattggttacctggaccttgcttccggcaacaaagagtctccaaaacgctggatcaaaacaacaacagcaactttgcttggactggtgccaccaaatatcacctgaacggcagaaactcgttggttaatcccggcgtcgccatggcaactcacaaggacgacgaggaccgctttttcccatccagcggagtcctgatttttggaaaaactggagcaactaacaaaactacattggaaaatgtgttaatgacaaatgaagaagaaattcgtcctactaatcctgtagccacggaagaatacgggatagtcagcagcaacttacaagcggctaatactgcagcccagacacaagttgtcaacaaccagggagccttacctggcatggtctggcagaaccgggacgtgtacctgcagggtcccatctgggccaagattcctcacacggatggcaactttcacccgtctcctttgatgggcggctttggacttaaacatccgcctcctcagatcctgatcaagaacactcccgttcccgctaatcctccggaggtgtttactcctgccaagtttgcttcgttcatcacacagtacagcaccggacaagtcagcgtggaaatcgagtgggagctgcagaaggaaaacagcaagcgctggaacccggagattcagtacacctccaactttgaaaagcagactggtgtggactttgccgttgacagccagggtgtttactctgagcctcgccctattggcactcgttacctcacccgtaatctgtaattgcatgttaatcaataaaccggttgattcgtttcagttgaactttggtctcctgtgcttcttatcttatcggtttccatagcaactggttacacattaactgcttgggtgcgcttcacgataagaacactgacgtcaccgcggtacccctagtgatggagttggccactccctctatgcgcgctcgctcgctcggtggggcctgcggaccaaaggtccgcagacggcagagctctgctctgccggccccaccgagcgagcgagcgcgcatagagggagtggccaa

SEQ ID NO: 120 - DNA, 2214 bp, Artificial Sequence; identical to SEQ ID NO: 115
  source: /note="Description of Artificial Sequence: Synthetic polynucleotide"

SEQ ID NO: 121 - protein, 737 aa, Artificial Sequence; identical to SEQ ID NO: 117
  source: /note="Description of Artificial Sequence: Synthetic polypeptide"

SEQ ID NO: 122 - DNA, 2217 bp, Artificial Sequence
  source: /note="Description of Artificial Sequence: Synthetic polynucleotide"
atggctgccgatggttatcttccagattggctcgaggacaacctctctgagggcattcgcgagtggtgggcgctgaaacctggagccccgaagcccaaagccaaccagcaaaagcaggacgacggccggggtctggtgcttcctggctacaagtacctcggacccttcaacggactcgacaagggggagcccgtcaacgcggcggacgcagcggccctcgagcacgacaaggcctacgaccagcagctgcaggcgggtgacaatccgtacctgcggtataaccacgccgacgccgagtttcaggagcgtctgcaagaagatacgtcttttgggggcaacctcgggcgagcagtcttccaggccaagaagcgggttctcgaacctctcggtctggttgaggaaggcgctaagacggctcctggaaagaagagaccggtagagccatcaccccagcgttctccagactcctctacgggcatcggcaagaaaggccaacagcccgccagaaaaagactcaattttggtcagactggcgactcagagtcagttccagaccctcaacctctcggagaacctccagcagcgccctctggtgtgggacctaatacaatggctgcaggcggtggcgcaccaatggcagacaataacgaaggcgccgacggagtgggtagttcctcgggaaattggcattgcgattccacatggctgggcgacagagtcatcaccaccagcacccgaacctgggccctgcccacctacaacaaccacctctacaagcaaatctccaacgggacatcgggaggagccaccaacgacaacacctacttcggctacagcaccccctgggggtattttgactttaacagattccactgccacttttcaccacgtgactggcagcgactcatcaacaacaactggggattccggcccaagagactcagcttcaagctcttcaacatccaggtcaaggaggtcacgcagaatgaaggcaccaagaccatcgccaataacctcaccagcaccatccaggtgtttacggactcggagtaccagctgccgtacgttctcggctctgcccaccagggctgcctgcctccgttcccggcggacgtgttcatgattccccagtacggctacctaacactcaacaacggtagtcaggccgtgggacgctcctccttctactgcctggaatactttccttcgcagatgctgagaaccggcaacaacttccagtttacttacaccttcgaggacgtgcctttccacagcagctacgcccacagccagagcttggaccggctgatgaatcctctgattgaccagtacctgtactacttgtctcggactcaaacaacaggaggcacggcaaatacgcagactctgggcttcagccaaggtgggcctaatacaatggccaatcaggcaaagaactggctgccaggaccctgttaccgccaacaacgcgtctcaacgacaaccgggcaaaacaacaatagcaactttgcctggactgctgggaccaaataccatctgaatggaagaaattcattggctaatcctggcatcgctatggcaacacacaaagacgacgaggagcgtttttttcccagtaacgggatcctgatttttggcaaacaaaatgctgccagagacaatgcggattacagcgatgtcatgctcaccagcgaggaagaaatcaaaaccactaaccctgtggctacagaggaatacggtatcgtggcagataacttgcagcagcaaaacacggctcctcaaattggaactgtcaacagccagggggccttacccggtatggtctggcagaaccgggacgtgtacctgcagggtcccatctgggccaagattcctcacacggacggcaacttccacccgtctccgctgatgggcggctttggcctgaaacatcctccgcctcagatcctgatcaagaacacgcctgtacctgcggatcctccgaccaccttcaaccagtcaaagctgaactctttcatcacgcaatacagcaccggacaggtcagcgtggaaattgaatgggagctgcagaaggaaaacagcaagcgctggaaccccgagatccagtacacctccaactactacaaatctacaagtgtggactttgctgttaatacagaaggcgtgtactctgaaccccgccccattggcacccgttacctcacccgtaatctgtaa

SEQ ID NO: 123 - DNA, 2213 bp, Adeno-associated virus 8
atggctgccgatggttatcttccagattggctcgaggacaacctctctgagggcattcgcgagtggtgggcgctgaaacctggagccccgaagcccaaagccaaccagcaaaagcaggacgacggccggggtctggtgcttcctggctacaagtacctcggacccttcaacggactcgacaagggggagcccgtcaacgcggcggacgcagcggccctcgagcacgacaaggcctacgaccagcagctgcaggcgggtgacaatccgtacctgcggtataaccacgccgacgccgagtttcaggagcgtctgcaagaagatacgtcttttgggggcaacctcgggcgagcagtcttccaggccaagaagcgggttctcgaacctctcggtctggttgaggaaggcgctaagacggctcctggaaagaagagaccggtagagccatcaccccagcgttctccagactcctctacgggcatcggcaagaaaggccaacagcccgccagaaaaagactcaattttggtcagactggcgactcagagtcagttccagaccctcaacctctcggagaacctccagcagcgccctctggtgtgggacctaatacaatggctgcaggcggtggcgcaccaatggcagacaataacgaaggcgccgacggagtgggtagttcctcgggaaattggcattgcgattccacatggctgggcgacagagtcatcaccaccagcacccgaacctgggccctgcccacctacaacaaccacctctacaagcaaatctccaacgggacatcgggaggagccaccaacgacaacacctacttcggctacagcaccccctgggggtattttgactttaacagattccactgccacttttcaccacgtgactggcagcgactcatcaacaacaactggggattccggcccaagagactcagcttcaagctcttcaacatccaggtcaaggaggtcacgcagaatgaaggcaccaagaccatcgccaataacctcaccagcaccatccaggtgtttacggactcggagtaccagctgccgtacgttctcggctctgcccaccagggctgcctgcctccgttcccggcggacgtgttcatgattccccagtacggctacctaacactcaacaacggtagtcaggccgtgggacgctcctccttctactgcctggaatactttccttcgcagatgctgagaaccggcaacaacttccagtttacttacaccttcgaggacgtgcctttccacagcagctacgcccacagccagagcttggaccggctgatgaatcctctgattgaccagtacctgtactacttgtctcggactcaaacaacaggaggcacggcaaatacgcagactctgggcttcagccaaggtgggcctaatacaatggccaatcaggcaaagaactggctgccaggaccctgttaccgccaacaacgcgtctcaacgacaaccgggcaaaacaacaatagcaactttgcctggactgctgggaccaaataccatctgaatggaagaaattcattggctaatcctggcatcgctatggcaacacacaaagacgacgaggagcgtttttttcccagtaacgggatcctgatttttggcaaacaaaatgctgccagagacaatgcggattacagcgatgtcatgctcaccagcgaggaagaaatcaaaaccactaaccctgtggctacagaggaatacggtatcgtggcagataacttgcagcagcaaaacacggctcctcaaattggaactgtcaacagccagggggccttacccggtatggtctggcagaaccgggacgtgtacctgcagggtcccatctgggccaagattcctcacacggacggcaacttccacccgtctccgctgatgggcggctttggcctgaaacatcctccgcctcagatcctgatcaagaacacgcctgtacctgcggatcctccgaccaccttcaaccagtcaaagctgaactctttcatcacgcaatacagcaccggacaggtcagcgtggaaattgaatgggagctgcagaaggaaaacagcaagcgctggaaccccgagatccagtacacctccaactactacaaatctacaagtgtggactttgctgtaatacagaaggcgtgtactctgaaccccgccccattggcacccgttacctcacccgtaatctg

SEQ ID NO: 124 - DNA, 4393 bp, Adeno-associated virus 8
cagagagggagtggccaactccatcactaggggtagcgcgaagcgcctcccacgctgccgcgtcagcgctgacgtaaattacgtcataggggagtggtcctgtattagctgtcacgtgagtgcttttgcggcattttgcgacaccacgtggccatttgaggtatatatggccgagtgagcgagcaggatctccattttgaccgcgaaatttgaacgagcagcagccatgccgggcttctacgagatcgtgatcaaggtgccgagcgacctggacgagcacctgccgggcatttctgactcgtttgtgaactgggtggccgagaaggaatgggagctgcccccggattctgacatggatcggaatctgatcgagcaggcacccctgaccgtggccgagaagctgcagcgcgacttcctggtccaatggcgccgcgtgagtaaggccccggaggccctcttctttgttcagttcgagaagggcgagagctactttcacctgcacgttctggtcgagaccacgggggtcaagtccatggtgctaggccgcttcctgagtcagattcgggaaaagcttggtccagaccatctacccgcggggtcgagccccaccttgcccaactggttcgcggtgaccaaagacgcggtaatggcgccggcgggggggaacaaggtggtggacgagtgctacatccccaactacctcctgcccaagactcagcccgagctgcagtgggcgtggactaacatggaggagtatataagcgcgtgcttgaacctggccgagcgcaaacggctcgtggcgcagcacctgacccacgtcagccagacgcaggagcagaacaaggagaatctgaaccccaattctgacgcgcccgtgatcaggtcaaaaacctccgcgcgctatatggagctggtcgggtggctggtggaccggggcatcacctccgagaagcagtggatccaggaggaccaggcctcgtacatctccttcaacgccgcctccaactcgcggtcccagatcaaggccgcgctggacaatgccggcaagatcatggcgctgaccaaatccgcgcccgactacctggtggggccctcgctgcccgcggacattacccagaaccgcatctaccgcatcctcgctctcaacggctacgaccctgcctacgccggctccgtctttctcggctgggctcagaaaaagttcgggaaacgcaacaccatctggctgtttggacccgccaccaccggcaagaccaacattgcggaagccatcgcccacgccgtgcccttctacggctgcgtcaactggaccaatgagaactttcccttcaatgattgcgtcgacaagatggtgatctggtgggaggagggcaagatgacggccaaggtcgtggagtccgccaaggccattctcggcggcagcaaggtgcgcgtggaccaaaagtgcaagtcgtccgcccagatcgaccccacccccgtgatcgtcacctccaacaccaacatgtgcgccgtgattgacgggaacagcaccaccttcgagcaccagcagcctctccaggaccggatgtttaagttcgaactcacccgccgtctggagcacgactttggcaaggtgacaaagcaggaagtcaaagagttcttccgctgggccagtgatcacgtgaccgaggtggcgcatgagttttacgtcagaaagggcggagccagcaaaagacccgcccccgatgacgcggataaaagcgagcccaagcgggcctgcccctcagtcgcggatccatcgacgtcagacgcggaaggagctccggtggactttgccgacaggtaccaaaacaaatgttctcgtcacgcgggcatgcttcagatgctgtttccctgcaaaacgtgcgagagaatgaatcagaatttcaacatttgcttcacacacggggtcagagactgctcagagtgtttccccggcgtgtcagaatctcaaccggtcgtcagaaagaggacgtatcggaaactctgtgcgattcatcatctgctggggcgggctcccgagattgcttgctcggcctgcgatctggtcaacgtggacctggatgactgtgtttctgagcaataaatgacttaaaccaggtatggctgccgatggttatcttccagattggctcgaggacaacctctctgagggcattcgcgagtggtgggcgctgaaacctggagccccgaagcccaaagccaaccagcaaaagcaggacgacggccggggtctggtgcttcctggctacaagtacctcggacccttcaacggactcgacaagggggagcccgtcaacgcggcggacgcagcggccctcgagcacgacaaggcctacgaccagcagctgcaggcgggtgacaatccgtacctgcggtataaccacgccgacgccgagtttcaggagcgtctgcaagaagatacgtcttttgggggcaacctcgggcgagcagtcttccaggccaagaagcgggttctcgaacctctcggtctggttgaggaaggcgctaagacggctcctggaaagaagagaccggtagagccatcaccccagcgttctccagactcctctacgggcatcggcaagaaaggccaacagcccgccagaaaaagactcaattttggtcagactggcgactcagagtcagttccagaccctcaacctctcggagaacctccagcagcgccctctggtgtgggacctaatacaatggctgcaggcggtggcgcaccaatggcagacaataacgaaggcgccgacggagtgggtagttcctcgggaaattggcattgcgattccacatggctgggcgacagagtcatcaccaccagcacccgaacctgggccctgcccacctacaacaaccacctctacaagcaaatctccaacgggacatcgggaggagccaccaacgacaacacctacttcggctacagcaccccctgggggtattttgactttaacagattccactgccacttttcaccacgtgactggcagcgactcatcaacaacaactggggattccggcccaagagactcagcttcaagctcttcaacatccaggtcaaggaggtcacgcagaatgaaggcaccaagaccatcgccaataacctcaccagcaccatccaggtgtttacggactcggagtaccagctgccgtacgttctcggctctgcccaccagggctgcctgcctccgttcccggcggacgtgttcatgattccccagtacggctacctaacactcaacaacggtagtcaggccgtgggacgctcctccttctactgcctggaatactttccttcgcagatgctgagaaccggcaacaacttccagtttacttacaccttcgaggacgtgcctttccacagcagctacgcccacagccagagcttggaccggctgatgaatcctctgattgaccagtacctgtactacttgtctcggactcaaacaacaggaggcacggcaaatacgcagactctgggcttcagccaaggtgggcctaatacaatggccaatcaggcaaagaactggctgccaggaccctgttaccgccaacaacgcgtctcaacgacaaccgggcaaaacaacaatagcaactttgcctggactgctgggaccaaataccatctgaatggaagaaattcattggctaatcctggcatcgctatggcaacacacaaagacgacgaggagcgtttttttcccagtaacgggatcctgatttttggcaaacaaaatgctgccagagacaatgcggattacagcgatgtcatgctcaccagcgaggaagaaatcaaaaccactaaccctgtggctacagaggaatacggtatcgtggcagataacttgcagcagcaaaacacggctcctcaaattggaactgtcaacagccagggggccttacccggtatggtctggcagaaccgggacgtgtacctgcagggtcccatctgggccaagattcctcacacggacggcaacttccacccgtctccgctgatgggcggctttggcctgaaacatcctccgcctcagatcctgatcaagaacacgcctgtacctgcggatcctccgaccaccttcaaccagtcaaagctgaactctttcatcacgcaatacagcaccggacaggtcagcgtggaaattgaatgggagctgcagaaggaaaacagcaagcgctggaaccccgagatccagtacacctccaactactacaaatctacaagtgtggactttgctgttaatacagaaggcgtgtactctgaaccccgccccattggcacccgttacctcacccgtaatctgtaattgcctgttaatcaataaaccggttgattcgtttcagttgaactttggtctctgcg

SEQ ID NO: 125 - protein, 738 aa, Adeno-associated virus 8; identical to SEQ ID NO: 116

SEQ ID NO: 126 - protein, 737 aa, Adeno-associated virus 8
MAADGYLPDWLEDNLSEGIREWWALKPGAPKPKANQQKQDDGRGLVLPGYKYLGPFNGLDKGEPVNAADAAALEHDKAYDQQLQAGDNPYLRYNHADAEFQERLQEDTSFGGNLGRAVFQAKKRVLEPLGLVEEGAKTAPGKKRPVEPSPQRSPDSSTGIGKKGQQPARKRLNFGQTGDSESVPDPQPLGEPPAAPSGVGPNTMAAGGGAPMADNNEGADGVGSSSGNWHCDSTWLGDRVITTSTRTWALPTYNNHLYKQISNGTSGGATNDNTYFGYSTPWGYFDFNRFHCHFSPRDWQRLINNNWGFRPKRLSFKLFNIQVKEVTQNEGTKTIANNLTSTIQVFTDSEYQLPYVLGSAHQGCLPPFPADVFMIPQYGYLTLNNGSQAVGRSSFYCLEYFPSQMLRTGNNFQFTYTFEDVPFHSSYAHSQSLDRLMNPLIDQYLYYLSRTQTTGGTANTQTLGFSQGGPNTMANQAKNWLPGPCYRQQRVSTTTGQNNNSNFAWTAGTKYHLNGRNSLANPGIAMATHKDDEERFFPSNGILIFGKQNAARDNADYSDVMLTSEEEIKTTNPVATEEYGIVADNLQQQNTAPQIGTVNSQGALPGMVWQNRDVYLQGPIWAKIPHTDGNFHPSPLMGGFGLKHPPPQILIKNTPVPADPPTTFNQSKLNSFITQYSTGQVSVEIEWELQKENSKRWNPEIQYTSNYYKSTSVDFAVIQKACTLNPAPLAPVTSPVI

SEQ ID NO: 127 - DNA, 2217 bp, Artificial Sequence; identical to SEQ ID NO: 122
  source: /note="Description of Artificial Sequence: Synthetic polynucleotide"

SEQ ID NO: 128 - DNA, 2214 bp, Artificial Sequence
  source: /note="Description of Artificial Sequence: Synthetic polynucleotide"
atggctgccgatggttatcttccagattggctcgaggacaacctctctgagggcattcgcgagtggtgggcgctgaaacctggagccccgaagcccaaagccaaccagcaaaagcaggacgacggccggggtctggtgcttcctggctacaagtacctcggacccttcaacggactcgacaagggggagcccgtcaacgcggcggacgcagcggccctcgagcacgacaaggcctacgaccagcagctgcaggcgggtgacaatccgtacctgcggtataaccacgccgacgccgagtttcaggagcgtctgcaagaagatacgtcttttgggggcaacctcgggcgagcagtcttccaggccaagaagcgggttctcgaacctctcggtctggttgaggaaggcgctaagacggctcctggaaagaagagaccggtagagccatcaccccagcgttctccagactcctctacgggcatcggcaagaaaggccaacagcccgccagaaaaagactcaattttggtcagactggcgactcagagtcagttccagaccctcaacctctcggagaacctccagcagcgccctctggtgtgggacctaatacaatggctgcaggcggtggcgcaccaatggcagacaataacgaaggcgccgacggagtgggtagttcctcgggaaattggcattgcgattccacatggctgggcgacagagtcatcaccaccagcacccgaacctgggccctgcccacctacaacaaccacctctacaagcaaatctccaacgggacatcgggaggagccaccaacgacaacacctacttcggctacagcaccccctgggggtattttgactttaacagattccactgccacttttcaccacgtgactggcagcgactcatcaacaacaactggggattccggcccaagagactcagcttcaagctcttcaacatccaggtcaaggaggtcacgcagaatgaaggcaccaagaccatcgccaataacctcaccagcaccatccaggtgtttacggactcggagtaccagctgccgtacgttctcggctctgcccaccagggctgcctgcctccgttcccggcggacgtgttcatgattccccagtacggctacctaacactcaacaacggtagtcaggccgtgggacgctcctccttctactgcctggaatactttccttcgcagatgctgagaaccggcaacaacttccagtttacttacaccttcgaggacgtgcctttccacagcagctacgcccacagccagagcttggaccggctgatgaatcctctgattgaccagtacctgtactacttgtctcggactcaaacaacaggaggcacggcaaatacgcagactctgggcttcagccaaggtgggcctaatacaatggccaatcaggcaaagaactggctgccaggaccctgttaccgccaacaacgcgtctcaacgacaaccgggcaaaacaacaatagcaactttgcctggactgctgggaccaaataccatctgaatggaagaaattcattggctaatcctggcatcgctatggcaacacacaaagacgacgaggagcgtttttttcccagtaacgggatcctgatttttggcaaacaaaatgctgccagagacaatgcggattacagcgatgtcatgctcaccagcgaggaagaaatcaaaaccactaaccctgtggctacagaggaatacggtatcgtggcagataacttgcctgagcggacggcgatgagtcttccgggaactgtcaacagccagggggccttacccggtatggtctggcagaaccgggacgtgtacctgcagggtcccatctgggccaagattcctcacacggacggcaacttccacccgtctccgctgatgggcggctttggcctgaaacatcctccgcctcagatcctgatcaagaacacgcctgtacctgcggatcctccgaccaccttcaaccagtcaaagctgaactctttcatcacgcaatacagcaccggacaggtcagcgtggaaattgaatgggagctgcagaaggaaaacagcaagcgctggaaccccgagatccagtacacctccaactactacaaatctacaagtgtggactttgctgttaatacagaaggcgtgtactctgaaccccgccccattggcacccgttacctcacccgtaatctg

SEQ ID NO: 129 - protein, 738 aa, Artificial Sequence
  source: /note="Description of Artificial Sequence: Synthetic polypeptide"
MAADGYLPDWLEDNLSEGIREWWALKPGAPKPKANQQKQDDGRGLVLPGYKYLGPFNGLDKGEPVNAADAAALEHDKAYDQQLQAGDNPYLRYNHADAEFQERLQEDTSFGGNLGRAVFQAKKRVLEPLGLVEEGAKTAPGKKRPVEPSPQRSPDSSTGIGKKGQQPARKRLNFGQTGDSESVPDPQPLGEPPAAPSGVGPNTMAAGGGAPMADNNEGADGVGSSSGNWHCDSTWLGDRVITTSTRTWALPTYNNHLYKQISNGTSGGATNDNTYFGYSTPWGYFDFNRFHCHFSPRDWQRLINNNWGFRPKRLSFKLFNIQVKEVTQNEGTKTIANNLTSTIQVFTDSEYQLPYVLGSAHQGCLPPFPADVFMIPQYGYLTLNNGSQAVGRSSFYCLEYFPSQMLRTGNNFQFTYTFEDVPFHSSYAHSQSLDRLMNPLIDQYLYYLSRTQTTGGTANTQTLGFSQGGPNTMANQAKNWLPGPCYRQQRVSTTTGQNNNSNFAWTAGTKYHLNGRNSLANPGIAMATHKDDEERFFPSNGILIFGKQNAARDNADYSDVMLTSEEEIKTTNPVATEEYGIVADNLPERTAMSLPGTVNSQGALPGMVWQNRDVYLQGPIWAKIPHTDGNFHPSPLMGGFGLKHPPPQILIKNTPVPADPPTTFNQSKLNSFITQYSTGQVSVEIEWELQKENSKRWNPEIQYTSNYYKSTSVDFAVNTEGVYSEPRPIGTRYLTRNL

SEQ ID NO: 130 - DNA, 2214 bp, Artificial Sequence
  source: /note="Description of Artificial Sequence: Synthetic polynucleotide"
atggctgccgatggttatcttccagattggctcgaggacaacctctctgagggcattcgcgagtggtgggcgctgaaacctggagccccgaagcccaaagccaaccagcaaaagcaggacgacggccggggtctggtgcttcctggctacaagtacctcggacccttcaacggactcgacaagggggagcccgtcaacgcggcggacgcagcggccctcgagcacgacaaggcctacgaccagcagctgcaggcgggtgacaatccgtacctgcggtataaccacgccgacgccgagtttcaggagcgtctgcaagaagatacgtcttttgggggcaacctcgggcgagcagtcttccaggccaagaagcgggttctcgaacctctcggtctggttgaggaaggcgctaagacggctcctggaaagaagagaccggtagagccatcaccccagcgttctccagactcctctacgggcatcggcaagaaaggccaacagcccgccagaaaaagactcaattttggtcagactggcgactcagagtcagttccagaccctcaacctctcggagaacctccagcagcgccctctggtgtgggacctaatacaatggctgcaggcggtggcgcaccaatggcagacaataacgaaggcgccgacggagtgggtagttcctcgggaaattggcattgcgattccacatggctgggcgacagagtcatcaccaccagcacccgaacctgggccctgcccacctacaacaaccacctctacaagcaaatctccaacgggacatcgggaggagccaccaacgacaacacctacttcggctacagcaccccctgggggtattttgactttaacagattccactgccacttttcaccacgtgactggcagcgactcatcaacaacaactggggattccggcccaagagactcagcttcaagctcttcaacatccaggtcaaggaggtcacgcagaatgaaggcaccaagaccatcgccaataacctcaccagcaccatccaggtgtttacggactcggagtaccagctgccgtacgttctcggctctgcccaccagggctgcctgcctccgttcccggcggacgtgttcatgattccccagtacggctacctaacactcaacaacggtagtcaggccgtgggacgctcctccttctactgcctggaatactttccttcgcagatgctgagaaccggcaacaacttccagtttacttacaccttcgaggacgtgcctttccacagcagctacgcccacagccagagcttggaccggctgatgaatcctctgattgaccagtacctgtactacttgtctcggactcaaacaacaggaggcacggcaaatacgcagactctgggcttcagccaaggtgggcctaatacaatggccaatcaggcaaagaactggctgccaggaccctgttaccgccaacaacgcgtctcaacgacaaccgggcaaaacaacaatagcaactttgcctggactgctgggaccaaataccatctgaatggaagaaattcattggctaatcctggcatcgctatggcaacacacaaagacgacgaggagcgtttttttcccagtaacgggatcctgatttttggcaaacaaaatgctgccagagacaatgcggattacagcgatgtcatgctcaccagcgaggaagaaatcaaaaccactaaccctgtggctacagaggaatacggtatcgtggcagataacttgagttttagtcgtgcggttctttgtgatggaactgtcaacagccagggggccttacccggtatggtctggcagaaccgggacgtgtacctgcagggtcccatctgggccaagattcctcacacggacggcaacttccacccgtctccgctgatgggcggctttggcctgaaacatcctccgcctcagatcctgatcaagaacacgcctgtacctgcggatcctccgaccaccttcaaccagtcaaagctgaactctttcatcacgcaatacagcaccggacaggtcagcgtggaaattgaatgggagctgcagaaggaaaacagcaagcgctggaaccccgagatccagtacacctccaactactacaaatctacaagtgtggactttgctgttaatacagaaggcgtgtactctgaaccccgccccattggcacccgttacctcacccgtaatctg

SEQ ID NO: 131 - protein, 738 aa, Artificial Sequence
  source: /note="Description of Artificial Sequence: Synthetic polypeptide"
MAADGYLPDWLEDNLSEGIREWWALKPGAPKPKANQQKQDDGRGLVLPGYKYLGPFNGLDKGEPVNAADAAALEHDKAYDQQLQAGDNPYLRYNHADAEFQERLQEDTSFGGNLGRAVFQAKKRVLEPLGLVEEGAKTAPGKKRPVEPSPQRSPDSSTGIGKKGQQPARKRLNFGQTGDSESVPDPQPLGEPPAAPSGVGPNTMAAGGGAPMADNNEGADGVGSSSGNWHCDSTWLGDRVITTSTRTWALPTYNNHLYKQISNGTSGGATNDNTYFGYSTPWGYFDFNRFHCHFSPRDWQRLINNNWGFRPKRLSFKLFNIQVKEVTQNEGTKTIANNLTSTIQVFTDSEYQLPYVLGSAHQGCLPPFPADVFMIPQYGYLTLNNGSQAVGRSSFYCLEYFPSQMLRTGNNFQFTYTFEDVPFHSSYAHSQSLDRLMNPLIDQYLYYLSRTQTTGGTANTQTLGFSQGGPNTMANQAKNWLPGPCYRQQRVSTTTGQNNNSNFAWTAGTKYHLNGRNSLANPGIAMATHKDDEERFFPSNGILIFGKQNAARDNADYSDVMLTSEEEIKTTNPVATEEYGIVADNLSFSRAVLCDGTVNSQGALPGMVWQNRDVYLQGPIWAKIPHTDGNFHPSPLMGGFGLKHPPPQILIKNTPVPADPPTTFNQSKLNSFITQYSTGQVSVEIEWELQKENSKRWNPEIQYTSNYYKSTSVDFAVNTEGVYSEPRPIGTRYLTRNL

SEQ ID NO: 132 - DNA, 4385 bp, Adeno-associated virus 9
cagagagggagtggccaactccatcactaggggtaatcgcgaagcgcctcccacgctgccgcgtcagcgctgacgtagattacgtcataggggagtggtcctgtattagctgtcacgtgagtgcttttgcgacattttgcgacaccacatggccatttgaggtatatatggccgagtgagcgagcaggatctccattttgaccgcgaaatttgaacgagcagcagccatgccgggcttctacgagattgtgatcaaggtgccgagcgacctggacgagcacctgccgggcatttctgactcttttgtgaactgggtggccgagaaggaatgggagctgcccccggattctgacatggatcggaatctgatcgagcaggcacccctgaccgtggccgagaagctgcagcgcgacttcctggtccaatggcgccgcgtgagtaaggccccggaggccctcttctttgttcagttcgagaagggcgagagctactttcacctgcacgttctggtcgagaccacgggggtcaagtccatggtgctaggccgcttcctgagtcagattcgggagaagctggtccagaccatctaccgcgggatcgagccgaccctgcccaactggttcgcggtgaccaagacgcgtaatggcgccggcggggggaacaaggtggtggacgagtgctacatccccaactacctcctgcccaagactcagcccgagctgcagtgggcgtggactaacatggaggagtatataagcgcgtgcttgaacctggccgagcgcaaacggctcgtggcgcagcacctgacccacgtcagccagacgcaggagcagaacaaggagaatctgaaccccaattctgacgcgcccgtgatcaggtcaaaaacctccgcgcgctacatggagctggtcgggtggctggtggaccggggcatcacctccgagaagcagtggatccaggaggaccaggcctcgtacatctccttcaacgccgcctccaactcgcggtcccagatcaaggccgcgctggacaatgccggcaagatcatggcgctgaccaaatccgcgcccgactacctggtaggcccttcacttccggtggacattacgcagaaccgcatctaccgcatcctgcagctcaacggctacgaccctgcctacgccggctccgtctttctcggctgggcacaaaagaagttcgggaaacgcaacaccatctggctgtttgggccggccaccacgggaaagaccaacatcgcagaagccattgcccacgccgtgcccttctacggctgcgtcaactggaccaatgagaactttcccttcaacgattgcgtcgacaagatggtgatctggtgggaggagggcaagatgacggccaaggtcgtggagtccgccaaggccattctcggcggcagcaaggtgcgcgtggaccaaaagtgcaagtcgtccgcccagatcgaccccactcccgtgatcgtcacctccaacaccaacatgtgcgccgtgattgacgggaacagcaccaccttcgagcaccagcagcctctccaggaccggatgtttaagttcgaactcacccgccgtctggagcacgactttggcaaggtgacaaagcaggaagtcaaagagttcttccgctgggccagtgatcacgtgaccgaggtggcgcatgagttttacgtcagaaagggcggagccagcaaaagacccgcccccgatgacgcggataaaagcgagcccaagcgggcctgcccctcagtcgcggatccatcgacgtcagacgcggaaggagctccggtggactttgccgacaggtaccaaaacaaatgttctcgtcacgcgggcatgcttcagatgctgcttccctgcaaaacgtgcgagagaatgaatcagaatttcaacatttgcttcacacacggggtcagagactgctcagagtgtttccccggcgtgtcagaatctcaaccggtcgtcagaaagaggacgtatcggaaactctgtgcgattcatcatctgctggggcgggctcccgagattgcttgctcggcctgcgatctggtcaacgtggacctggatgactgtgtttctgagcaataaatgacttaaaccaggtatggctgccgatggttatcttccagattggctcgaggacaacctctctgagggcattcgcgagtggtgggcgctgaaacctggagccccgaagcccaaagccaaccagcaaaagcaggacgacggccggggtctggtgcttcctggctacaagtacctcggacccttcaacggactcgacaagggggagcccgtcaacgcggcggacgcagcggccctcgagcacggcaaggcctacgaccagcagctgcaggcgggtgacaatccgtacctgcggtataaccacgccgacgccgagtttcaggagcgtctgcaagaagatacgtcttttgggggcaacctcgggcgagcagtcttccaggccaagaagcgggttctcgaacctctcggtctggttgaggaaggcgctaagacggctcctggaaagaagagaccggtagagccatcaccccagcgttctccagactcctctacgggcatcggcaagaaaggccaacagcccgccagaaaaagactcaattttggtcagactggcgactcagagtcagttccagaccctcaacctctcggagaacctccagcagcgccctctggtgtgggacctaatacaatggctgcaggcggtggcgcaccaatggcagacaataacgaaggcgccgacggagtgggtaattcctcgggaaattggcattgcgattccacatggctgggggacagagtcatcaccaccagcacccgaacctgggcattgcccacctacaacaaccacctctacaagcaaatctccaatggaacatcgggaggaagcaccaacgacaacacctactttggctacagcaccccctgggggtattttgacttcaacagattccactgccacttctcaccacgtgactggcagcgactcatcaacaacaactggggattccggccaaagagactcaacttcaagctgttcaacatccaggtcaaggaggttacgacgaacgaaggcaccaagaccatcgccaataaccttaccagcaccgtccaggtctttacggactcggagtaccagctaccgtacgtcctaggctctgcccaccaaggatgcctgccaccgtttcctgcagacgtcttcatggttcctcagtacggctacctgacgctcaacaatggaagtcaagcgttaggacgttcttctttctactgtctggaatacttcccttctcagatgctgagaaccggcaacaactttcagttcagctacactttcgaggacgtgcctttccacagcagctacgcacacagccagagtctagatcgactgatgaaccccctcatcgaccagtacctatactacctggtcagaacacagacaactggaactgggggaactcaaactttggcattcagccaagcaggccctagctcaatggccaatcaggctagaaactgggtacccgggccttgctaccgtcagcagcgcgtctccacaaccaccaaccaaaataacaacagcaactttgcgtggacgggagctgctaaattcaagctgaacgggagagactcgctaatgaatcctggcgtggctatggcatcgcacaaagacgacgaggaccgcttctttccatcaagtggcgttctcatatttggcaagcaaggagccgggaacgatggagtcgactacagccaggtgctgattacagatgaggaagaaattaaagccaccaaccctgtagccacagaggaatacggagcagtggccatcaacaaccaggccgctaacacgcaggcgcaaactggacttgtgcataaccagggagttattcctggtatggtctggcagaaccgggacgtgtacctgcagggccctatttgggctaaaatacctcacacagatggcaactttcacccgtctcctctgatgggtggatttggactgaaacacccacctccacagattctaattaaaaatacaccagtgccggcagatcctcctcttaccttcaatcaagccaagctgaactctttcatcacgcagtacagcacgggacaagtcagcgtggaaatcgagtgggagctgcagaaagaaaacagcaagcgctggaatccagagatccagtatacttcaaactactacaaatctacaaatgtggactttgctgtcaataccaaaggtgtttactctgagcctcgccccattggtactcgttacctcacccgtaatttgtaattgcctgttaatcaataaaccggttaattcgtttcagttgaactttggtctctgcg

SEQ ID NO: 133 - DNA, 4382 bp, Adeno-associated virus 9
cagagagggagtggccaactccatcactaggggtaatcgcgaagcgcctcccacgctgccgcgtcagcgctgacgtagattacgtcataggggagtggtcctgtattagctgtcacgtgagtgcttttgcgacattttgcgacaccacatggccatttgaggtatatatggccgagtgagcgagcaggatctccattttgaccgcgaaatttgaacgagcagcagccatgccgggcttctacgagattgtgatcaaggtgccgagcgacctggacgagcacctgccgggcatttctgactcttttgtgaactgggtggccgagaaggaatgggagctgcccccggattctgacatggatcggaatctgatcgagcaggcacccctgaccgtggccgagaagctgtagcgcgacttcctggtccaatggcgccgcgtgagtaaggccccggaggccctcttctttgttcagttcgagaagggcgagagctactttcacctgcacgttctggtcgagaccacgggggtcaagtccatggtgctaggccgcttcctgagtcagattcgggagaagctggtccagaccatctaccgcgggatcgagccgaccctgcccaactggttcgcggtgaccaagacgcgtaatggcgccggcggggggaacaaggtggtggacgagtgctacatccccaactacctcctgcccaagactcagcccgagctgcagtgggcgtggactaacatggaggagtatataagcgcgtgcttgaacctggccgagcgcaaacggctcgtggcgcagcacctgacccacgtcagccagacgcaggagcagaacaaggagaatctgaaccccaattctgacgcgcccgtgatcaggtcaaaaacctccgcgcgctacatggagctggtcgggtggctggtggaccggggcatcacctccgagaagcagtggatccaggaggaccaggcctcgtacatctccttcaacgccgcctccaactcgcggtcccagatcaaggccgcgctggacaatgccggcaagatcatggcgctgaccaaatccgcgcccgactacctggtaggcccttcacttccggtggacattacgcagaaccgcatctaccgcatcctgcagctcaacggctacgaccctgcctacgccggctccgtctttctcggctgggcacaaaagaagttcgggaaacgcaacaccatctggctgtttgggccggccaccacgggaaagaccaacatcgcagaagccattgcccacgccgtgcccttctacggctgcgtcaactggaccaatgagaactttcccttcaacgattgcgtcgacaagatggtgatctggtgggaggagggcaagatgacggccaaggtcgtggagtccgccaaggccattctcggcggcagcaaggtgcgcgtggaccaaaagtgcaagtcgtccgcccagatcgaccccactcccgtgatcgtcacctccaacaccaacatgtgcgccgtgattgacgggaacagcaccaccttcgagcaccagcagcctctccaggaccggatgtttaagttcgaactcacccgccgtctggagcacgactttggcaaggtgacaaagcaggaagtcaaagagttcttccgctgggccagtgatcacgtgaccgaggtggcgcatgagttttacgtcagaaagggcggagccagcaaaagacccgcccccgatgacgcggataaaagcgagcccaagcgggcctgcccctcagtcgcggatccatcgacgtcagacgcggaaggagctccggtggactttgccgacaggtaccaaaacaaatgttctcgtcacgcgggcatgcttcagatgctgcttccctgcaaaacgtgcgagagaatgaatcagaatttcaacatttgcttcacacacggggtcagagactgctcagagtgtttccccggcgtgtcagaatctcaaccggtcgtcagaaagaggacgtatcggaaactctgtgcgattcatcatctgctggggcgggctcccgagattgcttgctcggcctgcgatctggtcaacgtggacctggatgactgtgtttctgagcaataaatgacttaaaccaggtatggctgccgatggttatcttccagattggctcgaggacaacctctctgagggcattcgcgagtggtgggacctgaaacctggagccccgaaacccaaagccaaccagcaaaagcaggacgacggccggggtctggtgcttcctggctacaagtacctcggacccttcaacggactcgacaagggggagcccgtcaacgcggcggacgcagcggccctcgagcacgacaaggcctacgaccagcagctcaaagcgggtgacaatccgtacctgcggtataaccacgccgacgccgagtttcaggagcgtctgcaagaagatacgtcttttgggggcaacctcgggcgagcagtcttccaggccaagaagcgggttctcgaacctctcggtctggttgaggaaggcgctaagacggctcctggaaagaagagaccggtagagcagtcaccccaagaaccagactcatcctcgggcatcggcaaatcaggccagcagcccgctaaaaagagactcaattttggtcagactggcgactcagagtcagtccccgacccacaacctctcggagaacctccagaagccccctcaggtctgggacctaatacaatggcttcaggcggtggcgctccaatggcagacaataacgaaggcgccgacggagtgggtaattcctcgggaaattggcattgcgattccacatggctgggggacagagtcatcaccaccagcacccgaacctgggcattgcccacctacaacaaccacctctacaagcaaatctccaatggaacatcgggaggaagcaccaacgacaacacctactttggctacagcaccccctgggggtattttgacttcaacagattccactgccacttctcaccacgtgactggcagcgactcatcaacaacaactggggattccggccaaagagactcaacttcaagctgttcaacatccaggtcaaggaggttacgacgaacgaaggcaccaagaccatcgccaataaccttaccagcaccgtccaggtctttacggactcggagtaccagctaccgtacgtcctaggctctgcccaccaaggatgcctgccaccgtttcctgcagacgtcttcatggttcctcagtacggctacctgacgctcaacaatggaagtcaagcgttaggacgttcttctttctactgtctggaatacttcccttctcagatgctgagaaccggcaacaactttcagttcagctacactttcgaggacgtgcctttccacagcagctacgcacacagccagagtctagatcgactgatgaaccccctcatcgaccagtacctatactacctggtcagaacacagacaactggaactgggggaactcaaactttggcattcagccaagcaggccctagctcaatggccaatcaggctagaaactgggtacccgggccttgctaccgtcagcagcgcgtctccacaaccaccaaccaaaataacaacagcaactttgcgtggacgggagctgctaaattcaagctgaacgggagagactcgctaatgaatcctggcgtggctatggcatcgcacaaagacgacgaggaccgcttctttccatcaagtggcgttctcatatttggcaagcaaggagccgggaacgatggagtcgactacagccaggtgctgattacagatgaggaagaaattaaagccaccaaccctgtagccacagaggaatacggagcagtggccatcaacaaccaggccgctaacacgcaggcgcaaactggacttgtgcataaccagggagttattcctggtatggtctggcagaaccgggacgtgtacctgcagggccctatttgggctaaaatacctcacacagatggcaactttcacccgtctcctctgatgggtggatttggactgaaacacccacctccacagattctaattaaaaatacaccagtgccggcagatcctcctcttaccttcaatcaagccaagctgaactctttcatcacgcagtacagcacgggacaagtcagcgtggaaatcgagtgggagctgcagaaagaaaacagcaagcgctggaatccagagatccagtatacttcaaactactacaaatctacaaatgtggactttgctgtcaataccgaaggtgtttactctgagcctcgccccattggtactcgttacctcacccgtaatttgtaattgcctgttaatcaataaaccggttaattcgtttcagttgaactttggtctctgcg

SEQ ID NO: 134 - protein, 736 aa, Adeno-associated virus 9
MAADGYLPDWLEDNLSEGIREWWALKPGAPQPKANQQHQDNARGLVLPGYKYLGPGNGLDKGEPVNAADAAALEHDKAYDQQLKAGDNPYLKYNHADAEFQERLKEDTSFGGNLGRAVFQAKKRLLEPLGLVEEAAKTAPGKKRPVEQSPQEPDSSAGIGKSGAQPAKKRLNFGQTGDTESVPDPQPIGEPPAAPSGVGSLTMASGGGAPVADNNEGADGVGSSSGNWHCDSQWLGDRVITTSTRTWALPTYNNHLYKQISNSTSGGSSNDNAYFGYSTPWGYFDFNRFHCHFSPRDWQRLINNNWGFRPKRLNFKLFNIQVKEVTDNNGVKTIANNLTSTVQVFTDSDYQLPYVLGSAHEGCLPPFPADVFMIPQYGYLTLNDGSQAVGRSSFYCLEYFPSQMLRTGNNFQFSYEFENVPFHSSYAHSQSLDRLMNPLIDQYLYYLSKTINGSGQNQQTLKFSVAGPSNMAVQGRNYIPGPSYRQQRVSTTVTQNNNSEFAWPGASSWALNGRNSLMNPGPAMASHKEGEDRFFPLSGSLIFGKQGTGRDNVDADKVMITNEEEIKTTNPVATESYGQVATNHQSAQAQAQTGWVQNQGILPGMVWQDRDVYLQGPIWAKIPHTDGNFHPSPLMGGFGMKHPPPQILIKNTPVPADPPTAFNKDKLNSFITQYSTGQVSVEIEWELQKENSKRWNPEIQYTSNYYKSNNVEFAVNTEGVYSEPRPIGTRYLTRNL

SEQ ID NO: 135 - protein, 736 aa, Adeno-associated virus 9
MAADGYLPDWLEDNLSEGIREWWDLKPGAPKPKANQQKQDDGRGLVLPGYKYLGPFNGLDKGEPVNAADAAALEHDKAYDQQLKAGDNPYLRYNHADAEFQERLQEDTSFGGNLGRAVFQAKKRVLEPLGLVEEGAKTAPGKKRPVEQSPQEPDSSSGIGKSGQQPAKKRLNFGQTGDSESVPDPQPLGEPPEAPSGLGPNTMASGGGAPMADNNEGADGVGNSSGNWHCDSTWLGDRVITTSTRTWALPTYNNHLYKQISNGTSGGSTNDNTYFGYSTPWGYFDFNRFHCHFSPRDWQRLINNNWGFRPKRLNFKLFNIQVKEVTTNEGTKTIANNLTSTVQVFTDSEYQLPYVLGSAHQGCLPPFPADVFMVPQYGYLTLNNGSQALGRSSFYCLEYFPSQMLRTGNNFQFSYTFEDVPFHSSYAHSQSLDRLMNPLIDQYLYYLVRTQTTGTGGTQTLAFSQAGPSSMANQARNWVPGPCYRQQRVSTTTNQNNNSNFAWTGAAKFKLNGRDSLMNPGVAMASHKDDEDRFFPSSGVLIFGKQGAGNDGVDYSQVLITDEEEIKATNPVATEEYGAVAINNQAANTQAQTGLVHNQGVIPGMVWQNRDVYLQGPIWAKIPHTDGNFHPSPLMGGFGLKHPPPQILIKNTPVPADPPLTFNQAKLNSFITQYSTGQVSVEIEWELQKENSKRWNPEIQYTSNYYKSTNVDFAVNTEGVYSEPRPIGTRYLTRNL

SEQ ID NO: 136 - protein, 623 aa, Adeno-associated virus 9
MPGFYEIVIKVPSDLDEHLPGISDSFVNWVAEKEWELPPDSDMDRNLIEQAPLTVAEKLQRDFLVQWRRVSKAPEALFFVQFEKGESYFHLHVLVETTGVKSMVLGRFLSQIREKLVQTIYRGIEPTLPNWFAVTKTRNGAGGGNKVVDECYIPNYLLPKTQPELQWAWTNMEEYISACLNLAERKRLVAQHLTHVSQTQEQNKENLNPNSDAPVIRSKTSARYMELVGWLVDRGITSEKQWIQEDQASYISFNAASNSRSQIKAALDNAGKIMALTKSAPDYLVGPSLPVDITQNRIYRILQLNGYDPAYAGSVFLGWAQKKFGKRNTIWLFGPATTGKTNIAEAIAHAVPFYGCVNWTNENFPFNDCVDKMVIWWEEGKMTAKVVESAKAILGGSKVRVDQKCKSSAQIDPTPVIVTSNTNMCAVIDGNSTTFEHQQPLQDRMFKFELTRRLEHDFGKVTKQEVKEFFRWASDHVTEVAHEFYVRKGGASKRPAPDDADKSEPKRACPSVADPSTSDAEGAPVDFADRYQNKCSRHAGMLQMLLPCKTCERMNQNFNICFTHGVRDCSECFPGVSESQPVVRKRTYRKLCAIHHLLGRAPEIACSACDLVNVDLDDCVSEQ

SEQ ID NO: 137 - DNA, 2211 bp, Artificial Sequence
  source: /note="Description of Artificial Sequence: Synthetic polynucleotide"
atggctgccgatggttatcttccagattggctcgaggacaaccttagtgaaggaattcgcgagtggtgggctttgaaacctggagcccctcaacccaaggcaaatcaacaacatcaagacaacgctcgaggtcttgtgcttccgggttacaaataccttggacccggcaacggactcgacaagggggagccggtcaacgcagcagacgcggcggccctcgagcacgacaaggcctacgaccagcagctcaaggccggagacaacccgtacctcaagtacaaccacgccgacgccgagttccaggagcggctcaaagaagatacgtcttttgggggcaacctcgggcgagcagtcttccaggccaaaaagaggcttcttgaacctcttggtctggttgaggaagcggctaagacggctcctggaaagaagaggcctgtagagcagtctcctcaggaaccggactcctccgcgggtattggcaaatcgggtgcacagcccgctaaaaagagactcaatttcggtcagactggcgacacagagtcagtcccagaccctcaaccaatcggagaacctcccgcagccccctcaggtgtgggatctcttacaatggcttcaggtggtggcgcaccagtggcagacaataacgaaggtgccgatggagtgggtagttcctcgggaaattggcattgcgattcccaatggctgggggacagagtcatcaccaccagcacccgaacctgggccctgcccacctacaacaatcacctctacaagcaaatctccaacagcacatctggaggatcttcaaatgacaacgcctacttcggctacagcaccccctgggggtattttgacttcaacagattccactgccacttctcaccacgtgactggcagcgactcatcaacaacaactggggattccggcctaagcgactcaacttcaagctcttcaacattcaggtcaaagaggttacggacaacaatggagtcaagaccatcgccaataaccttaccagcacggtccaggtcttcacggactcagactatcagctcccgtacgtgctcgggtcggctcacgagggctgcctcccgccgttcccagcggacgttttcatgattcctcagtacgggtatctgacgcttaatgatggaagccaggccgtgggtcgttcgtccttttactgcctggaatatttcccgtcgcaaatgctaagaacgggtaacaacttccagttcagctacgagtttgagaacgtacctttccatagcagctacgctcacagccaaagcctggaccgactaatgaatccactcatcgaccaatacttgtactatctctcaaagactattaacggttctggacagaatcaacaaacgctaaaattcagtgtggccggacccagcaacatggctgtccagggaagaaactacatacctggacccagctaccgacaacaacgtgtctcaaccactgtgactcaaaacaacaacagcgaatttgcttggcctggagcttcttcttgggctctcaatggacgtaatagcttgatgaatcctggacctgctatggccagccacaaagaaggagaggaccgtttctttcctttgtctggatctttaatttttggcaaacaaggaactggaagagacaacgtggatgcggacaaagtcatgataaccaacgaagaagaaattaaaactactaacccggtagcaacggagtcctatggacaagtggccacaaaccaccagagtgcccaagcacaggcgcagaccggctgggttcaaaaccaaggaatacttccgggtatggtttggcaggacagagatgtgtacctgcaaggacccatttgggccaaaattcctcacacggacggcaactttcacccttctccgctgatgggagggtttggaatgaagcacccgcctcctcagatcctcatcaaaaacacacctgtacctgcggatcctccaacggccttcaacaaggacaagctgaactctttcatcacccagtattctactggccaagtcagcgtggagatcgagtgggagctgcagaaggaaaacagcaagcgctggaacccggagatccagtacacttccaactattacaagtctaataatgttgaatttgctgttaatactgaaggtgtatatagtgaaccccgccccattggcaccagatacctgactcgtaatctgtaa

SEQ ID NO: 138 - protein, 736 aa, Artificial Sequence; identical to SEQ ID NO: 134
  source: /note="Description of Artificial Sequence: Synthetic polypeptide"

SEQ ID NO: 139 - DNA, 2460 bp, Artificial Sequence
  source: /note="Description of Artificial Sequence: Synthetic polynucleotide"
ggtaattcctccggaaattggcattgcgattccacatggctgggcgaccgagtcattaccaccagcacccggacttgggccctgcccacctacaacaaccacctctacaagcaaatctccagccaatcgggtgccaccaacgacaaccactacttcggctacagcaccccttgggggtattttgatttcaacagattccactgccatttctcaccacgtgactggcagcgactcatcaacaacaactggggattcatggctgccgatggttatcttccagattggctcgaggacactctctctgaaggaatcagacagtggtggaagctcaaacctggcccaccaccgccgaaacctaaccaacaacaccgggacgacagtaggggtcttgtgcttcctgggtacaagtacctcggacccttcaacggactcgacaaaggagagccggtcaacgaggcagacgccgcggccctcgagcacgacaaagcctacgaccaccagctcaagcaaggggacaacccgtacctcaaatacaaccacgcggacgctgaatttcaggagcgtcttcaagaagatacgtctttcgggggcaacctcgggcgagcagtcttccaggccaaaaagagggtactcgagcctcttggtctggttgaggaagctgttaagacggctcctggaaaaaagagacctatagagcagtctcctgcagaaccggactcttcctcgggcatcggcaaatcaggccagcagcccgctaagaaaagactcaattttggtcagactggcgacacagagtcagtcccagaccctcaaccaatcggagaaccccccgcagccccctctggtgtgggatctaatacaatggcttcaggcggtggggcaccaatggcagacaataacgaaggcgccgacggagtgggtaattcctcgggaaattggcattgcgattccacatggatgggcgacagagttatcaccaccagcacaagaacctgggccctccccacctacaataatcacctctacaagcaaatctccagcgaatcgggagccaccaacgacaaccactacttcggctacagcaccccctgggggtattttgactttaacagattccactgtcacttctcaccacgtgactggcagcgactcatcaacaacaactggggatttagacccaagaaactcaatttcaagctcttcaacatccaagtcaaggaggtcacgcagaatgatggaaccacgaccatcgccaataaccttaccagcacggtgcaggtcttcacagactctgagtaccagctgccctacgtcctcggttcggctcaccagggctgccttccgccgttcccagcagacgtcttcatgattcctcagtacggctacttgactctgaacaatggcagccaagcggtaggacgttcttcattctactgtctagagtattttccctctcagatgctgaggacgggaaacaacttcaccttcagctacacttttgaagacgtgcctttccacagcagctacgcgcacagccagagtctggatcggctgatgaatcctctcattgaccagtacctgtattacctgagcaaaactcagggtacaagtggaacaacgcagcaatcgagactgcagttcagccaagctgggcctagctccatggctcagcaggccaaaaactggctaccgggacccagctaccgacagcagcgaatgtctaagacggctaatgacaacaacaacagtgaatttgcttggactgcagccaccaaatattacctgaatggaagaaattctctggtcaatcccgggcccccaatggccagtcacaaggacgatgaggaaaagtatttccccatgcacggaaatctcatctttggaaaacaaggcacaggaactaccaatgtggacattgaatcagtgcttattacagacgaagaagaaatcagaacaactaatcctgtggctacagaacaatacggacaggttgccaccaaccatcagagtcagaacaccacagcttcctatggaagtgtggacagccagggaatcttacctggaatggtgtggcaggaccgcgatgtctatcttcaaggtcccatttgggccaaaactcctcacacggacggacactttcatccttctccgctcatgggaggctttggactgaaacaccctcctccccagatcctgatcaaaaacacacctgtgccagcgaatcccgcgaccactttcactcctggaaagtttgcttcgttcattacccagtattccaccggacaggtcagcgtggaaatagagtgggagctgcagaaagaaaacagcaaacgctggaacccagaaattcagtacacctccaactacaacaagtcggtgaatgtggagtttaccgtggacgcaaacggtgtttattctgaaccccgccctattggcactcgttaccttacccggaacttg

SEQ ID NO: 140 - DNA, 3123 bp, Artificial Sequence
  source: /note="Description of Artificial Sequence: Synthetic polynucleotide"
gaattcgccctttctacggctgcgtcaactggaccaatgaaaactttcccttcaacgattgcgtcgacaagatggtgatctggtgggaggagggaaagatgaccgccaaggtcgtggaatctgccaaagccattctgggtggaggcaaggttcgtgtggaccagaaatgcaagtcttcggcccagatcgacccgactccggtgattgtcacctctaacaccaacatgtgcgccgtgattgacggaaactcgaccaccttcgagcaccagcagccgttgcaagaccggatgttcaaatttgaacttacccgccgtttggatcatgactttgggaaggtcaccaagcaggaagtcaaagactttttccggtgggctcaagatcacgtgactgaggtggagcatgagttctacgtcaaaaagggtggagccaagaaaaggcccgcccccgatgatgtatatataaatgagcccaagcgggcgcgcgagtcagttgcgcagccatcgacgtcagacgcggaagcttcgataaactacgcggacaggtaccaaaacaaatgttctcgtcacgtgggcatgaatctgatgctgtttccctgtcgacaatgcgaaagaatgaatcagaattcaaatatctgcttcacacacgggcaaaaagactgtttggaatgctttcccgtgtcagaatctcaacccgtttctgtcgtcagaaaaacgtatcagaaactttgttacattcatcatatcatgggaaaagtaccagacgcctgcactgcctgcgacctggtaaatgtggacttggatgactgtatttctgagcaataaatgacttaaatcaggtatggctgctgacggttatcttccagattggctcgaggacactctctctgaaggaatcagacagtggtggaagctcaaacctggcccaccaccgccgaaacctaaccaacaacaccgggacgacagtaggggtcttgtgcttcctgggtacaagtacctcggacccttcaacggactcgacaaaggagagccggtcaacgaggcagacgccgcggccctcgagcacgacaaagcctacgaccaccagctcaagcaaggggacaacccgtacctcaaatacaaccacgcggacgctgaatttcaggagcgtcttcaagaagatacgtctttcgggggcaacctcgggcgagcagtcttccaggccaaaaagagggtactcgagcctcttggtctggttgaggaagctgttaagacggctcctggaaaaaagagacctatagagcagtctcctgcagaaccggactcttcctcgggcatcggcaaatcaggccagcagcccgctaagaaaagactcaattttggtcagactggcgacacagagtcagtcccaggccctcaaccaatcggagaaccccccgcagccccctctggtgtgggatctaatacaatggcttcaggcggtggggcaccaatggcagacaataacgaaggcgccgacggagtgggtaattcctcgggaaattggcattgcgattccacatggatgggcgacagagttatcaccaccagcacaagaacctgggccctccccacctacaataatcacctctacaagcaaatctccagcgaatcgggagccaccaacgacaaccactacttcggctacagcaccccctgggggtattttgactttaacagattccactgtcacttctcaccacgtgactggcagcgactcatcaacaacaactggggatttagacccaagaaactcaatttcaagctcttcaacatccaagtcaaggaggtcacgcagaatgatggaaccacgaccatcgccaataaccttaccagcgcggtgcaggtcttcacagactctgagtaccagctgccctacgtcctcggttcggctcaccagggctgccttccgccgttcccagcagacgtcttcatgattcctcagtacggctacttgactctgaacaatggcagccaagcggtaggacgttcttcattctactgtctagagtattttccctctcagatgctgaggacgggaaacaacttcaccttcagctacacttttgaagacgtgcctttccacagcagctacgcgcacagccagagtctggatcggctgatgaatcctctcattgaccagtacctgtattacctgagcaaaactcagggtacaagtggaacaacgcagcaatcgagactgcagttcagccaagctgggcctagctccatggctcagcaggccaaaaactggctaccgggacccagctaccgacagcagcgaatgtctaagacggctaatgacaacaacaacagtgaatttgcttggactgcagccaccaaatattacctgaatggaagaaattctctggtcaatcccgggcccccagtggccagtcacaaggacgatgaggaaaagtatttccccatgcacggaaatctcatctttggaaaacaaggcacaggaactaccaatgtggacattgaatcagtgcttattacagacgaagaagaaatcagaacaactaatcctgtggctacagaacaatacggacaggttgccaccaaccatcagagtcagaacaccacagcttcctatggaagtgtggacagccagggaatcttacctggaatggtgtggcaggaccgcgatgtctatcttcaaggtcccatttgggccaaaactcctcacacggacggacactttcatccttctccgctcatgggaggctttggactgaaacaccctcctccccagatcctgatcaaaaacacacctgtgccagcgaatcccgcgaccactttcactcctggaaagtttgcttcgttcattacccagtattccacctgacaggtcagcgtggaaatagagtgggagctgcagaaagaaaacagcaaacgctggaacccagaaattcagtacacctccaactacaacaagtcggtgaatgtggagtttaccgtggacgcaaacggtgtttattctgaaccccgccctattggcactcgttaccttacccggaacttgtaatttcctgttaatgaataagccgatttatgcgtttcagttgaactttggtctctgcgaagggcgaattcgtttaaacct

SEQ ID NO: 141 - protein, 735 aa, Artificial Sequence
  source: /note="Description of Artificial Sequence: Synthetic polypeptide"
MAADGYLPDWLEDTLSEGIRQWWKLKPGPPPPKPNQQHRDDSRGLVLPGYKYLGPFNGLDKGEPVNEADAAALEHDKAYDHQLKQGDNPYLKYNHADAEFQERLQEDTSFGGNLGRAVFQAKKRVLEPLGLVEEAVKTAPGKKRPIEQSPAEPDSSSGIGKSGQQPAKKRLNFGQTGDTESVPGPQPIGEPPAAPSGVGSNTMASGGGAPMADNNEGADGVGNSSGNWHCDSTWMGDRVITTSTRTWALPTYNNHLYKQISSESGATNDNHYFGYSTPWGYFDFNRFHCHFSPRDWQRLINNNWGFRPKKLNFKLFNIQVKEVTQNDGTTTIANNLTSAVQVFTDSEYQLPYVLGSAHQGCLPPFPADVFMIPQYGYLTLNNGSQAVGRSSFYCLEYFPSQMLRTGNNFTFSYTFEDVPFHSSYAHSQSLDRLMNPLIDQYLYYLSKTQGTSGTTQQSRLQFSQAGPSSMAQQAKNWLPGPSYRQQRMSKTANDNNNSEFAWTAATKYYLNGRNSLVNPGPPVASHKDDEEKYFPMHGNLIFGKQGTGTTNVDIESVLITDEEEIRTTNPVATEQYGQVATNHQSQNTTASYGSVDSQGILPGMVWQDRDVYLQGPIWAKTPHTDGHFHPSPLMGGFGLKHPPPQILIKNTPVPANPATTFTPGKFASFITQYSTGQVSVEIEWELQKENSKRWNPEIQYTSNYNKSVNVEFTVDANGVYSEPRPIGTRYLTRNL

SEQ ID NO: 142 - DNA, 3123 bp, Artificial Sequence
  source: /note="Description of Artificial Sequence: Synthetic polynucleotide"
gaattcgccctttctacggctgcgtcaactggaccaatgaaaactttcccttcaacgattgcgtcgacaagatggtgatctggtgggaggagggaaagatgaccgccaaggtcgtggaatctgccaaagccattctgggtggaagcaaggttcgtgtggaccagaaatgcaagtcttcggcccagatcgacccgactccggtgattgtcacctctaacaccaacatgtgcgccgtgattgacggaaactcgaccaccttcgagcaccagcagccgttgcaagaccggatgttcaaatttgaacttacccgccgtttggatcatgactttgggaaggtcaccaagcaggaagtcaaagactttttccggtgggctcaagatcacgtgactgaggtggagcatgagttctacgtcaaaaagggtggagccaagaaaaggcccgcccccgatgatgtatatataaatgagcccaagcgggcgcgcgagtcagttgcgcagccatcgacgtcagacgcggaagcttcgataaactacgcgggcaggtaccaaaacaaatgttctcgtcacgtgggcatgaatctgatgctgtttccctgtcgacaatgcgaaagaatgaatcagaattcaaatatctgcttcacacacgggcaaaaagactgtttggaatgctttcccgtgtcagaatctcaacccgtttctgtcgtcagaaaaacgtatcagaaactttgttacattcatcatatcatgggaaaagaaccagacgcctgcactgcctgcgacctggtaaatgtggacttggatgactgtatttctgagcaataaatgacttaaatcaggtatggctgctgacggttatcttccagattggctcgaggacactctctctgaaggaatcagacagtggtggaagctcaaacctggcccaccaccgccgaaacctaaccaacaacaccgggacgacagtaggggtcttgtgcttcctgggtacaagtacctcggacccttcaacggactcgacaaaggagagccggtcaacgaggcagacgccgcggccctcgagcacgacaaagcctacgaccaccagctcaagcaaggggacaacccgtacctcaaatacaaccacgcggacgctgaatttcaggagcgtcttcaagaagatacgtctttcgggggcaacctcgggcgagcagtcttccaggccaaaaagagggtactcgagcctcttggtctggttgaggaagctgttaagacggctcctggaaaaaagagacctatagagcagtctcctgcagaaccggactcttcctcgggcatcggcgaatcaggccagcagcccgctaagaaaagactcaattttggtcagactggcgacacagagtcagtcccagaccctcaaccaatcggagaaccccccgcagccccctctggtgtgggatctaatacaatggcttcaggcggtggggcaccaatggcagacgataacgaaggcgccgacggagtgggtaattcctcgggaaattggcattgcgattccacatggatgggcgacagagttatcaccaccagcacaagaacctgggccctccccacctacaataatcacctctacaagcaaatctccagcgaatcgggagccaccaacgacaaccactacttcggctacagcaccccctgggggtattttgactttaacagattccactgtcacttctcaccacgtgactggcagcgactcatcaacaacaactggggatttagacccaagaaactcaatttcaagctcttcaacatccaagtcaaggaggtcacgcagaatgatggaaccacgaccatcgccaataaccttaccagcacggtgcaggtcttcacagactctgagtaccagctgccctacgtcctcggttcggctcaccagggctgccttccgccgttcccagcagacgtcttcatgattcctcagtacggctacttgactctgaacaatggcagccaagcggtaggacgttcttcattctactgtctagagtattttccctctcagatgctgaggacgggaaacaacttcaccttcagctacacttttgaagacgtgcctttccacagcagctacgcgcacagccagagtctggatcggctgatgaatcctctcattgaccagtacctgtattacctgagcaaaactcagggtacaagtggaacaacgcagcaatcgagactgcagttcagccaagctgggcctagctccatggctcagcaggccaaaaactggctaccgggacccagctaccgacagcagcgaatgtctaagacggctaatgacaacaacaacagtgaatttgcttggactgcagccaccaaatattacctgaatggaagaaattctctggtcaatcccgggcccccaatggccagtcacaaggacgatgaggaaaagtatttccccatgcacggaaatctcatctttggaaaacaaggcacaggaactaccaatgtggacattgaatcagtgcttattacagacgaagaagaaatcagaacaactaatcctgtggctacagaacaatacggacaggttgccaccaaccatcagagtcaggacaccacagcttcctatggaagtgtggacagccagggaatcttacctggaatggtgtggcaggaccgcgatgtctatcttcaaggtcccatttgggccaaaactcctcacacggacggacactttcatccttctccgctcatgggaggctttggactgaaacaccctcctccccagatcctgatcaaaaacacacctgtgccagcgaatcccgcgaccactttcactcctggaaagtttgcttcgttcattacccagtattccaccggacaggtcagcgtggaaatagagtgggagctgcagaaagaaaacagcaaacgctggaacccagaaattcagtacacctccaactacaacaagtcggtgaatgtggagtttaccgtggacgcaaacggtgtttattctgaaccccgccctattggcactcgttaccttacccggaacttgtaatttcctgttaatgaataaaccgatttatgcgtttcagttgaactttggtctctgcgaagggcgaattcgcggccgcta

SEQ ID NO: 143 - protein, 735 aa, Artificial Sequence
  source: /note="Description of Artificial Sequence: Synthetic polypeptide"
MAADGYLPDWLEDTLSEGIRQWWKLKPGPPPPKPNQQHRDDSRGLVLPGYKYLGPFNGLDKGEPVNEADAAALEHDKAYDHQLKQGDNPYLKYNHADAEFQERLQEDTSFGGNLGRAVFQAKKRVLEPLGLVEEAVKTAPGKKRPIEQSPAEPDSSSGIGESGQQPAKKRLNFGQTGDTESVPDPQPIGEPPAAPSGVGSNTMASGGGAPMADDNEGADGVGNSSGNWHCDSTWMGDRVITTSTRTWALPTYNNHLYKQISSESGATNDNHYFGYSTPWGYFDFNRFHCHFSPRDWQRLINNNWGFRPKKLNFKLFNIQVKEVTQNDGTTTIANNLTSTVQVFTDSEYQLPYVLGSAHQGCLPPFPADVFMIPQYGYLTLNNGSQAVGRSSFYCLEYFPSQMLRTGNNFTFSYTFEDVPFHSSYAHSQSLDRLMNPLIDQYLYYLSKTQGTSGTTQQSRLQFSQAGPSSMAQQAKNWLPGPSYRQQRMSKTANDNNNSEFAWTAATKYYLNGRNSLVNPGPPMASHKDDEEKYFPMHGNLIFGKQGTGTTNVDIESVLITDEEEIRTTNPVATEQYGQVATNHQSQDTTASYGSVDSQGILPGMVWQDRDVYLQGPIWAKTPHTDGHFHPSPLMGGFGLKHPPPQILIKNTPVPANPATTFTPGKFASFITQYSTGQVSVEIEWELQKENSKRWNPEIQYTSNYNKSVNVEFTVDANGVYSEPRPIGTRYLTRNL

SEQ ID NO: 144 - DNA, 3113 bp, Artificial Sequence
  source: /note="Description of Artificial Sequence: Synthetic polynucleotide"
gaattcgccctttctacggctgcgtcaactggaccaatgaaaactttcccttcaacgattgcgtcgacaagatggtgatctggtgggaggagggaaagatgaccgccaaggtcgtggaatctgccaaagccattctgggtggaagcaaggttcgtgtggaccagaaatgcaagtcttcggcccagatcgacccgactccggtgattgtcacctctaacaccaacatgtgcgccgtgattgacggaaactcgaccaccttcgagcaccagcagccgttgcaagaccggatgttcaaatttgaacttacccgccgtttggatcatgactttgggaaggtcaccaagcaggaagtcaaagactttttccggtgggctcaagatcacgtgactgaggtggagcatgagttctacgtcaaaaagggtggagccaagaaaaggcccgcccccgatgatgtatatataaatgagcccaagcgggcgcgcgagtcagttgcgcagccatcgacgtcagacgcggaagcttcgataaactacgcggacaggtaccaaaacaaatgttctcgtcacgtgggcatgaatctgatgctgtttccctgtcgacaatgcgaaagaatgaatcagaattcaaatatctgcttcacacacgggcaaaaagactgtttggaatgctttcccgtgtcagaatctcaacccgttcctgtcgtcagaaaaacgtatcagaaactttgttacattcatcatatcatgggaaaagtaccagacgcctgcactgcctgcgacctggtaaatgtggacttggatgactgtatttctgagcaataaatgacttaaatcaggtatggctgctgacggttatcttccagattggctcgaggacactctctctgaaggaatcagacagtggtggaagctcaaacctggcccaccaccgccgaaacctaaccaacaacaccgggacgacagtaggggtcttgtgcttcctgggtacaagtacctcggacccttcaacggactcgacaaaggagagccggtcaacgaggcagacgccgcggccctcgagcacgacaaagcctacgaccaccagctcaagcaaggggacaacccgtacctcaaatacaaccacgcggacgctgaatttcaggagcgtcttcaagaagatacgtctttcgggggcaacctcgggcgagcagtcttccaggccaaaaagagggtactcgagcctcttggtctggttgaggaagctgttaagacggctcctggaaaaaagagacctatagagcagtctcctgcagaaccggactcttcctcgggcatcggcaaatcaggccagcagcccgctaagaaaagactcaattttggtcagactggcgacacagagtcagtcccagaccctcaaccaatcggagaaccccccgcagccccctctggtgtgggatctaatacaatggcttcaggcggtggggcaccaatggcagacaataacgaaggcgccgacggagtgggtaattcctcgggaaattggcattgcgattccacatggatgggcgacagagttatcaccaccagcacaagaacctgggccctccccacctacaataatcacctctacaagcaaatctccagcgaatcgggagccaccaacgacaaccactacttcggctacagcaccccctgggggtattttgactttaacagattccactgtcacttctcaccacgtgactggcagcgactcatcaataacaactggggatttagacccaagaaactcaatttcaagctcttcaacatccaagtcaaggaggtcacgcagaatgatggaaccacgaccatcgccaataaccttaccagcacggtgcaggtcttcacagactctgagtaccagctgccctacgtcctcggttcggctcaccagggctgccttccgccgttcccagcagacgtcttcatgattcctcagtacggctacttgactctgaacaatggcagccaagcggtaggacgttcttcattctactgtctagagtattttccctctcagatgctgaggacgggaaacaacttcaccttcagctacacttttgaagacgtgcctttccacagcagctacgcgcacagccagagtctggatcggctgatgaatcctctcattgaccagtacctgtattacctgagcaaaactcagggtacaagtggaacaacgcagcaatcgagactgcagttcaaccaagctgggcctagctccatggctcagcaggccaaaaactggctaccgggacccagctaccgacagcagcgaatgtctaagacggctaatgacaacaacaacagtgaatttgcttggactgcagccaccaaatattacccgaatggaagaaattctctggtcaatcccgggcccccaatggccagtcacaaggacgatgaggaaaagtatttccccatgcacggaaatctcatctttggaaaacaaggcacaggaactaccaatgtggacattgaatcagtgcttattacagacgaagaagaaatcagaacgactaatcctgtggctacagaacaatacggacaggttgccaccaaccgtcagagtcagaacaccacagcttcctatggaagtgtggacagccagggaatcttacctggaatggtgtggcaggaccgcgatgtctatcttcaaggtcccatttgggccaaaactcctcacacggacggacactttcatccttctccgctcatgggaggctttggactgaaacaccctcctccccagatcctgatcaaaaacacacctgtgccagcgaatcccgcgaccactttcactcctggaaagtttgcttcgttcattacccagtattccaccggacaggtcagcgtggaaatagagtgggagctgcagaaagaaaacagcaaacgctggaacccggaaattcagtacacctccaactacaacaagtcggtgaatgtggagtttaccgtggacgcaaacggtgtttattctgaaccccgccctattggcactcgttaccttacccggaacttgtaatttcctgttaatgaataaaccgatttatgcgtttcagttgaactttggtctctgcgaagggcgaattc

SEQ ID NO: 145 - protein, 735 aa, Artificial Sequence
  source: /note="Description of Artificial Sequence: Synthetic polypeptide"
MAADGYLPDWLEDTLSEGIRQWWKLKPGPPPPKPNQQHRDDSRGLVLPGYKYLGPFNGLDKGEPVNEADAAALEHDKAYDHQLKQGDNPYLKYNHADAEFQERLQEDTSFGGNLGRAVFQAKKRVLEPLGLVEEAVKTAPGKKRPIEQSPAEPDSSSGIGKSGQQPAKKRLNFGQTGDTESVPDPQPIGEPPAAPSGVGSNTMASGGGAPMADNNEGADGVGNSSGNWHCDSTWMGDRVITTSTRTWALPTYNNHLYKQISSESGATNDNHYFGYSTPWGYFDFNRFHCHFSPRDWQRLINNNWGFRPKKLNFKLFNIQVKEVTQNDGTTTIANNLTSTVQVFTDSEYQLPYVLGSAHQGCLPPFPADVFMIPQYGYLTLNNGSQAVGRSSFYCLEYFPSQMLRTGNNFTFSYTFEDVPFHSSYAHSQSLDRLMNPLIDQYLYYLSKTQGTSGTTQQSRLQFNQAGPSSMAQQAKNWLPGPSYRQQRMSKTANDNNNSEFAWTAATKYYPNGRNSLVNPGPPMASHKDDEEKYFPMHGNLIFGKQGTGTTNVDIESVLITDEEEIRTTNPVATEQYGQVATNRQSQNTTASYGSVDSQGILPGMVWQDRDVYLQGPIWAKTPHTDGHFHPSPLMGGFGLKHPPPQILIKNTPVPANPATTFTPGKFASFITQYSTGQVSVEIEWELQKENSKRWNPEIQYTSNYNKSVNVEFTVDANGVYSEPRPIGTRYLTRNL

SEQ ID NO: 146 - DNA, 3122 bp, Artificial Sequence
  source: /note="Description of Artificial Sequence: Synthetic polynucleotide"
agcggccgcgaattcgccctttctacggctgcgtcaactggaccaatgaaaactttcccttcaacgattgcgtcgacaagatggtgatctggtgggaggagggaaagatgaccgccaaggtcgtggaatctgccaaagccattctgggtggaagcaaggttcgtgtggaccagaaatgcaggtcttcggcccagatcgacccgactccggtgattgtcacctctaacaccaacatgtgcgccgtgattgacggaaactcgaccaccttcgagcaccagcagccgttgcaagaccggatgttcaaatttgaacttacccgccgtttggatcatgactttgggaaggtcaccaagcaggaagtcaaagactttttccggtgggctcaagatcacgtgactgaggtggagcatgagttctacgtcaaaaagggtggagccaagaaaaggcccgcccccgatgatgtatatataaatgagcccaagcgggcgcgcgagtcagttgcgcagccatcgacgtcagacgcggaagcttcgataaactacgcggacaggtaccaaaacaaatgttctcgtcacgtgggcatgaatctgatgctgtttccctgtcgacaatgcgaaagaatgaatcagaattcaaatatctgcttcacacacgggcaaaaagactgtttggaatgctttcccgtgtcagaatctcaacccgtttctgtcgtcagaaaaacgtatcagaaactttgttacattcatcatatcatgggaaaagtaccagacgcctgcactgcctgcgacctggtaaatgtggacttggatgactgtatttctgagcaataaatgacttaaatcaggtatggctgctgacggttatcttccagattggctcgaggacactctctctgaaggaatcagacagtggtggaagctcaaacctggcccaccaccgccgaaacctaaccaacaacaccgggacgacagtaggggtcttgtgcttcctgggtacaagtacctcggacccttcaacggactcgacaaaggagagccggtcaacgaggcagacgccgcggccctcgagcacgacaaagcctacgaccaccagctcaagcaaggggacaacccgtacctcaaatacaaccacgcggacgctgaatttcaggagcgtcttcaagaagatacgtctttcgggggcaacctcgggcgagcagtcttccaggccaaaaagagggtactcgagcctcttggtctggttgaggaagctgttaagacggctcctggaaaaaagagacctatagagcagtctcctgcagaaccggactcttcctcgggcatcggcaaatcaggccagcagcccgctaagaaaagactcaattttggtcagactggcgacacagagtcagtcccagaccctcaaccaatcggagaaccccccgcagccccctctggtgtgggatctaatacaatggcttcaggcggtggggcaccaatggcagacaataacgaaggcgccgacggagtgggtaattcctcgggaaattggcattgcgattccacatggatgggcgacagagttatcaccaccagcacaagaacctgggccctccccacctacaataatcgcctctacaagcaaatctccagcgaatcgggagccaccaacgacaaccactacttcggctacagcaccccctgggggtattttgactttaacagattccactgtcacttctcaccacgtgactggcagcgactcatcaacaacaactggggatttagacccaagaaactcaatttcaagctcttcaacatccaagtcaaggaggtcacgcagaatgatggaaccacgaccatcgccaataaccttaccagcacggtgcaggtcttcacagactctgagtaccagctgccctacgtcctcggttcggctcaccagggctgccttccgccgttcccagcagacgtcttcatgattcctcagtacggctacttgactctgaacaatggcagccaagcggtaggacgttcttcattctactgtctagagtattttccctctcagatgctgaggacgggaaacaacttcaccttcagctacacttttgaagacgtgcctttccacagcagctacgcgcacagccagagtctggatcggctgatgaatcctctcattgaccagtacctgtattacctgagcaaaactcagggtacaagtggaacaacgcagcaatcgagactgcagttcagccaagctgggcctagctccatggctcagcaggccaaaaactggctaccgggacccagctaccgacagcagcgaatgtctaagacggctaatgacaacaacaacagtgaatttgcttggactgcagccaccaaatattacctgaatggaagaaattctctggtcaatcccgggcccccaatggccagtcacaaggacgatgaggaaaagtatttccccatgcacggaaatctcatctttggaaaacaaggcacaggaactaccaatgtggacattgaatcagtgcttattacagacgaagaagaaatcagaacaactaatcctgtggctacagaacaatacggacaggttgccaccaaccatcagagtcagaacaccacagcttcctatggaagtgtggacagccagggaatcttacctggaatggtgtggcaggaccgcgatgtctatcttcaaggtcccatttgggccaaaactcctcacacggacggacactttcatccttctccgctcatgggaggctttggactgaaacaccctcctccccagatcctgatcaaaaacacacctgtgccagcgaatcccgcgaccactttcactcctggaaagtttgcttcgttcattacccagtattccaccggacaggtcagcgtggaaatagagtgggagctgcagaaagaaaacagcaaacgctggaacccagaaattcagtacacctccaactacaacaagtcggtgaatgtggagtttaccgtggacgcaaacggtgtttattctgaaccccgccctattggcactcgttaccttacccggaacttgtaatttcctgttaatgaataaaccgatttatgcgtttcagttgaactttggtctctgcgaagggcgaattc

SEQ ID NO: 147 - protein, 735 aa, Artificial Sequence
  source: /note="Description of Artificial Sequence: Synthetic polypeptide"
MAADGYLPDWLEDTLSEGIRQWWKLKPGPPPPKPNQQHRDDSRGLVLPGYKYLGPFNGLDKGEPVNEADAAALEHDKAYDHQLKQGDNPYLKYNHADAEFQERLQEDTSFGGNLGRAVFQAKKRVLEPLGLVEEAVKTAPGKKRPIEQSPAEPDSSSGIGKSGQQPAKKRLNFGQTGDTESVPDPQPIGEPPAAPSGVGSNTMASGGGAPMADNNEGADGVGNSSGNWHCDSTWMGDRVITTSTRTWALPTYNNRLYKQISSESGATNDNHYFGYSTPWGYFDFNRFHCHFSPRDWQRLINNNWGFRPKKLNFKLFNIQVKEVTQNDGTTTIANNLTSTVQVFTDSEYQLPYVLGSAHQGCLPPFPADVFMIPQYGYLTLNNGSQAVGRSSFYCLEYFPSQMLRTGNNFTFSYTFEDVPFHSSYAHSQSLDRLMNPLIDQYLYYLSKTQGTSGTTQQSRLQFSQAGPSSMAQQAKNWLPGPSYRQQRMSKTANDNNNSEFAWTAATKYYLNGRNSLVNPGPPMASHKDDEEKYFPMHGNLIFGKQGTGTTNVDIESVLITDEEEIRTTNPVATEQYGQVATNHQSQNTTASYGSVDSQGILPGMVWQDRDVYLQGPIWAKTPHTDGHFHPSPLMGGFGLKHPPPQILIKNTPVPANPATTFTPGKFASFITQYSTGQVSVEIEWELQKENSKRWNPEIQYTSNYNKSVNVEFTVDANGVYSEPRPIGTRYLTRNL

SEQ ID NO: 148 - DNA, 3121 bp, Artificial Sequence
  source: /note="Description of Artificial Sequence: Synthetic polynucleotide"
gaattcgcccttcgcagagaccaaagttcaactgaaacgaatcaaccggtttattgattaacaagcaattacagattacgggtgaggtaacgggtgccgatggggcgaggctcagaataagtgccatctgtgttaacagcaaagtccacatttgtagatttgtagtagttggaagtgtattgaatctctgggttccagcgtttgctgttttctttctgcagctcccattcaatttccacgctgacctgtccggtgctgtactgcgtgatgaacgacgccagcttagcttgactgaaggtagttggaggatccgcgggaacaggtgtattcttaatcaggatctgaggaggcgggtgtttcagtccaaagccccccatcagcggcgagggatgaaagtttccgtccgtgtgaggaatcttggcccagataggaccctgcaggtacacgtcccggttctgccagaccatgccaggtaaggctccttgactgttgacggcccctacaataggagcggcgttttgctgttgcaggttatcggccaccacgccgtactgttctgtggccactgggttggtggttttaatttcttcctcactggttagcataacgctgctatagtccacgttgccttttccagctccctgtttcccaaacattaagactccgctggacggaaaaaatcgctcttcgtcgtccttgtgggttgccatagcgacaccgggatttaccagagagtctctgccattcagatgatacttggtggcaccggtccaggcaaagttgctgttgttattttgcgacagtgtcgtggagacgcgttgctgccggtagcagggcccgggtagccagtttttggcctgagccgacatgttattaggcccggcctgagaaaatagcaactgctgagttcctgcggtacctcccgtggactgagtccgagacaggtagtacaggtactggtcgatgagggggttcatcagccggtccaggctttggctgtgcgcgtagctgctgtgaaaaggcacgtcctcaaactggtagctgaactcaaagttgttgcccgttctcagcatttgagaaggaaagtactccaggcagtagaaggaggaacggcccacggcctgactgccattgttcagagtcaggtacccgtactgaggaatcatgaagacgtccgccgggaacggaggcaggcagccctggcgcgcagagccgaggacgtacgggagctggtattccgagtccgtaaagacctgaatcgtgctggtaaggttattggcgatggtcttggtgccttcattctgcgtgacctccttgacctggatgttgaagagcttgaagttgagtctcttgggccggaatccccagttgttgttgatgagtcgctgccagtcacgtggtgagaagtggcagtggaatctgttaaagtcaaaatacccccagggggtgctgtagccgaagtaggtgttgtcgttggtgcttcctcccgaagtcccgttggagatttgcttgtagaggtggttgttgtaggtggggagggcccaggttcgggtgctggtggtgatgactctgtcgcccagccatgtggaatcgcaatgccaatttcctgaggaactacccactccgtcggcgccttcgttattgtctgccattggagcgccaccgcctgcagccattgtaccagatcccagaccagaggggcctgcggggggttctccgattggttgagggtcgggcactgactctgagtcgccagtctgcccaaagttgagtctctttttcgcgggctgctggcctttcttgccgatgcccgtagtggagtctggagaacgctggggtgatggctctaccggtctcttctttccaggagccgtcttagcgccttcctcaaccagaccgagaggttcgagaacccgcttcttggcctggaagactgctcgtccgaggttgcccccaaaagacgtatcttcttgcagacgctcctgaaactcggcgtcggcgtggttataccgcaggtacggattgtcacccgctttgagctgctggtcgtaggccttgtcgtgctcgagggccgctgcgtccgccgcgttgacgggctcccccttgtcgagtccgttgaagggtccgaggtacttgtagccaggaagcaccagaccccggccgtcgtcctgcttttgctggttggctttgggcttcggggctccaggtttcagcgcccaccactcgcgaatgccctcagagaggttgtcctcgagccaatctggaagataaccatcggcagccatacctgatctaaatcatttattgttcaaagatgcagtcatccaaatccacattgaccagatcgcaggcagtgcaagcgtctggcacctttcccatgatatgatgaatgtagcacagtttctgatacgcctttttgacgacagaaacgggttgagattctgacacgggaaagcactctaaacagtctttctgtccgtgagtgaagcagatatttgaattctgattcattctctcgcattgtctgcagggaaacagcatcagattcatgcccacgtgacgagaacatttgttttggtacctgtccgcgtagttgatcgaagcttccgcgtctgacgtcgatggctgcgcaactgactcgcgcacccgtttgggctcacttatatctgcgtcactgggggcgggtcttttcttggctccaccctttttgacgtagaattcatgctccacctcaaccacgtgatcctttgcccaccggaaaaagtctttgacttcctgcttggtgaccttcccaaagtcatgatccagacggcgggtgagttcaaatttgaacatccggtcttgcaacggctgctggtgttcgaaggtcgttgagttcccgtcaatcacggcgcacatgttggtgttggaggtgacgatcacgggagtcgggtctatctgggccgaggacttgcatttctggtccacgcgcaccttgcttcctccgagaatggctttggccgactccacgaccttggcggtcatcttcccctcctcccaccagatcaccatcttgtcgacacagtcgttgaagggaaagttctcattggtccagttgacgcagccgtagaagggcgaattc

SEQ ID NO: 149 - protein, 733 aa, Artificial Sequence
  source: /note="Description of Artificial Sequence: Synthetic polypeptide"
MAADGYLPDWLEDNLSEGIREWWDLKPGAPKLKANQQKQDDGRGLVLPGYKYLGPFHGLDKGEPVNAADAAALEHDKAYDQQLKAGDNPYLRYNHADAEFQERLQEDTSFGGNLGRAVFQAKKRVLEPLGLVEEGAKTAPGKKRPLESPQEPDSSSGIGKKGKQPAKKRLNFEEDTGAGDGPPEGSDTSAMSSDIEMRAAPGGNAVDAGQGSDGVGNASGDWHCDSTWSEGKVTTTSTRTWVLPTYNNHLYLRLGTTSNSNTYNGFSTPWGYFDFNRFHCHFSPRDWQRLINNNWGLRPKAMRVKIFNIQVKEVTTSNGETTVANNLTSTVQIFADSSYELPYVMDAGQEGSLPPFPNDVFMVPQYGYCGIVTGENQNQTDRNAFYCLEYFPSQMLRTGNNFEMAYNFEKVPFHSMYAHSQSLDRLMNPLLDQYLWHLQSTTSGETLNQGNAATTFGKIRSGDFAFYRKNWLPGPCVKQQRFSKTASQNYKIPASGGNALLKYDTHYTLNNRWSNIAPGPPMATAGPSDGDFSNAQLIFPGPSVTGNTTTSANNLLFTSEGEIAATNPRDTDMFGQIADNNQNATTAPITGNVTAMGVLPGMVWQNRDIYYQGPIWAKIPHADGHFHPSPLIGGFGLKHPPPQIFIKNTPVPANPATTFTAARVDSFITQYSTGQVAVQIEWEIEKERSKRRNPEVQFTSNYGNQSSMLWAPDTTGKYTEPRVIGSRYLTNHL

SEQ ID NO: 150 - protein, 735 aa, Artificial Sequence
  source: /note="Description of Artificial Sequence: Synthetic polypeptide"
MAADGYLPDWLEDTLSEGIRQWWKLKPGPPPPKPNQQHRDDSRGLVLPGYKYLGPFNGLDKGEPVNEADAAALEHDKAYDHQLKQGDNPYLKYNHADAEFQERLQEDTSFGGNLGRAVFQAKKRVLEPLGLVEEAVKTAPGKKRPIEQSPAEPDSSSGIGKSGQQPAKKRLNFGQTGDTESVPDPQPIGEPPAAPSGVGSNTMASGGGAPMADNNEGADGVGNSSGNWHCDSTWMGDRVITTSTRTWALPTYNNHLYKQISSESGATNDNHYFGYSTPWGYFDFNRFHCHFSPRDWQRLINNNWGFRPKKLNFKLFNIQVKEVTQNDGTTTIANNLTSTVQVFTDSEYQLPYVLGSAHQGCLPPFPADVFMIPQYGYLTLNNGSQAVGRSSFYCLEYFPSQMLRTGNNFTFSYTFEDVPFHSSYAHSQSLDRLMNPLIDQYLYYLSKTQGTSGTTQQSRLQFSQAGPSSMAQQAKNWLPGPSYRQQRMSKTANDNNNSEFAWTAATKYYLNGRNSLVNPGPPMASHKDDEEKYFPMHGNLIFGKQGTGTTNVDIESVLITDEEEIRTTNPVATEQYGQVATNHQSQNTTASYGSVDSQGILPGMVWQDRDVYLQGPIWAKIPHTDGHFHPSPLMGGFGLKHPPPQILIKNTPVPANPATTFTPGKFASFITQYSTGQVSVEIEWELQKENSKRWNPEIQYTSNYNKSVNVEFTVDANGVYSEPRPIGTRYLTRNL

SEQ ID NO: 151 - DNA, 3127 bp, Artificial Sequence
  source: /note="Description of Artificial Sequence: Synthetic polynucleotide"
gcggccgcgaattcgcccttcgcagagaccaaagttcaactgaaacgaatcaaccggtttattgattaacatgcaattacagattacgggtgaggtaacgagtgccaatagggcgaggctcagagtaaacaccctggctgtcaacggcaaagtccacaccagtctgcttttcaaagttggaggtgtactgaatctccgggtcccagcgcttgctgttttccttctgcagctcccactcgatttccacgctgacttgtccggtgctgtactgtgtgatgaacgaagcaaacttggcaggagtaaacacctccggaggattagcgggaacgggagtgttcttgatcaggatctgaggaggcggatgtttaagtccaaagccgcccatcaaaggagacgggtgaaagttgccatccgtgtgaggaatcttggcccagatgggaccctgcaggtacacgtcccggttctgccagaccatgccaggtaaggctccctggttgttgacaacttgtgtctgggctgcagtattagccgcttgtaagttgctgctgactatcccgtattcttccgtggctacaggattagtaggacgaatttcttcttcatttgtcattaacacattttccaatgtagttttgttagttgctccagtttttccaaaaatcaggactccgctggatgggaaaaagcggtcctcgtcgtccttgtgagttgccatggcgacgccgggattaaccaacgagtttctgccgttcaggtgatatttggtggcaccagtccaagcaaagttgctgttgttgttttgatccagcgttttggagaccctttgttgccggaagcagggtccaggtaaccaattcttggcttgttcggccatagttgaaggcccgccctggtaaaactgcagttcccgattgccagctgtgcctcctgggtcactctgtgttctggccaggtagtacaagtactggtcgatgaggggattcatcagccggtccaggctctggctgtgtgcgtagctgctgtggaaaggcacgtcctcgaagctgtagctgaactcaaagttgttgcccgttctcagcatctgagaggggaagtactccaggcagtagaaggaggaacgtcccacagactgactgccattgttgagagtcaggtagccgtactgaggaatcatgaagacgtccgccgggaacggaggcaggcagccctggtgcgcagagccgaggacgtacggcagctggtattccgagtccgagaatacctgaatcgtgctggtaaggttattagcgatggtcgtaacgccgtcattcgtcgtgacctccttgacctggatgttgaagagcttgaaccgcagcttcttgggccggaatccccagttgttgttgatgagtcgctgccagtcacgtggtgagaagtggcagtggaatctgttaaagtcaaaatacccccagggggtgctgtagccgaagtaggtgttgtcgttggtactacctgcagtttcactggagatttgctcgtagaggtggttgttgtaggtgggcagggcccaggttcgggtgctggtggtaatgactctgtcgcccagccatgtggaatcgcaatgccaatttcctgaggcattacccactccgtcggcaccttcgttattgtctgccattggtgcgccaccgcctgcagccactgtaccagatcccacactagagggcgctgctggaggttctccgagaggttgagggtcggggactgactctgagtcgccagtctgaccgaaattgagtctctttctggcgggctgctggcccttcttgccgatgcccgtggaggagtcgggggaacgctgaggtgacggctctaccggtctcttctttgcaggagccgtcttagcgccttcctcaaccagaccgagaggttcgagaacccgcttcttggcctggaagactgctcgcccgaggttgcccccaaatgacgtatcttcttgcagacgctcctgaaactcggcgtcggcgtggttataccgcaggtacgggttgtcacccgcattgagctgctggtcgtaggccttgtcgtgctcgagggccgctgcgtccgccgcgttgacgggctcccccttgtcgagtccgttgaagggtccgaggtacttgtagccaggaagcaccagaccccggccgttgtcctgcttttgctggttggctttgggtttcggggctccaggtttcaggtcccaccactcgcgaatgccctcagagaggttgtcctcgagccaatctggaagataaccatcggcagccatacctgatttaaatcatttattgttcaaagatgcagtcatccaaatccacattgaccagatcgcaggcagtgcaagcgtctggcacctttcccatgatatgatgaatgtagcacagtttctgatacgcctttttgacgacagaaacgggtttagattctgacacgggaaagcactctaaacagtctttctgtccgtgagtgaagcagatatttgaattctgattcattctctcgcattgtctgcagggaaacagcatcagattcatgcccacgtgacgagaacatttgttttggtacctgtctgcgtagttgatcgaagcttccgcgtctgacgtcgatggctgcgcaactgactcgcgcacccgtttgggctcacttatatctgcgtcactgggggcgggtcttttcttggctccaccctttttgacgtagaattcatgctccacctcaaccacgtaatcctttgcccaccggaaaaagtctttgacttcctgcttggtgaccttcccaaagtcatgatccagacggcgggtgagttcaaatttgaacatccggtcttgcaacggctgctggtgttcgaaggtcgttgagttcccgtcgatcacggcgcacatgttggtgttggagatgacgatcgcgggagtcgggtctatctgggccgaggacttgcatttctggtccacgcgcaccttgcttcctccgagaatggctttggccgactccacgaccttggcggtcatcttcccctcctcccaccagatcaccatcttgtcgacacagtcgttgaagggaaagttctcattggtccagttgacgcagccgtagaaagggcgaattc

SEQ ID NO: 152 - protein, 728 aa, Artificial Sequence
  source: /note="Description of Artificial Sequence: Synthetic polypeptide"
MAADGYLPDWLEDNLSEGIREWWDLKPGAPKPKANQQKQDDGRGLVLPGYKYLRPFNGLDKGEPVNEADAAALEHDKAYDKQLEQGDNPYLKYNHADAEFQERLQEDTSFGGNLGRAVFQAKKRVLEPLGLVEEVAKTAPGKKRPIESPDSSTGIGKKGQQPAKKKLNFGQTGDSESVPDPQPLGEPPAAPSGLGSGTMAAGGGAPMADNNEGADGVGNASGNWHCDSTWLGDRVITTSTRTWALPTYNNHLYKQISSQSGATNDNHFFSYSTPWGYFDFNRFHCHFSPRDWQRLINNNWGFRPRKLRFKLFNIQVKEVTTNDGVTTIANNLTSTIQVFSDSEYQLPYVLGSAHQGCLPPFPADVFMIPQYGYLTLNNGSQSVGRSSFYCLEYFPSQMLRTGNNFEFSYTFEEVPFHSSYVHSQSLDRLMNPLIDQYLYYLARTQSTTGSTRELQFHQAGPNTMAEQSKNWLPGPCYRQQRLSKNIDSNNNSNFAWTGATKYHLNGRNSLTNPGVAMATNKDDEDQFFPINGVLVFGKTGAANKTTLENVLMTSEEEIKTTNPVATEEYGVVSSNLQSSTAGPQTQTVNSQGALPGMVWQNRDVCLQGPIWAKIPHTDGNFHPSPLMGGFGLKHPPPQILIKNTPVPANPPEVFTPAKFASFITQYSTGQVSVEIEWELQKENSKRWNPEIQYTSNYAKSNNVEFAVNNEGVYTEPRPIGTRYLTRNL

SEQ ID NO: 153 - DNA, 3106 bp, Artificial Sequence
  source: /note="Description of Artificial Sequence: Synthetic polynucleotide"
gcggccgcgaattcgcccttcgcagagaccaaagttcaactgaaacgaatcaaccggtttattgattaacaagtaattacaggttacgggtgaggtaacgggtgccaatggggcgaggctcagtataaaccccttcgttgttgacagcaaattccacattattagacttggcataatttgaggtgtactgaatctctggattccagcgtttgctgttttctttctgcagttcccactcgatctccacgctgacctggccggtgctgtactgcgtgataaatgaggcaaacttggcaggagtaaacacctctggaggattagcaggtaccggggtgtttttgatgagaatttgaggaggcgggtgtttgagtccaaatccgcccatcaggggagacgggtgaaagttgccgtccgtgtgaggaattttggcccagatgggaccctgcaggcacacgtcccggttctgccagaccatgccgggcagagccccctggctgttgacagtctgtgtctggggtccggccgtagacgattgcaggttgctggagaccacaccgtattcttctgtagccacgggattggtggttttgatctcctcctcgctggtcattagcacgttttccagcgttgtcttgttggcagcccccgttttgccaaaaaccagcactccgttgatgggaaagaactggtcctcgtcgtccttgttggtggccatggctacgcccgggttggttaatgaatttctaccattcagatggtatttagtggccccggtccaggcaaagttactgttgttgttgctgtctatgttttttgacagtctctgctgccgataacagggtccgggcagccagttctttgattgctcggccatggtgttgggcccagcctgatggaactgcagctcccttgtggaccccgtagtgctctgggtccgggccaggtagtacaggtactggtcgatgaggggattcatcagccggtctaggctctggctgtgcacatagctgctgtggaaaggcacttcctcaaaggtgtagctgaattcaaagttattgcccgttctcagcatctgagaaggaaagtactccaggcagtagaaggaggaacgtcccacagactgactgccgttgtttagagtcagatatccgtactgaggaatcatgaacacgtccgcagggaacggagggaggcagccctggtgcgcagagccgaggacgtacggcagttggtactccgagtccgagaagacctgaatcgtgctggtaaggttattagcgatggtcgtaacgccgtcgttcgtcgtgacctccttgacctggatgttgaacaacttgaaccgcagctttctgggccggaatccccagttgttgttgatgagtcgctgccagtcacgtggtgagaagtggcagtggaatctgttgaagtcaaaatagccccagggggtgctgtagctgaagaagtggttgtcgttggtagccccgctctgacttgatatctgcttgtagaggtggttgttgtaggtgggcagggcccaggtgcgggtgctggtggtgatgactctgtcgcccagccatgtggaatcgcaatgccaatttccggaggcattacccactccgtcggcgccttcgttattgtctgccattggtgcgccaccgcctgcagccattgtaccagatcccagacctgagggcgcggcgggaggttctccgagaggttgggggtcgggcactgactctgagtcgccagtctgcccaaagttgagcttctttttagcgggctgctggcctttcttgccgatgcccgtggaggagtcgggggattctatgggtctcttctttccaggagccgtcttagcgacttcctcaaccagaccgagaggttcgagaacccgcttcttggcctggaagactgctcgcccgaggttgcccccaaaagacgtatcttcttgaagacgctcctgaaactcggcgtcggcgtggttgtacttgaggtacgggttgtccccctgctcgagctgcttgtcgtaggccttgtcgtgctcgagggccgcggcgtctgcctcgttgaccggctctcccttgtcgagtccgttgaagggtctgaggtacttgtagccaggaagcaccagaccccggccgtcgtcctgcttttgctggttggctttgggtttcggggctccaggtttcaagtcccaccactcgcgaatgccctcagagaggttgtcctcgagccaatctggaagataaccatcggcagccatacctggtttaagtcatttattgctcagaaacacagtcatccaggtccacgttgaccagatcgcaggccgagcaagcaatctcgggagcccgccccagcagatgatgaatggcacagagtttccgatacgtcctctttctgacgaccggttgagattctgacacgccggggaaacattctgaacagtctctggtcccgtgcgtgaagcaaatgttgaaattctgattcactctctcgcatgtcttgcagggaaacagcatctgaagcatgcccgcgtgacgagaacatttgttttggtacctgtcggcaaagtccaccggagctccttccgcgtctgacgtcgatggattcgcgactgaggggcaggcccgcttgggctcgcttttatccgcgtcatcgggggcgggtctcttgttggccccaccctttctgacgtagaacccatgcgccacctcggtcacgtgatcctgcgcccagcggaagaaccttttgacttcctgctttgtcaccttgccaaagttatgctccagacggcgggtgggttcaaatttgaacatccggtcctgcaacggctgctggtgctcgaaggtggcgctgttcccgtcaatcacggcgcacatgttggtgttggaggtgacggtcacgggggtggggtcgatctgggcggacgacttgcacttttggtccacgcgcaccttgctgccgccgagaatggccttggcggactccacgaccttggccgtcatcttgccctcctcccaccagatcaccatcttgtcggcgcaatcgttgaagggaaagttctcattggtccagttgacgcagccgtagaaagggcgaattc

SEQ ID NO: 154 - protein, 728 aa, Artificial Sequence
  source: /note="Description of Artificial Sequence: Synthetic polypeptide"
MAADGYLPDWLEDNLSEGIREWWDLKPGAPKPKANQQKQDDGRGLVLPGYKYLGPFNGLDKGEPVNEADAAALEHDKAYDKQLEQGDNPYLKYNHADAEFQERLQEDTSFGGNLGRAVFQAKKRVLEPLGLVEEGAKTASGKKRPIESPDSSTGIGKKGQQPAKKKLNFGQTGDSESVPDPQPLGEPPAAPSGLGSGTMAAGGGAPMADNNEGADGVGNASGNWHCDSTWLGDRVITTSTRTWALPTYNNHLYKQISSQSGATNDNHFFGYSTPWGYFDFNRFHCHFSPRDWQRLINNNWGFRPRKLRFKLFNIQVKEVTTNDGVTTIANNLTSTIQVFSDSEYQLPYVLGSAHQGCLPPFPADVFMIPQYGYLTLNNGSQSVGRSSFCCLEYFPSQMLRTGNNFEFSYTFEEVPFHSSYAHSQSLDRLMNPLIDQYLYYLARTQSTTGSTRELQFHQAGPNTVAEQSKNWLPGPCYRQQRLSKNIDSNNNSNFAWTGATKYHLNGRNSLTNPGVAMATNKDDEDQFLPINGVLVFGKTGAANKTTLENVLMTSEEEIKTTNPVATEEYGVVSSNLQSSTAGPRTQTVNSQGALPGMVWQNRDVYLQGPIWAEIPHTDGNFHPSPLMGGFGLKHPPPQILIKNTPVPANPPEVFTPAKFASFITQYSTGQVSVEIEWELQKENSKRWNPEIQYTSNYAKSNNVEFAVNNEGVYTEPRPIGTRYLTRNL

SEQ ID NO: 155 - DNA, 3102 bp, Artificial Sequence
  source: /note="Description of Artificial Sequence: Synthetic polynucleotide"
gcggccgcgaattcgcccttcgcagagaccaaagttcaactgaaacgaatcaaccggtttattgattaacaagtaattacaggttacgggtgaggtaacgggtgccaatggggcgaggctcagtataaaccccttcgttgttgacagcaaattccacattattagacttggcataatttgaggtgtactgaatctctggattccagcgtttgctgttttctttctgcagttcccactcgatctccacgctgacctggccggtgctgtactgcgtgataaatgaggcaaacttggcaggagtaaacacctctggaggattagcaggtaccggggtgtttttgatgagaatttgaggaggcgggtgtttgagtccaaatccgcccatcaggggagacgggtgaaagttgccgtccgtgtgaggaatttcggcccagatgggaccctgcaggtacacgtcccggttctgccagaccatgccgggcagagccccctggctgttgacagtctgtgtccggggtccggccgtagacgattgcaggttgctggagaccacaccgtattcttctgtagccacgggattggtggttttgatctcctcctcgctggtcattagcacgttttccagcgttgtcttgttggcagcccccgttttgccaaaaaccagcactccgttgatgggaaggaactggtcctcgtcgtccttgttggtggccatggctacgcccgggttggttaatgaatttctaccattcagatggtatttagtggccccggtccaggcaaagttactgttgttgttgctgtctatgttttttgacagtctctgctgccgataacagggtccgggcagccagttctttgattgctcggccacggtgttgggcccagcctgatggaactgcagctcccttgtggaccccgtagtgctctgggtccgggccaggtagtacaggtactggtcgatgaggggattcatcagccggtccaggctctggctgtgcgcatagctgctgtggaaaggcacttcctcaaaggtgtagctgaattcaaagttattgcccgttctcagcatctgagaaggaaagtactccaggcagcagaaggaggaacgtcccacagactgactgccgttgtttagagtcagatatccgtactgaggaatcatgaacacgtccgcagggaacggagggaggcagccctggtgcgcagagccgaggacgtacggcagttggtactccgagtccgagaagacctgaatcgtgctggtaaggttattagcgatggtcgtaacgccgtcgttcgtcgtgacctccttgacctggatgttgaacaacttgaaccgcagctttctgggccggaatccccagttgttgttgatgagtcgctgccagtcacgtggtgagaagtggcagtggaatctgttgaagtcaaaatagccccagggggtgctgtagccgaagaagtggttgtcgttggtagccccgctctgacttgatatctgcttgtagaggtggttgttgtaggtgggcagggcccaggtgcgggtgctggtggtgatgactctgtcgcccagccatgtggaatcgcaatgccaatttccggaggcattacccactccgtcggcgccttcgttattgtctgccattggtgcgccaccgcctgcagccattgtaccagatcccagacctgagggcgcggcgggaggttctccgagaggttgggggtcgggcactgactctgagtcgccagtctgcccaaagttgagcttctttttagcgggctgctggcctttcttgccgatgcccgtggaggagtcgggggattctatgggtctcttctttccggaagccgtcttagcgccttcctcaaccagaccgagaggttcgagaacccgcttcttggcctggaagactgctcgcccgaggttgcccccaaaagacgtatcttcttgaagacgctcctgaaactcggcgtcggcgtggttgtacttgaggtacgggttgtccccctgctcgagctgcttgtcgtaggccttgtcgtgctcgagggccgcggcgtctgcctcgttgaccggctctcccttgtcgagtccgttgaagggtccgaggtacttgtagccaggaagcaccagaccccggccgtcgtcctgcttttgctggttggctttgggtttcggggctccaggtttcaagtcccaccactcgcgaatgccctcagagaggttgtcctcgagccaatctggaagataaccatcggcagccatacctggtttaagtcatttattgctcagaaacacagtcatccaggtccacgttgaccagatcgcaggccgagcaagcaatctcgggagcccgccccagcagatgatgaatggcacagagtttccgatacgtcctctttctgacgaccggttgagattctgacacgccggggaaacattctgaacagtctctggtcccgtgcgtgaagcaaatgttgaaattctgattcattctctcgcatgtcttgcagggaaacagcatctgaagcatgcccgcgtgacgagaacatttgttttggtacctgtcggcaaagtccaccggagctccttccgcgtctgacgtcgatggatccgcgactgaggggcaagcccgcttgggctcgcttttatccgcgtcatcgggggcgggtctcttgttggctccaccctttctgacgtagaactcatgcgccacctcggtcacgtgatcctgcgcccagcggaagaactctttgacttcctgctttgtcaccttgccaaagtcatgctccagacggcgggtgagttcaaatttgaacatccggtcttgtaacggctgctggtgctcgaaggtggtgctgttcccgtcaatcacggcgcacatgttggtgttggaagtgacgatcacgggggtgggatcgatctgggcggacgacttgcacttttggtccacgcgcaccttgctgccgccgagaatggccttggcggactccacgaccttggccgtcatcttgccctcctcccaccagatcaccatcttgtcgacgcaatcgttgaagggaaagttctcattggtccagttgacgcagccgaagggcgaattc

SEQ ID NO: 156 - protein, 728 aa, Artificial Sequence
  source: /note="Description of Artificial Sequence: Synthetic polypeptide"
MAADGYLPDWLEDNLSEGIREWWDLKPGAPKPKANQQKQDDGRGLVLPGYRYLGPFNGLDKGEPVNEADAAALEHDKAYDKQLEQGDNPYLKYNHADAEFQERLQEDTSFGGNLGRAVFQAKKRVLEPLGLVEEGAKTAPGKKRPIESPDSSTGIGKNGQPPAKKKLNFGQTGDSESVPDPQPLGEPPAAPSGLGSGTMAAGGGAPMADNNEGADGVGNASGNWHCDSTWLGDRVITTSTRTWALPTYNNHLYKQISSQSGATNDNHFFGYSTPWGYFDFNRFHCHFSPRDWQRLINNNWGFRPRKLRFKLFNIQVKEVTTNDGVTTIANNLTSTIQVFSDSEYQLPYVLGSAHQGCLPPFPADVFMIPQYGYLTLNNGSQSVGRSSFYCLEYFPSQMLRTGNNFEFSYTFEEVPFHSSYAHSQSLDRLMNPLIDQYLYYLARTQSTTGSTRELQFHQAGPNTMAEQSKNWLPGPCYRQQRLSKNIDSNNNSNFAWTGATKYHLNGRNSLTNPGVAMATNKDDEDQFFPINGVLVFGKTGAANKTTLENVLMTSEEEIKTTNPVATEEYGVVSSNLQSSTAGPQTQTVNSQGALPGMVWQNRDVYLQGPIWAKIPHTDGNFHPSPLMGGFGLKHPPPQILIKNTPVPANPPEVFTPAKFASFITQYSTGQVSVEIEWELQKENSKRWNPEIQYTSNYAKSNNVEFAVNNEGVYTEPRPIGTRYLTRNL

SEQ ID NO: 157 - protein, 728 aa, Artificial Sequence
  source: /note="Description of Artificial Sequence: Synthetic polypeptide"
MAADGYLPDWLEGNLSEGIREWWDLKPGAPKPKANQQKQDDGRGLVLPGYRYLGPFNGLDKGEPVNEADAAALEHDKAYDKQLEQGDNPYLKYNHADAEFQERLQEDTSFGGNLGRAVFQAKKRVLEPLGLVEEGAKTAPGKKRPIESPDSSTGIGKNGQPPAKKKLNFGQTGDSESVPDPQPLGEPPAAPSGLGSGTMAAGGGAPMADNNEGADGVGNASGNWHCDSTWLGDRVITTSTRTWALPTYNNHLYKQISSQSGATNDNHFFGYSTPWGYFDFNRFHCHFSPRDWQRLINNNWGFRPRKLRFKLFNIQVKEVTTNDGVTTIANNLTSTIQVFSDSEYQLPYVLGSAHQGCLPPFPADVFMIPQYGYLTLNNGSQSVGRSSFYCLEYFPSQMLRTGDNFEFSYTFEEVPFHSSYAHSQSLDRLMNPLIDQYLYYLARTQSTTGSTRELQFHQAGPNTMAEQSKNWLPGPCYRQQRLSKNIDSNNNSNFAWTGATKYHLNGRNSLTNPGVAMATNKDDEDQFFPINGVLVFGKTGAANKTTLENVLMTSEEEIKTTNPVATEEYGVVSSNLQSSTAGPQTQTVNSQGALPGMVWQNRDVYLQGPIWAKIPHTDGNFHPSPLMGGFGLKHPPPQILIKNTPVPANPPEVFTPAKFASFITQYSTGQVSVEIEWELQKENSKRWNPEIQYTSNYAKSNNVEFAVNNEGVYTEPRPIGTRYLTRNL

SEQ ID NO: 158 - DNA, 3106 bp, Artificial Sequence
  source: /note="Description of Artificial Sequence: Synthetic polynucleotide"
gcggccgcgaattcgcccttcgcagagaccaaagttcaactgaaacgaatcagccggtttattgattaacaagtaattacaggttacgggtgaggtaacgggtgccaatggggcgaggctcagtataaaccccttcgttgttgacagcaaattccacattattagacttggcataatttgaggtgtactgaatctctggattccagcgtttgctgttttctttctgcagttcccactcgatctccacgctgacctggccggtgctgtactgcgtgataaatgaggcaaacttggcaggagtaaacacctctggaggattagcaggtaccggggtgtttttgatgagaatttgaggaggcgggtgtttgagtccaaatccgcccatcaggggagacgggtgaaagttgccgtccgtgtgaggaattttggcccagatgggaccctgcaggtacacgtcccggttctgccagaccatgccgggcagagccccctggctgttgacagtctgtgtctggggtccggccgtagacgattgcaggttgctggagaccacaccgtattcttctgtagccacgggattggtggttttgatctcctcctcgctggtcattagcacgttttccagcgttgtcttgttggcagcccccgttttgccaaaaaccagcactccgttgatgggaaagaactggtcctcgtcgtccttgttggtggccatggctacgcccgggttggttaatgaatttctaccattcagatggtatttagtggccccggtccaggcaaagttactgttgttgttgctgtctatgttttttgacagtctctgctgccgataacagggtccgggcagccagttctttgattgctcggccatggtgttgggcccagcctgatggaactgcagctcccttgtggaccccgtagtgctctgggtccgggccaggtagtacaggtactggtcgatgaggggattcatcagccggtccaggctctggctgtgcgcatagctgctgtggaaaggcacttcctcaaaggtgtagctgaattcaaagttatcgcccgttctcagcatctgagaaggaaagtactccaggcagtagaaggaggaacgtcccacagactgactgccgttgtttagagtcagatatccgtactgaggaatcatgaacacgtccgcagggaacggagggaggcagccctggtgcgcagagccgaggacgtacggcagttggtactccgagtccgagaagacctgaatcgtgctggtaaggttattagcgatggtcgtaacgccgtcgttcgtcgtgacctccttgacctggatgttgaacaacttgaaccgcagctttctgggccggaatccccagttgttgttgatgagtcgctgccagtcacgtggtgagaagtggcagtggaatctgttgaagtcaaaatagccccagggggtgctgtagccgaagaagtggttgtcgttggtagccccgctctgacttgatatctgcttgtagaggtggttgttgtaggtgggcagggcccaggtgcgggtgctggtggtgatgactctgtcgcccagccatgtggaatcgcaatgccaatttccggaggcattacccactccgtcggcgccttcgttattgtctgccattggtgcgccaccgcctgcagccattgtaccagatcccagacctgagggcgcggcgggaggttctccgagaggttgggggtcgggcactgactctgagtcgccagtctgcccaaagttgagcttctttttagcgggcggctggccgttcttgccgatgcccgtggaggagtcgggggattctatgggtctcttctttccaggagccgtcttagcgccttcctcaaccagaccgagaggttcgagaacccgcttcttggcctggaagactgctcgcccgaggttgcccccaaaagacgtatcttcttgaagacgctcctgaaactcggcgtcggcgtggttgtacttgaggtacgggttgtccccctgctcgagctgcttgtcgtaggccttgtcgtgctcgagggccgcggcgtctgcctcgttgaccggctctcccttgtcgagtccgttgaagggtccgaggtacctgtagccaggaagcaccagaccccggccgtcgtcctgcttttgctggttggctttgggtttcggggctccaggtttcaagtcccaccactcgcgaatgccctcagagaggttgccctcgagccaatctggaagataaccatcggcagccatacctggtttaagtcatttattgctcagaaacacagtcatccaggtccacgttggccagatcgcaggccgagcaagcaatctcgggagcccgccccagcagatgatgaatggcacagagtttccgatacgtcctctttctgacgaccggttgagattctgacacgccggggaaacattctgaacagtctctggtcccgtgcgtgaagcaaatgttgaaattctgattcattctctcgcatgtcttgcaggggaacagcatctgaagcatgcccgcgtgacgagaacatttgttttggtacctgtcggcaaagtccaccggagctccttccgcgtctgacgtcgatggatccgcgactgaggggcaggcccgcttgggctcgcttttatccgcgtcatcgggggcgggtctcttgttggctccaccctttctgacgtagaactcatacgccacctcggtcacgtgatcctgcgcccagcggaagaactctttgacttcctgctttgtcaccttgccaaagtcatgctccagacggcgggtgagttcaaatttgaacatccggtcttgtaacggctgctggtgctcgaaggtggtgctgttcccgtcaatcacggcgcacatgttggtgttggaagtgacgatcacgggggtgggatcgatctgggcggacgacttgcacttttggtccacgcgcaccttgctgccgccgagaatggccttggcggactccacgaccttggccgtcatcctgccctcctcccaccagatcaccatcttgtcgacgcaatcgttgaagggaaagttctcattggtccagttgacgcagccgtagaaagggcgaattc

SEQ ID NO: 159 - protein, 728 aa, Artificial Sequence
  source: /note="Description of Artificial Sequence: Synthetic polypeptide"
MAADGYLPDWLEDNLSEGIREWWDLKPGAPKPKANQQKQDDGRGLVLPGYKYLGPFNGLDKGEPVNEADAAALEHDKAYDKQLEQGDNPYLKYNHADAEFQERLQEDTSFGGNLGRAVFQAKKRVLEPLGLVEEGAKTAPGKKRPIESPDSSTGIGKKGQQPAKKKLNFGQTGDSESVPDPQPLGEPPAAPSGLGSGTMAAGGGAPMADNNEGADGVGNASGNWHCDSTWLGDRVITTSTRTWALPTYNNHLYKQISSQSGATNDNHFFGYSTPWGYFDFNRFHCHFSPRDWQRLINNNWGFRPRKLRFKLFNIQVKEVTTNDGVTTIANNLTSTIQVFSDSEYQLPYVLGSAHQGCLPPFPADVFMIPQYGYLTLNNGSQSMGRSSFYCLEYFPSQMLRTGNNFEFSYTFEEVPFHSSYAHSQSLDRLMNPLIDQYLYYLARTQSTTGSTRELQFHQAGPNTMAEQSKNWLPGPCYRQQRLSKNIDSNNNSNFAWTGATKYHLNGRNSLTNPGVAMATNKDDEGQFFPINGVLVFGKTGAANKTTLENVLMTSEEEIKTTNPVATEEYGVVSSNLQSSTAGPQTQTVNSQGALPGMVWQNRDVYLQGPIWAKIPHTDGNFHPSPLMGGFGLKHPPPQILIKNTPVPANPPGVFTPALFASFITQYSTGQVSVEIEWELQKENSKRWNPEIQYTSNYAKSNNVEFAVNNEGVYTEPRPIGTRYLTRNL

SEQ ID NO: 160 - DNA, 3098 bp, Artificial Sequence
  source: /note="Description of Artificial Sequence: Synthetic polynucleotide"
gaattcgcccttcgcagagaccaaagttcaactgaaacgaatcaaccggtttattgattaacaagtaattacaggttacgggtgaggtaacgggtgccaatggggcgaggctcagtataaaccccttcgttgttgacagcaaattccacattattagacttggcataatttgaggtgtactgaatctctggattccagcgtttgctgttttctttctgcagttcccactcgatctccacgctgacctggccggtgctgtactgcgtgataaatgaggcaaactaggcaggagtaaacacccctggaggattagcaggtaccggggtgtttttgatgagaatttgaggaggcgggtgtttgagtccaaatccgcccatcaggggagacgggtgaaagttgccgtccgtgtgaggaattttggcccagatgggaccctgcaggtacacgtcccggttctgccagaccatgccgggcagagccccctggctgttgacagtctgtgtctggggtccggccgtagacgattgcaggttgctggagaccacaccgtattcttctgtagccacgggattggtggttttgatctcctcctcgctggtcattagcacgttttccagcgttgtcttgttggcagcccccgttttgccaaaaaccagcactccgttgatgggaaagaactggccctcgtcgtccttgttggtggccatggctacgcccgggttggttaatgaatttctaccattcagatggtatttagtggccccggtccaggcaaagttactgttgttgttgctgtctatgttttttgacagtctctgctgccgataacagggtccgggcagccagttctttgattgctcggccatggtgttgggcccagcctgatggaactgcagctcccttgtggaccccgtagtgctctgggtccgggccaggtagtacaggtactggtcgatgaggggattcatcagccggtccaggctctggctgtgcgcatagctgctgtggaaaggcacttcctcaaaggtgtagctgaattcaaagttattgcccgttctcagcatctgagaaggaaagtactccaggcagtagaaggaggaacgtcccatagactgactgccgttgtttagagtcagatatccgtactgaggaatcatgaacacgtccgcagggaacggagggaggcagccctggtgcgcagagccgaggacgtacggcagttggtactccgagtccgagaagacctgaatcgtgctggtaaggttattagcgatggtcgtaacgccgtcgttcgtcgtgacctccttgacctggatgttgaacaacttgaaccgcagctttctgggccggaatccccagttgttgttgatgagtcgctgccagtcacgtggtgagaagtggcagtggaatctgttgaagtcaaaatagccccagggggtgctgtagccgaagaagtggttgtcgttggtagccccgctctgacttgatatctgcttgtagaggtggttgttgtaggtgggcagggcccaggtgcgggtgctggtggtgatgactctgtcgcccagccatgtggaatcgcaatgccaatttccggaggcattacccactccgtcggcgccttcgttattgtctgccattggtgcgccaccgcctgcagccattgtaccagatcccagacctgagggcgcggcgggaggttctccgagaggttgggggtcgggcactgactctgagtcgccagtctgcccaaagttgagcttctttttagcgggctgctggcctttcttgccgatgcccgtggaggagtcgggggattctatgggtctcttctttccaggagccgtcttagcgccttcctcaaccagaccgagaggttcgagaacccgcttcttggcctggaagactgctcgcccgaggttgcccccaaaagacgtatcttcttgaagacgctcctgaaactcagcgtcggcgtggttgtacttgaggtacgggttgtccccctgctcgagctgcttgtcgtaggccttgtcgtgctcgagggccgcggcgtctgcctcgttgaccggctctcccttgtcgagtccgttgaagggtccgaggtacttgtagccaggaagcaccagaccccggccgtcgtcctgcttttgctggttggctttgggtttcggggctccaggtttcaagtcccaccactcgcgaatgccctcagagaggttgtcctcgagccaatctggaagataaccatcggcagccatacctggtttaagtcatttattgctcagaaacacagtcatccaggtccacgttgaccagatcgcaggccgagcaagcaatctcgggagcccgccccagcagatgatgaatggcacagagtttccgatacgtcctctttctgacgaccggttgagattctgacacgccggggaaacattctgaacagtctctggtcccgtgcgtgaagcaaatgttgaaattctgattcattctctcgcatgtcttgcagggaaacagcatctgaagcatgcccgcgtgacgagaacatttgttttggtacctgtcggcaaagtccaccggagctccttccgcgtctgacgtcgatggatccgcgactgaggggcaggcccgcttgggctcgcttttatccgcgtcatcgggggcgggcctcttgttggctccaccctttctgacgtagaactcatgcgccacctcggtcacgtgatcctgcgcccagcggaagaactctttgacttcctgctttgtcaccttgccaaagtcctgctccagacggcgggtgagttcaaatttgaacatccggtcttgtaacggctgctggtgctcgaaggtggtgctgttcccgtcaatcacggcgcacatgttggtgttggaagtgacgatcacgggggtgggatcgatctgggcggacgacttgcacttttggtccacgcgcaccttgctgccgccgagaatggccttggcggactccacgaccttggccgtcatcttgccctcctcccaccagatcaccatcttgtcgacgcaatcgttgaagggaaagttctcattggtccagttgacgcagccgtagaaagggcgaattc

SEQ ID NO: 161 - DNA, 2187 bp, Artificial Sequence
  source: /note="Description of Artificial Sequence: Synthetic polynucleotide"
atggctgccgatggttatcttccagattggctcgagggcaacctctctgagggcattcgcgagtggtgggacttgaaacctggagccccgaaacccaaagccaaccagcaaaagcaggacgacggccggggtctggtgcttcctggctacaggtacctcggacccttcaacggactcgacaagggagagccggtcaacgaggcagacgccgcggccctcgagcacgacaaggcctacgacaagcagctcgagcagggggacaacccgtacctcaagtacaaccacgccgacgccgagtttcaggagcgtcttcaagaagatacgtcttttgggggcaacctcgggcgagcagtcttccaggccaagaagcgggttctcgaacctctcggtctggttgaggaaggcgctaagacggctcctggaaagaagagacccatagaatcccccgactcctccacgggcatcggcaagaacggccagccgcccgctaaaaagaagctcaactttgggcagactggcgactcagagtcagtgcccgacccccaacctctcggagaacctcccgccgcgccctcaggtctgggatctggtacaatggctgcaggcggtggcgcaccaatggcagacaataacgaaggcgccgacggagtgggtaatgcctccggaaattggcattgcgattccacatggctgggcgacagagtcatcaccaccagcacccgcacctgggccctgcccacctacaacaaccacctctacaagcagatatcaagtcagagcggggctaccaacgacaaccacttcttcggctacagcaccccctggggctattttgacttcaacagattccactgccacttctcaccacgtgactggcagcgactcatcaacaacaactggggattccggcccagaaagctgcggttcaagttgttcaacatccaggtcaaggaggtcacgacgaacgacggcgttacgaccatcgctaataaccttaccagcacgattcaggtcttctcggactcggagtaccaactgccgtacgtcctcggctctgcgcaccagggctgcctccctccgttccctgcggacgtgttcatgattcctcagtacggatatctgactctaaacaacggcagtcagtctgtgggacgttcctccttctactgcctggagtactttccttctcagatgctgagaacgggcgataactttgaattcagctacacctttgaggaagtgcctttccacagcagctatgcgcacagccagagcctggaccggctgatgaatcccctcatcgaccagtacctgtactacctggcccggacccagagcactacggggtccacaagggagctgcagttccatcaggctgggcccaacaccatggccgagcaatcaaagaactggctgcccggaccctgttatcggcagcagagactgtcaaaaaacatagacagcaacaacaacagtaactttgcctggaccggggccactaaataccatctgaatggtagaaattcattaaccaacccgggcgtagccatggccaccaacaaggacgacgaggaccagttctttcccatcaacggagtgctggtttttggcaaaacgggggctgccaacaagacaacgctggaaaacgtgctaatgaccagcgaggaggagatcaaaaccaccaatcccgtggctacagaagaatacggtgtggtctccagcaacctgcaatcgtctacggccggaccccagacacagactgtcaacagccagggggctctgcccggcatggtctggcagaaccgggacgtgtacctgcagggtcccatctgggccaaaattcctcacacggacggcaactttcacccgtctcccctgatgggcggatttggactcaaacacccgcctcctcaaattctcatcaaaaacaccccggtacctgctaatcctccagaggtgtttactcctgccaagtttgcctcatttatcacgcagtacagcaccggccaggtcagcgtggagatcgagtgggaactgcagaaagaaaacagcaaacgctggaatccagagattcagtacacctcaaattatgccaagtctaataatgtggaatttgctgtcaacaacgaaggggtttatactgagcctcgccccattggcacccgttacctcacccgtaacctgtaa

SEQ ID NO: 162 - protein, 728 aa, Artificial Sequence; identical to SEQ ID NO: 157
  source: /note="Description of Artificial Sequence: Synthetic polypeptide"

SEQ ID NO: 163 - protein, 728 aa, Artificial Sequence
  source: /note="Description of Artificial Sequence: Synthetic polypeptide"
MAADGYLPDWLEDNLSEGIREWWDLKPGAPKPKANQQKQDDGRGLVLPGYRYLGPFNGLDKGEPVNEADAAALEHDKAYDKQLEQGDNPYLKYNHADAEFQERLQEDTSFGGNLGRAVFQAKKRVLEPLGLVEEGAKTAPGKKRPIESPDSSTGIGKNGQPPAKKKLNFGQTGDSESVPDPQPLGEPPAAPSGLGSGTMAAGGGAPMADNNEGADGVGNASGNWHCDSTWLGDRVITTSTRTWALPTYNNHLYKQISSQSGATNDNHFFGYSTPWGYFDFNRFHCHFSPRDWQRLINNNWGFRPRKLRFKLFNIQVKEVTTNDGVTTIANNLTSTIQVFSDSEYQLPYVLGSAHQGCLPPFPADVFMIPQYGYLTLNNGSQSVGRSSFYCLEYFPSQMLRTGDNFEFSYTFEEVPFHSSYAHSQSLDRLMNPLIDQYLYYLARTQSTTGSTRELQFHQAGPNTMAEQSKNWLPGPCYRQQRLSKNIDSNNNSNFAWTGATKYHLNGRNSLTNPGVAMATNKDDEDQFFPINGVLVFGKTGAANKTTLENVLMTSEEEIKTTNPVATEEYGVVSSNLQSSTAGPQTQTVNSQGALPGMVWQNRDVYLQGPIWAKIPHTDGNFHPSPLMGGFGLKHPPPQILIKNTPVPANPPEVFTPAKFASFITQYSTGQVSVEIEWELQKENSKRWNPEIQYTSNYAKSNNVEFAVNNEGVYTEPRPIGTRYLTRNL

SEQ ID NO: 164 - protein, 728 aa, Artificial Sequence; identical to SEQ ID NO: 156
  source: /note="Description of Artificial Sequence: Synthetic polypeptide"

SEQ ID NO: 165 - protein, 728 aa, Artificial Sequence
  source: /note="Description of Artificial Sequence: Synthetic polypeptide"
MAADGYLPDWLEDNLSEGIREWWDLKPGAPKPKANQQKQDDGRGLVLPGYKYLGPFNGLDKGEPVNEADAAALEHDKAYDKQLEQGDNPYLKYNHADAEFQERLQEDTSFGGNLGRAVFQAKKRVLEPLGLVEEGAKTAPGKKRPIESPDSSTGIGKNGQPPAKKKLNFGQTGDSESVPDPQPLGEPPAAPSGLGSGTMAAGGGAPMADNNEGADGVGNASGNWHCDSTWLGDRVITTSTRTWALPTYNNHLYKQISSQSGATNDNHFFGYSTPWGYFDFNRFHCHFSPRDWQRLINNNWGFRPRKLRFKLFNIQVKEVTTNDGVTTIANNLTSTIQVFSDSEYQLPYVLGSAHQGCLPPFPADVFMIPQYGYLTLNNGSQSVGRSSFYCLEYFPSQMLRTGNNFEFSYTFEEVPFHSSYAHSQSLDRLMNPLIDQYLYYLARTQSTTGSTRELQFHQAGPNTMAEQSKNWLPGPCYRQQRLSKNIDSNNNSNFAWTGATKYHLNGRNSLTNPGVAMATNKDDEDQFFPINGVLVFGKTGAANKTTLENVLMTSEEEIKTTNPVATEEYGVVSSNLQSSTAGPQTQTVNSQGALPGMVWQNRDVYLQGPIWAKIPHTDGNFHPSPLMGGFGLKHPPPQILIKNTPVPANPPEVFTPAKFASFITQYSTGQVSVEIEWELQKENSKRWNPEIQYTSNYAKSNNVEFAVNNEGVYTEPRPIGTRYLTRNL

SEQ ID NO: 166 - protein, 728 aa, Artificial Sequence
  source: /note="Description of Artificial Sequence: Synthetic polypeptide"
MAADGYLPDWLEDNLSEGIREWWDLKPGAPKPKANQQKQDDGRGLVLPGYKYLGPFNGLDKGEPVNEADAAALEHDKAYDKQLEQGDNPYLKYNHADAEFQERLQEDTSFGGNLGRAVFQAKKRVLEPLGLVEEGAKTAPGKKRPIESPDSSTGIGKKGQQPAKKKLNFGQTGDSESVPDPQPLGEPPAAPSGLGSGTMAAGGGAPMADNNEGADGVGNASGNWHCDSTWLGDRVITTSTRTWALPTYNNHLYKQISSQSGATNDNHFFGYSTPWGYFDFNRFHCHFSPRDWQRLINNNWGFRPRKLRFKLFNIQVKEVTTNDGVTTIANNLTSTIQVFSDSEYQLPYVLGSAHQGCLPPFPADVFMIPQYGYLTLNNGSQSVGRSSFYCLEYFPSQMLRTGNNFEFSYTFEEVPFHSSYAHSQSLDRLMNPLIDQYLYYLARTQSTTGSTRELQFHQAGPNTMAEQSKNWLPGPCYRQQRLSKNIDSNNNSNFAWTGATKYHLNGRNSLTNPGVAMATNKDDEDQFFPINGVLVFGKTGAANKTTLENVLMTSEEEIKTTNPVATEEYGVVSSNLQSSTAGPQTQTVNSQGALPGMVWQNRDVYLQGPIWAKIPHTDGNFHPSPLMGGFGLKHPPPQILIKNTPVPANPPEVFTPAKFASFITQYSTGQVSVEIEWELQKENSKRWNPEIQYTSNYAKSNNVEFAVNNEGVYTEPRPIGTRYLTRNL

SEQ ID NO: 167 - DNA, 2215 bp, Artificial Sequence
  source: /note="Description of Artificial Sequence: Synthetic polynucleotide"
atggctgccgatggttatcttccagattggctcgaggacactctctctgaaggaataagacagtggtggaagctcaaacctggcccaccaccaccaaagcccgcagagcggcataaggacgacagcaggggtcttgtgcttcctgggtacaagtacctcggacccttcaacggactcgacaagggagagccggtcaacgaggcagacgccgcggccctcgagcacgacaaagcctacgaccggcagctcgacagcggagacaacccgtacctcaagtacaaccacgccgacgccgagttccaggagcggctcaaagaagatacgtcttttgggggcaacctcgggcgagcagtcttccaggccaaaaagaggcttcttgaacctcttggtctggttgaggaagcggctaagacggctcctggaaagaagaggcctgtagagcactctcctgtggagccagactcctcctcgggaaccggaaaggcgggccagcagcctgcaagaaaaagattgaattttggtcagactggagacgcagactcagtcccagaccctcaaccaatcggagaacctcccgcagccccctcaggtgtgggatctcttacaatggctgcaggcggtggcgcaccaatggcagacaataacgagggcgccgacggagtgggtaattcctcgggaaattggcattgcgattccacatggatgggcgacagagtcatcaccaccagcacccgaacctgggccctgcccacctacaacaaccacctctacaagcaaatctccaacagcacatctggaggatcttcaaatgacaacgcctacttcggctacagcaccccctgggggtattttgactttaacagattccactgccacttttcaccacgtgactggcagcgactcatcaacaacaactggggattccggcccaagagactcagcttcaagctcttcaacatccaggtcaaggaggtcacgcagaatgaaggcaccaagaccatcgccaataacctcaccagcaccatccaggtgtttacggactcggagtaccagctgccgtacgttctcggctctgcccaccagggctgcctgcctccgttcccggcggacgtgttcatgattccccagtacggctacctaacactcaacaacggtagtcaggccgtgggacgctcctccttctactgcctggaatactttccttcgcagatgctgagaaccggcaacaacttccagtttacttacaccttcgaggacgtgcctttccacagcagctacgcccacagccagagcttggaccggctgatgaatcctctgattgaccagtacctgtactacttgtctcggactcaaacaacaggaggcacgacaaatacgcagactctgggcttcagccaaggtgggcctaatacaatggccaatcaggcaaagaactggctgccaggaccctgttaccgccagcagcgagtatcaaagacatctgcggataacaacaacagtgaatactcgtggactggagctaccaagtaccacctcaatggcagagactctctggtgaatccgggcccggccatggcaagccacaaggacgatgaagaaaagtttttttcctcagagcggggttctcatctttgggaagcaaggctcagagaaaacaaatgtggacattgaaaaggtcatgattacagacgaagaggaaatcaggacaaccaatcccgtggctacggagcagtatggttctgtatctaccaacctccagagaggcaacagacaagcagctaccgcagatgtcaacacacaaggcgttcttccaggcatggtctggcaggacagagatgtgtaccttcaggggcccatctgggcaaagattccacacacggacggacattttcacccctctcccctcatgggtggattcggacttaaacaccctccgcctcagatcctgatcaagaacacgcctgtacctgcggatcctccgaccaccttcaaccagtcaaagctgaactctttcatcacccagtattctactggccaagtcagcgtggagatcgagtgggagctgcagaaggaaaacagcaagcgctggaaccccgagatccagtacacctccaactactacaaatctacaagtgtggactttgctgttaatacagaaggcgtgtactctgaaccccgccccattggcacccgttacctcacccgtaatctgtaa

SEQ ID NO: 168 - protein, 737 aa, Artificial Sequence
  source: /note="Description of Artificial Sequence: Synthetic polypeptide"
MAADGYLPDWLEDTLSEGIRQWWKLKPGPPPPKPAERHKDDSRGLVLPGYKYLGPFNGLDKGEPVNEADAAALEHDKAYDRQLDSGDNPYLKYNHADAEFQERLKEDTSFGGNLGRAVFQAKKRLLEPLGLVEEAAKTAPGKKRPVEHSPVEPDSSSGTGKAGQQPARKRLNFGQTGDADSVPDPQPIGEPPAAPSGVGSLTMAAGGGAPMADNNEGADGVGNSSGNWHCDSTWMGDRVITTSTRTWALPTYNNHLYKQISNSTSGGSSNDNAYFGYSTPWGYFDFNRFHCHFSPRDWQRLINNNWGFRPKRLSFKLFNIQVKEVTQNEGTKTIANNLTSTIQVFTDSEYQLPYVLGSAHQGCLPPFPADVFMIPQYGYLTLNNGSQAVGRSSFYCLEYFPSQMLKTGNNFQFTYTFEDVPFHSSYAHSQSLDRLMNPLIDQYLYYLSRTQTTGGTTNTQTLGFSQGGPNTMANQAKNWLPGPCYRQQRVSKTSADNNNSEYSWTGATKYHLNGRDSLVNPGPAMASHKDDEEKFFPQSGVLIFGKQGSEKTNVDIEKVMITDEEEIRTTNPVATEQYGSVSTNLQRGNRQAATADVNTQGVLPGMVWQDRDVYLQGPIWAKIPHTDGHFHPSPLMGGFGLKHPPPQILIKNTPVPADPPTTFNQSKLNSFITQYSTGQVSVEIEWELQKENSKRWNPEIQYTSNYYKSTSVDFAVNTEGVYSEPRPIGTRYLTRNL

SEQ ID NO: 169 - protein, 737 aa, Artificial Sequence
  source: /note="Description of Artificial Sequence: Synthetic polypeptide"
MAADGYLPDWLEDTLSEGIRQWWKLKPGPPPPKPAERHKDDSRGLVLPGYKYLGPFNGLDKGEPVNEADAAALEHDKAYDRQLDSGDNPYLKYNHADAEFQERLKEDTSFGGNLGRAVFQAKKRLLEPLGLVEEAAKTAPGKKRPVEHSPVEPDSSSGTGKAGQQPARKRLNFGQTGDADSVPDPQPIGEPPAAPSGVGSLTMAAGGGAPMADNNEGADGVGNSSGNWHCDSTWMGDRVITTSTRTWALPTYNNHLYKQISNSTSGGSSNDNAYFGYSTPWGYFDFNRFHCHFSPRDWQRLINNNWGFRPKRLSFKLFNIQVKEVTQNEGTKTIANNLTSTIQVFTDSEYQLPYVLGSAHQGCLPPFPADVFMIPQYGYLTLNNGSQAVGRSSFYCLEYFPSQMLKTGNNFQFTYTFEDVPFHSSYAHSQSLDRLMNPLIDQYLYYLSRTQTTGGTTNTQTLGFSQGGPNTMANQAKNWLPGPCYRQQRVSKTSADNNNSEYSWTGATKYHLNGRDSLVNPGPAMASHKDDEEKFFPQSGVLIFGKQGSEKTNVDIEKVMITDEEEIRTTNPVATEQYGSVSTNLQQGNTQAATADVNTQGVLPGMVWQDRDVYLQGPIWAKIPHTDGHFHPSPLMGGFGLKHPPPQILIKNTPVPADPPTTFNQSKLNSFITQYSTGQVSVEIEWELQKENSKRWNPEIQYTSNYYKSTSVDFAVNTEGVYSEPRPIGTRYLTRNL

SEQ ID NO: 170 - protein, 737 aa, Artificial Sequence
  source: /note="Description of Artificial Sequence: Synthetic polypeptide"
MAADGYLPDWLEDTLSEGIRQWWKLKPGPPPPKPAERHKDDSRGLVLPGYKYLGPFNGLDKGEPVNEADAAALEHDKAYDRQLDSGDNPYLKYNHADAEFQERLKEDTSFGGNLGRAVFQAKKRLLEPLGLVEEAAKTAPGKKRPVEHSPVEPDSSSGTGKAGQQPARKRLNFGQTGDADSVPDPQPIGEPPAAPSGVGSLTMAAGGGAPMADNNEGADGVGNSSGNWHCDSTWMGDRVITTSTRTWALPTYNNHLYKQISNSTSGGSSNDNAYFGYSTPWGYFDFNRFHCHFSPRDWQRLINNNWGFRPKRLSFKLFNIQVKEVTQNEGTKTIANNLTSTIQVFTDSEYQLPYVLGSAHQGCLPPFPADVFMIPQYGYLTLNNGSQAVGRSSFYCLEYFPSQMLRTGNNFQFTYTFEDVPFHSSYAHSQSLDRLMNPLIDQYLYYLSRTQTTGGTTNTQTLGFSQGGPNTMANQAKNWLPGPCYRQQRVSKTSADNNNSEYSWTGATKYHLNGRDSLVNPGPAMASHKDDEEKFFPQSGVLIFGKQGSEKTNVDIEKVMITDEEEIRTTNPVATEQYGSVSTNLQQGNTQAATADVNTQGVLPGMVWQDRDVYLQGPIWAKIPHTDGHFHPSPLMGGFGLKHPPPQILIKNTPVPADPPTTFNQSKLNSFITQYSTGQVSVEIEWELQKENSKRWNPEIQYTSNYYKSTSVDFAVNTEGVYSEPRPIGTRYLTRNL

SEQ ID NO: 171 - protein, 729 aa, Artificial Sequence
  source: /note="Description of Artificial Sequence: Synthetic polypeptide"
MAADGYLPDWLEDNLSEGIREWWDLKPGAPKPKANQQKQDDGRGLVLPGYKYLGPFNGLDKGEPVNAADAAALEHDKAYDQQLKAGDNPYLRYNHADAEFQERLQEDTSFGGNLGRAVFQAKKRVLEPLGLVEEGAKTAPGKKRPIDSPDSSTGIGKKGQQPAKKKLNFGQTGDSESVPDPQPLGEPPAAPSSVGSGTMAAGGGAPTADNNEGADGVGNASGNWHCDSTWLGDRVITTSTRTWALPTYNNHLYKQISSSSSGATNDNHYFGYSTPWGYFDFNRFHCHFSPRDWQRLINNNWGFRPKKLRFKLFNIQVKEVTTNDGVTTIANNLTSTVQVFSDSEYQLPYVLGSAHQGCLPPFPADVFMIPQYGYLTLNNGSQSVGRSSFYCLEYFPSQMLRTGNNFEFSYSFEDVPFHSSYAHSQSLDRLMNPLIDQYLYYLARTQSTTGSTRELQFHQAGPNTMAEQSKNWLPGPCYRQQRLSKNLDFNNNSNFAWTAATKYHLNGRNSLTNPGIPMATNKDDEDQFFPINGVLVFGKTGAANKTTLENVLMTSEEEIKTTNPVATEEYGVVSSNLQSSTAGPQSQTINSQGALPGMVWQNRDVYLQGPIWAKIPHTDGNFHPSPLMGGFGLEHPPPQILIKNTPVPANPPEVFTPAKFASFITQYSTGQVSVEIEWELQKENSKRWNPEIQYTSNYAKSNNVEFAVNPDGVYTEPRPIGTRYLTRNL

SEQ ID NO: 172 - DNA, 3075 bp, Artificial Sequence
  source: /note="Description of Artificial Sequence: Synthetic polynucleotide"
tgagaactttcctttcaacgattgcgtcggacaagatggtgatctggtgggaggaggggaagatgaccgccaaggtcgtggagtcggccaaagccattcttggaggaagcaaggtgcgtgtggaccagaaatgcaagtcctcggcccagatagacccgactcccgtgatcgtcacctccaacaccaacatgtgcgccgtgattgacgggaactcaacgaccttcgagcaccagcagccgttgcaagaccggatgttcaaatttgaacttacccgccgtctggatcatgactttggaaaggtcaccaagcaggaagtgaaagactttttccggtgggcaaaggatcacgtggttgaggtggagcatgaattctacgtcaaaaagggtggagctaagaaaagacccgcccccagtgacgcagatataagtgagcccaaacgggcgcgcgagtcagttgcgcagccatcaacgtcagacgcggaagcttcgatcaactacgcggacaggtaccaaaaacaaatgttctcgtcacgtgggcatgaatctgatgctgtttccctgcagacaatgcgagagaatgaatcagaattcaaatatctgcttcactcacggacagaaagactgtttagagtgctttcccgtgtcagaatctcaacccgtttctgtcgtcaaaaaggcgtatcagaaactgtgctacattcatcatatcatgggaaaggtgccagacgcttgcactgcctgcgatctggtcaatgtggatttggatgactgcatctctgaacaataaatgatttaaatcaggtatggctgccgatggttatcctccagattggctcgaggacactctctctgaagggataagacagtggtggaagctcaaacctggcccaccaccaccaaagcccgcagagcggcataaggacgacagcaggggtcttgtgcttcctgggtacaagtacctcggacccttcaacggactcgacaagggggagccggtcaacgaggcagacgccgcggccctcgagcacgacaaggcctacgaccggcagctcgacagcggagacaacccgtacctcaagtacaaccacgccgacgcagagtttcaggagcgccttaaagaagatacgtcttttgggggcaacctcggacgagcagtcttccaggcgaaaaagagggttcttgaacctctgggcctggttgaggaacctgttaagacggctccgggaaaaaagaggccggtagagcactctcctgtggagccagactcctcctcgggaaccggaaaagcgggccagcggcctgcaagaaaaagattaaattttggtcagactggagacgcagactccgtacctgacccccagcctctcggacagccaccagcagccccctctggtctgggatctactacaatggctacaggcagtggcgcaccaatggcagacaataacgagggtgccgatggagtgggtaattcctcaggaaattggcattgcgattcccaatggctgggcgacagagtcatcaccaccagcacccgaacctgggccctgcccacatacaacaaccacctctacaagcaaatctccagccaatcaggagccagcaacgacaaccactactttggctacagcaccccctgggggtattttgacttcaacagattccactgccacttttcaccacgtgactggcaaagactcatcaacaacaactggggattccggcccaaaagactcaacttcaagctctttaatattcaagtcaaagaggtcacgcagaatgacggtacgacgacgattgccaataaccttaccagcacggttcaggtgtttactgactcggagtaccagctcccgtacgtcctgggctcggcgcatcaaggatgcctcccgccgtttccagcggacgtcttcatggtcccacagtatggatacctcaccctgaacaacgggagtcaggcggtaggacgctcttccttttactgcctggagtactttccttctcagatgctgcgtactggaaacaactttcagttcagctacacttttgaagacgtgcctttccacagcagctacgctcacagccagagtctggatcggctgatgaatcctctgatcgaccagtacctgtattatctgaacaagacacaaacaaatagtggaactcttcagcagtctcggctactgtttagccaagctggaccaaccaacatgtctcttcaagctaaaaactggctgcctggaccttgctacagacagcagcgtctgtcaaaacaggcaaacgacaacaacaacagcaactttccctggactgcagctacaaagtatcatctaaatggccgggactcgttggttaatccaggaccagctatggccagtcacaaggatgacgaagaaaagtttttccccatgcatggaaccctgatatttggtaaacaaggaacaaatgccaacgacgcggatttggaaaatgtcatgattacagatgaagaagaaatcagggccaccaatcccgtggctacggagcagtacgggactgtgtcaaataatttgcaaaactcaaacactggtccaactactggaactgtcaatcgccaaggagcgttacctggtatggtgtggcaggatcgagacgtgtacctgcagggacccatttgggccaagattcctcacaccgatggacactttcatccttctccactgatgggaggttttggactcaaacacccgcctcctcagatcatgatcaaaaacactcccgttccagccaatcctcccacaaacttcagttctgccaagtttgcttctttcatcacacagtattccacgggacaggtcagcgtggagatcgagtgggagctgcagaaggagaacagcaaacgctggaatcccgaaattcagtacacttccaactacaacaagtctgttaatgtggactttactgtggacactaatggtgtgtattcagagcctcgccccattggcaccagatacctgactcgtaatctgtaattgcttgttaatcaataaaccgtttaattcgtttcagttgaactttggtctctgcgaagggcgaa

SEQ ID NO: 173 - DNA, 3142 bp, Artificial Sequence
  source: /note="Description of Artificial Sequence: Synthetic polynucleotide"
aaaacgacgggccagtgattgtaatacgactcactatagggcgaaattgaaattagcggccgcgaattcgcctttcgcagagaccaaagttcaactgaaacgaattaaacggtttattgattaacaagcaattacagattacgagtcaggtatctggtgccaatggggcgaggctctgaatacacaccattagtgtccacagtaaagtccacattaacagacttgttgtagttggaagtgtactgaatttcgggattccagcgtttgctgttctccttctgcagctcccactcgatctccacgctgacctgtcccgtggaatactgtgtgatgaaagaagcaaacttggcagaactgaagtttgtgggaggattggctggaacgggagtgtttttgatcatgatctgaggaggcgggtgtttgagtccaaaacctcccatcagtggagaaggatgaaagtgtccatcggtgtgaggaatcttggcccaaatgggtccctgcaggtacacgtctcgatcctgccacaccataccaggtaacgctccttggtgattgacagttccagtagttggaccagtgtttgagttttgcaaattatttgacacagtcccgtactgctccgtagccacgggattggtggccctgatttcttcttcatctgtaatcatgacattttccaaatccgcgtcgttggcatttgttccttgtttaccaaatatcagggttccatgcatggggaaaaacttttcttcgtcatccttgtgactggccatagctggtcctggattaaccaacgagtcccggccatttagatgatactttgtagctgcagtccagggaaagttgctgttgttgttgtcgtttgcctgttttgacagacgctgctgtctgtagcaaggtccaggcagccagtttttagcttgaagagacatgttggttggtccagcttggctaaacagtagccgagactgctgaagagttccactatttgtttgtgtcttgttcagataatacaggtactggtcgatcagaggattcatcagccgatccagactctggctgtgagcgtagctgctgtggaaaggcacgtcttcaaaagtgtagctgaactgaaagttgtttccagtacgcagcatctgagaaggaaagtactccaggcagtaaaaggaagagcgtcctaccgcctgactcccgttgttcagggtgaggtatccatactgtgggaccatgaagacgtccgctggaaacggcgggaggcatccttgatgcgccgagcccaggacgtacgggagctggtactccgagtcagtaaacacctgaaccgtgctggtaaggttattggcaatcgtcgtcgtaccgtcattctgcgtgacctctttgacttgaatattaaagagcttgaagttgagtcttttgggccggaatccccggttgttgttgacgagtctttgccagtcacgtggtgaaaagtggcagtggaatctgttgaagtcaaaatacccccagggggtgctgtagccaaagtagtggttgtcgttgctggctcctgattggctggagatttgcttgtagaggtggttgttgtatgtgggcagggcccaggttcgggtgctggtggtgatgactctgtcgcccagccattgggaatcgcaatgccaatttcctgaggaattacccactccatcggcaccctcgttattgtctgccattggtgcgccactgcctgtagccattgtagtagatcccagaccagagggggctgctggtggctgtccgagaggctgggggtcaggtacggagtctgcgtctccagtctgaccaaaatttaatctttttcttgcaggctgctggcccgcttttccggttcccgaggaggagtctggctccacaggagagtgctctaccggcctcttttttcccggagccgtcttaacaggctcctcaaccaggcccagaggttcaagaaccctctttttcgcctggaagactgctcgtccgaggttgcccccaaaagacgtatcttctttaaggcgctcctgaaactctgcgtcggcgtggttgtacttgaggtacgggttgtctccgctgtcgagctgccggtcgtaggccttgtcgtgctcgagggccgcggcgtctgcctcgttgaccggctcccccttgtcgagtccgttgaagggtccgaggtacttgtacccaggaagcacaagacccctgctgtcgtccttatgccgctctgcgggctttggtggtggtgggccaggtttgagcttccaccactgtcttattccttcagagagagtgtcctcgagccaatctggaagataaccatcggcagccatacctgatttaaatcatttattgttcagagatgcagtcatccaaatccacattgaccagatcgcaggcagtgcaagcgtctggcacctttcccatgatatgatgaatgtagcacagtttctgatacgcctttttgacgacagaaacgggttgagattctgacacgggaaagcactctaaacagtctttctgtccgtgagtgaagcagatatttgaattctgattcattctctcgcattgtctgcagggaaacagcatcagattcatgcccacgtgacgagaacatttgttttggtacctgtccgcgtagttgatcgaagcttccgcgtctgacgtcgatggctgcgcaactgactcgcgcgcccgtttgggctcacttatatctgcgtcactgggggcgggtcttttcttagctccaccctttttgacgtagaattcatgctccacctcaaccacgtgatcctttgcccaccggaaaaagtctttcacttcctgcttggtgacctttccaaagtcatgatccagacggcgggtaagttcaaatttgaacatccggtcttgcaacggctgctggtgctcgaaggtcgttgagttcccgtcaatcacggcgcacatgttggtgttggaggtgacgatcacgggagtcgggtctatctgggccgaggacttgcatttctggtccacacgcaccttgcttcctccaagaatggctttggccgactccacgaccttggcggtcatcttcccctcctcccaccagatcaccatcttgtcgacgcaatggtaaaaggaaagttctcattgg

SEQ ID NO: 174 - protein, 735 aa, Adeno-associated virus-2
MAADGYLPDWLEDTLSEGIRQWWKLKPGPPPPKPAERHKDDSRGLVLPGYKYLGPFNGLDKGEPVNEADAAALEHDKAYDRQLDSGDNPYLKYNHADAEFQERLKEDTSFGGNLGRAVFQAKKRVLEPLGLVEEPVKTAPGKKRPVEHSPVEPDSSSGTGKAGQQPARKRLNFGQTGDADSVPDPQPLGEPPATPAAVGPTTMASGGGAPMADNNEGADGVGNASGNWHCDSTWLGDRVITTSTRTWALPTYNNHLYKQISSASTGASNDNHYFGYSTPWGYFDFNRFHCHFSPRDWQRLINNNWGFRPKRLNFKLFNIQVKEVTQNDGTTTIANNLTSTVQVFTDSEYQLPYVLGSAHQGCLPPFPADVFMIPQYGYLTLNNGSQAVGRSSFYCLEYFPSQMLRTGNNFTFSYTFEDVPFHSSYAHSQSLDRLMNPLIDQYLYYLNRTQNQSGSAQDKALLFSRGSPAGMSVQPKNWLPGPCYRQQRVSKTKTDNNNSNFTWTGASKYNLNGRESIINPGTAMASHKDDKDKFFPMSGVMIFGKESAGASNTALDNVMITDEEEIKATNPVATERFGTVAVNFQSSSTDPATGDVHVMGALPGMVWQDRDVYLQGPIWAKIPHTDGHFHPSPLMGGFGLKHPPPQILIKNTPVPANPPAEFSATKFASFITQYSTGQVSVEIEWELQKENSKRWNPEVQYTSNYAKSANVDFTVDNNGLYTEPRPIGTRYLTRP

SEQ ID NO: 175 - protein, 740 aa, Adeno-associated virus-2
MAADGYLPDWLEDTLSEGIRQWWKLKPGPPPPKPAERHKDDSRGLVLPGYKYLGPFNGLDKGEPVNAADAAALEHDKAYDRQLDSGDNPYLKYNHADAEFQERLKEDTSFGGNLGRAVFQAKKRVLEPLGLVEEPVKTAPGKKRPVEHSPVEPDSSSGTGKAGQQPARKRLNFGQTGDADSVPDPQPLGQPPAAPSGLGTNTMATGSGAPMADNNEGADGVGNSSGNWHCDSTWMGDRVITTSTRTWALPTYNNHLYKQISSQSGASNDNHYFGYSTPWGYFDFNRFHCHFSPRDWQRLINNNWGFRPKRLNFKLFNIQVKEVTQNDGTTTIANNLTSTVQVFTDSEYQLPYVLGSAHQGCLPPFPADVFMVPQYGYLTLNNGSQAVGRSSFYCLEYFPSQMLRTGNNFTFSYTFEDVPFHSSYAHSQSLDRLMNPLIDQYLYYLSRTNTPSGTTTQSGLQFSQAGASDIRDQSRNWLPGPCYRQQRVSKTSADNNNSEYSWTGATKYHLNGRDSLVNPGPAMASHKDDEEKFFPQSGVLIFGKQGSEKTNVDIEKVMITDEEEIRTTNPVATEQYGSVSTNLQRGNRQAATADVNTQGVLPGMVWQDRDVYLQGPIWAKIPHTDGHFHPSPLMGGFGLKHPPPQILIKNTPVPANPSTTFSAAKFASFITQYSTGQVSVEIEWELQKENSKRWNPEIQYTSNYNKSVNVDFTVDTNGVYSEPRPIGTRYLTRNLLLAAA

SEQ ID NO: 176 - protein, 734 aa, Adeno-associated virus-2
MAADGYLPDWLEDTLSEGIRQWWKLKPGPPPPKPAERHKDDSRGLVLPGYKYLGPFNGLDKGEPVNEADAAALEHDKAYDRQLDSGDNPYLKYNHADAEFQERLKEDTSFGGNLGRAVFQAKKRVLEPLGLVEEPVKTAPGKKRPVEHSPVEPDSSSGTGKAGQQPARKRLNFGQTGDADSVPDPQPLGQPPAAPSGLGTNTMATGSGAPMADNNEGADGVGNSSGNWHCDSTWMGDRVITTSTRTWALPTYNNHLYKQISSQSGASNDNHYFGYSTPWGYFDFNRFHCHFSPRDWQRLINNNWGFRPKRLNFKLFNIQVKEVTQNDGTTTIANNLTSTVQVFTDSEYQLPYVLGSAHQGCLPPFPADVFMVPQYGYLTLNNGSQAVGRSSFYCLEYFPSQMLRTGNNFTFSYTFEDVPFHSSYAHSQSLDRLMNPLIDQYLYYLSRTNTPSGTTTQSGLQFSQAGASDIRDQSRNWLPGPCYRQQRVSKTSADNNNSEYSWTGATMYHLNGRDSLVNPGPAMASHKDDEEKFFPQSGVLIFGKQGSEKTNVDIEKVMITDEEEIRTTNPVATEQYGSVSTNLQRGNRQAATADVNTQGVLPGMVWQDRDVYLQGPIWAKIPHTDGHFHPSPLMGGFGLKHPPPQILIKNTPVPANPSTTFSAAKFASFITQYSTGQVSVEIEWELQKENSKRWNPEIQYTSNYNKSINVDFTVDTNGVYSEPRPIGTRYLTRN

SEQ ID NO: 177 - protein, 734 aa, Adeno-associated virus-2
MAADGYLPDWLEDTLSEGIRQWWKLKPGPPPPKPAERHKDDSRGLVLPGYKYLGPFNGLDKGEPVNEADAAALEHDKAYDRQLDSGDNPYLKYNHADAEFQERLKEDTSFGGNLGRAVFQAKKRVLEPLGLVEEPVKTAPGKKRPVEHSPVEPDSSSGTGKAGQQPARKRLNFGQTGDADSVPDPQPLGQPPAAPSGLGTNTMATGSGAPMADNNEGADGVGNSSGNWHCDSTWMGDRVITTSTRTWALPTYNNHLYKQISSQSGASNDNHYFGYSTPWGYFDFNRFHCHFSPRDWQRLINNNWGFRPKRLNFKLFNIQVKEVTQNDGTTTIANNLTSTVQVFTDSEYQLPYVLGSAHQGCLPPFPADVFMVPQYGYLTLNNGSQAVGRSSFYCLEYFPSQMLRTGNNFTFSYTFEDVPFHSSYAHSQSLDRLMNPLIDQYLYYLSRTNTPSGTTTQSGLQFSQAGASDIRDQSRNWLPGPCYRQQRVSKTSADNNNSEYSWTGATKYHLNGRDSLVNPGPAMASHKDDEEKFFPQSGVLIFGKQGSEKTNVDIEKVMITDEEEIRTTNPVATEQYGSVSTNLQRGNRQAATADVNTQGVLPGMVWQDRDVYLQGPIWAKIPHTDGHFHPSPLMGGFGLKHPPPQILIKNTPVPANPSTTFSEAKFASFITQYSTGQVSVEIEWELQKENSKRWNPEIQYTSNYNKSVNVDFTVDTNGVYSEPRPIGTRYLTRN

SEQ ID NO: 178 - protein, 739 aa, Adeno-associated virus-2
MAADGYLPDWLEDTLSEGIRQWWKLKPGPPPPKPAERHKDDSRGLVLPGYKYLGPFNGLDKGEPVNEADAAALEHDKAYDRQLDSGDNPYLKYNHADAEFQERLKEDTSFGGNLGRAVFQAKKRVLEPLGLVEEPVKTAPGKKRPVEHSPVEPDSSSGTGKAGQQPARKRLNFGQTGDADSVPDPQPLGQPPAAPSGLGTNTMATGSGAPMADNNEGADGVGNSSGNWHCDSTWMGDRVITTSTRTWALPTYNNHLYKQISSQSGASNDNHYFGYSTPWGYFDFNRFHCHFSPRDWQRLINNNWGFRPKRLNFKLFNIQVKEVTQNDGTTTIANNLTSTVQVFTDSEYQLPYVLGSAHQGCLPPFPADVFMVPQYGYLTLNNGSQAVGRSSFYCLEYFPSQMLRTGNNFTFSYTFEDVPFHSSYAHSQSLDRLMNPLIDQYLYYLSRTNTPSGTTTQSGLQFSQAGASDIRDQSRNWLPGPCYRQQRVSKTSADNNNSEYSWTGATKYHLNGRDSLVNPGPAMASHKDDEEKFFPQSGVLIFGKQGSEKTNVDIEKVMITDEEEIRTTNPVATEQYGSVSTNLQRGNRQAATADVNTQGVLPGMVWQDRDVYLQGPIWAKIPHTDGHFHPSPLMGGFGLKHPPPQILIKNTPVPANPSTTFSAAKFASFITQYSTGQVSVEIEWELQKENSKRWNPEIQYTSNYNKSVNVDFTVDTNGVYSEPRPIGTRYLTRNLLLAA

SEQ ID NO: 179 - protein, 725 aa, Adeno-associated virus-2
MAADGYLPDWLEDTLSEGIRQWWKLKPGPPPPKPAERHKDDSRGLVLPGYKYLGPFNGLDKGEPVNEADAAALEHDKAYDRQLDSGDNPYLKYNHADAEFQERLKEDTSFGGNLGRAVFQAKKRVLEPLGLVEEPVKTAPGKKRPVEHSPVEPDSSSGTGKAGQQPARKRLNFGQTGDADSVPDPQPLGQPPAAPSGLGTNTMATGSGAPMADNNEGADGVGNSSGNWHCDSTWMGDRVITTSTRTWALPTYNNHLYKQISSQSGASNDNHYFGYSTPWGYFDFNRFHCHFSPRDWQRLINNNWGFRPKRLNFKLFNIQVKEVTQNDGTTTIANNLTSTVQVFTDSEYQLPYVLGSAHQGCLPPFPADVFMVPQYGYLTLNNGSQAVGRSSFYCLEYFPSQMLRTGNNFTFSYTFEDVPFHSSYAHSQSLDRLMNPLIDQYLYYLSRTNTPSGTTTQSGLQFSQAGASDIRDQSRNWLPGPCYRQQRVSKTSADNNNSEYSWTGATKYHLNGRDSLVNPGPAMASHKDDEEKFFPQSGVLIFGKQGSEKTNVDIEKVMITDEEEIRTTNPVATEQYGSVSTNLQRGNRQAATADVNTQGVLPGMVWQDRDVYLQGPIWAKIPHTDGHFHPSPLMGGFGLKHPPPQILIKNTPVPANPSTTFSAAKFASFITQYSTGQVSVEIEWELQKENSKRWNPEIQYTSNYNKSVNVDFTVDTNGVYSEPRP

SEQ ID NO: 180 - protein, 707 aa, Adeno-associated virus-2
MAADGYLPDWLEDTLSEGIRQWWKLKPGPPPPKPAERHKDDSRGLVLPGYKYLGPFNGLDKGEPVNEADAAALEHDKAYDRQLDSGDNPYLKYNHADAEFQERLKEDTSFGGNLGRAVFQAKKRVLEPLGLVEEPVKTAPGKKRPVEHSPVEPDSSSGTGKAGQQPARKRLNFGQTGDADSVPDPQPLGQPPAAPSGLGTNTMATGSGAPMADNNEGADGVGNSSGNWHCDSTWMGDRVITTSTRTWALPTYNNHLYKQISSQSGASNDNHYFGYSTPWGYFDFNRFHCHFSPRDWQRLINNNWGFRPKRLNFKLFNIQVKEVTQNDGTTTIANNLTSTVQVFTDSEYQLPYVLGSAHQGCLPPFPADVFMVPQYGYLTLNNGSQAVGRSSFYCLEYFPSQMLRTGNNFTFSYTFEDVPFHSSYAHSQSLDRLMNPLIDQYLYYLSRTNTPSGTTTQSGLQFSQAGASDIRDQSRNWLPGPCYRQQRVSKTSADNNNSEYSWTGATKYHLNGRDSLVNPGPAMASHKDDEEKFFPQSGVLIFGKQGSEKTNVDIEKVMITDEEEIRTTNPVATEQYGSCIYQPPERQQTSSYRRCQHTRRSSRHGLAGQRCVPSGAHLGKDSTHGRTFSPLSPHGWIRTTPSSTDSHQEHPGTCESFDHLQCGKVCFLHHTVLHGTGQRGDRVRAAEGKQQTLESRNSVHFQLQQVC

SEQ ID NO: 181 - protein, 739 aa, Adeno-associated virus-2; identical to SEQ ID NO: 178

SEQ ID NO: 182 - protein, 737 aa, Adeno-associated virus-2
MASDGYLPDWLEDNLSEGIREWWDLKPGAPKPKANQQKQDDGRGLVLPGYKYLGPFNGLDKGEPVNAADAAALEHDKAYDQQLKAGDNPYLRYNHADAEFQERLQEDTSFGGNLGRAVFQAKKRVLEPFGLVEEGAKTAPGKKRPVEQSPQEPDSSSGIGKTGQQPAKKRLNFGQTGDSESVPDPQPLGEPPATPAAVGPTTMASGGGAPMADNNEGADGVGNASGNWHCDSTWLGDRVITTSTRTWALPTYNNHLYKQISSASTGASNDNHYFGYSTPWGYFDFNRFHCHFSPRDWQRLINNNWGFRPKRLNFKLFNIQVKEVTTNDGTTTIANNLTSTVQVFTDSEYQLPYVLGSAHQGCLPPFPADVFMVPQYGYLTLNNGSQAVGRSSFYCLEYFPSQMLRTGNNFTFSYTFEDVPFHSSYAHSQSLDRLMNPLIDQYLYYLSRTNTPSGTTTQSGLQFSQAGASDIRDQSRNWLPGPCYRQQRVSKTSADNNNSEYSWTGATKYHLNGRDSLVNPGPAMASHKDDEEKFFPQSGVLIFGKQGSEKTNVDIEKVMITDEEEIRTTNPVATEQYGSVSTNLQRGNRQAATADVNTQGVLPGMVWQDRDVYLQGPIWAKIPHTDGHFHPSPLMGGFGLKHHPPQILIKNTPVPANPSTTFSAAKFASFITQYSTGQVSVEIEWELQKENSKRWNPEIQYTSNYNKSVNVDFTVDTNGVYSEPRPIGTRYLTRNLL

SEQ ID NO: 183 - protein, 741 aa, Adeno-associated virus-2
MAADGYLPDWLEDTLSEGIREWWALKPGAPKPKANQQKQDDGRGLVLPGYKYLGPFNGLDKGEPVNEADAAALEHDKAYDQQLQAGDNPYLRYNHADAEFQERLQEDTSFGGNLGRAVFQAKKRVLEPLGLVEEPVKTAPGKKRPVEHSPVEPDSSSGTGKSGQQPARKRLNFGQTGDADSVPDPQPLGQPPAAPSGLGTNTMATGSGAPMADNNEGADGVGNSSGNWHCDSTWMGDRVITTSTRTWALPTYNNHLYKQISSQSGASNDNHYFGYSTPWGYFDFNRFHCHFSPRDWQRLINNNWGFRPKRLNFKLFNIQVKEVTQNDGTTTIANNLTSTVQVFTDSEYQLPYVLGSAHQGCLPPFPADVFMVPQYGYLTLNNGSQAVGRSSFYCLEYFPSQMLRTGNNFTFSYTFEDVPFHSSYAHSQSLDRLMNPLIDQYLYYLSRTNTPSGTTTQSGLQFSQAGASDIRDQSRNWLPGPCYRQQRVSKTSADNNNSEYSWTGATKYHLNGRDSLVNPGPAMASHKDDEEKFFPQSGVLIFGKQGSEKTNVDIEKVMITDEEEIRTTNPVATEQYGSVSTNLQRGNLANHNNTTNARQAATADVNTQGVLPGMVWQDRDVYLQGPIWAKIPHTDGHFHPSPLMGGFGLKHPPPQILIKNTPVPANPSTTFSAAKFASFITQYSTGQVSVEIEWELQKENSKRWNPEIQYTSNYNKSINVDFTVDTNGVYSEPRPIGTRYL

SEQ ID NO: 184 - protein, 730 aa, Adeno-associated virus-2
MASDGYLPDWLEDNLSEGIREWWDLKPGAPKPKANQQKQDDGRGLVLPGYKYLGPFNGLDKGEPVNAADAAALEHDKAYDQQLKAGDNPYLRYNHADAEFQERLQEDTSFGGNLGRAVFQAKKRVLEPFGLVEEGAKTAPGKKRPVEQSPQEPDSSSGIGKTGQQPAKKRLNFGQTGDSESVPDPQPLGEPPATPAAVGPTTMASGGGAPMADNNEGADGVGNASGNWHCDSTWLGDRVITTSTRTWALPTYNNHLYKQISSASTGASNDNHYFGYSTPWGYFDFNRFHCHFSPRDWQRLINNNWGFRPKRLNFKLFNIQVKEVTTNDGVTTIANNLTSTVQVFSDSEYQLPYVLGSAHQGCLPPFPADVFMIPQYGYLTLNNGSQAVGRSSFYCLEYFPSQMLRTGNNFTFSYTFEDVPFHSSYAHSQSLDRLMNPLIDQYLYYLNRTQNQSGSAQNNDLLFSRGSPAGMSVQPKNWLPGPCYRQQRVSKTKTDNNNSNFTWTGASKYNLNGRESIINPGTAMASHKDDKDKFFPMSGVMIFGKESAGASNTALDNVMITDEEEIKATNPVATERFGTVAVNLQSSSTDPATGDVHVMGALPGMVWQDRDVYLQGPIWAKIPHTDGHFHPSPLMGGFGLKNPPPQILIKNTPVPANPPAEFSATKFASFITQYSTGQVSVEIEWELQKENSKRWNPEVQYTSNYAKSANVDFTVDNNGLYTEPRPIGTR

SEQ ID NO: 185 - protein, 735 aa, Adeno-associated virus-2
  MOD_RES (239)..(239): Any amino acid
MASDGYLPDWLEDNLSEGIREWWDLKPGAPKPKANQQKQDDGRGLVLPGYKYLGPFNGLDKGEPVNAADAAALEHDKAYDQQLKAGDNPYLRYNHADAEFQERLQEDTSFGGNLGRAVFQAKKRVLEPFGLVEEGAKTAPGKKRPVEQSPQEPDSSSGIGKTGQQPAKKRLNFGQTGDSESVPDPQPLGEPPATPAAVGPTTMASGGGAPMADNNEGADGVGNASGNWHCDSTWLGDRXITTSTRTWALPTYNNHLYKQISSASTGASNDNHYFGYSTPWGYFDFNRFHCHFSPRDWQRLINNNWGFRPKRLNFKLFNIQVKEVTTNDGVTTIANNLTSTVQVFSDSEYQLPYVLGSAHQGCLPPFPADVFMIPQYGYLTLNNGSQAVGRSSFYCLEYFPSQMLRTGNNFTFSYTFEDVPFHSSYAHSQSLDRLMNPLIDQYLYYLNRTQNQSGSAQNNDLLFSRGSPAGMSVQPKNWLPGPCYRQQRVSKTKTDNNNSNFTWTGASKYNLNGRESIINPGTAMASHKDDKDKFFPMSGVMIFGKESAGASNTALDNVMITDEEEIKATNPVATERFGTVAVNLQSSSTDPATGDVHVMGALPGMVWQDRDVYLQGPIWAKIPHTDGHFHPSPLMGGFGLKNPPPQILIKNTPVPANPPAEFSATKFASFITQYSTGQVSVEIEWELQKENSKRWNPEVQYTSNYAKSANVDFTVDNNGLYTEPRPIGTRYLTRP

SEQ ID NO: 186 - protein, 733 aa, Adeno-associated virus-2
MASDGYLPDWLEDNLSEGIREWWDLKPGAPKPKANQQKQDDGRGLVLPGYKYLGPFNGLDKGEPVNAADAAALEHDKAYDQQLKAGDNPYLRYNHADAEFQERLQEDTSFGGNLGRAVFLAKKRVLEPFGLVEEGAKTAPGKKRPVEQSPQEPDSSSGIGKTGQQPAKKRLNFGQTGDSESVPDPQPLGEPPATPAAVGPTTMASGGGAPMADNNEGADGVGNASGNWHCDSTWLGDRVITTSTRTWALPTYNNHLYKQISSASTGASNDNHYFGYSTPWGYFDFNRFHCHFSPRDWQRLINNNWGFRPKRLNFKLFNIQVKEVTTNDGVTTIANNLTSTVQVFSDSEYQLPYVLGSAHQGCLPPFPADVFMIPQYGYLTLNNGSQAVGRSSFYCLEYFPSQMLRTGNNFTFSYTFEDVPFHSSYAHSQSLDRLMNPLIDQYLYYLNRTQNQSGSAQNNDLLFSRGSPAGMSVQPKNWLPGPCYRQQRVSKTKTDNNNSNFTWTGASKYNLNGRESIINPGTAMASHKDDKDKFFPMSGVMIFGKESAGASNTALDNVMITDEEEIKATNPVATERFGTVAVNLQSSSTDPATGDVHVMGALPGMVWQDRDVYLQGPIWAKIPHTDGHFHPSPLMGGFGLKNPPPQILIKNTPVPANPPAEFSATKFASFITQYSTGQVSVEIEWELQKENSKRWNPEVQYTSNYAKSANVDFTVDNNGLYTEPRPIGTRYLT

SEQ ID NO: 187 - protein, 734 aa, Adeno-associated virus-2
MAADGYLPDWLEDTLSEGIRQWWKLKPGPPPPKPAERHKDDSRGLVLPGCKYLGPFNGLDKGEPVNEADAAALEHDKAYDRQLDSGDNPYLKYNHADAEFQERLKEDTSFGGNLGRAVFQAKKRVLEPLGLVEEPVKTAPGKKRPVEHSPVEPDSSSGTGKAGQQPARKRLNFGQTGDADSVPDPQPLGQPPAAPSGLGTNTMATGSGAPMADNNEGADGVGNSSGNWHCDSTWMGDRVITTSTRTWALPTYNNHLYKQISSQSGASNDNHYFGYSTPWGYFDFNRFHCHFSPRDWQRLINNNWGFRPKRLNFKLFNIQVKEVTQNDGTTTIANNLTSTVQVFSDSEYQLPYVLGSAHQGCLPPFPADVFMIPQYGYLTLNNGSQAVGRSSFYCLEYFPSQMLRTGNNFTFNYTFEDVPFHSSYAHSQSLDRLMNPLIDQYLYYLNRTQNQSGSAQNNDLLFSRGSPAGMSVQPKNWLPGPCYRQQRVSKTKTDNNNSNFTWTGASKYNLNGRESIINPGTAMASHKDDKDKFFPMSGVMIFGKESAGASNTALDNVMITDEEEIKATNPVATERFGTVAVNLQSSSTDPATGDVHVMGALPGMVWQDRDVYLQGPIWAKIPHTDGHFHPSPLMGGFGLKNPPPQILIKNTPVPANPPAEFSATKFASFITQYSTGQVSVEIEWELQKENSKRWNPEVQYTSNYAKSANVDFTVDNNGLYTEPRPIGTRYLTRP

SEQ ID NO: 188 - protein, 734 aa, Adeno-associated virus-2
MAADGYLPDWLEDTLSEGIRQWWKLKPGPPPPKPAERHKDDSRGLVLPGYKYLGPFNGLDKGEPVNEADAAALEHDKAYDRQLDSGDNPYLKYNHADAEFQERLKEDTSFGGNLGRAVFQAKKRVLEPLGLVEEPVKTAPGKKRPVEHSPVEPDSSSGTGKAGQQPARKRLNFGQTGDADSVPDPQPLGQPPAAPSGLGTNTMATGSGAPMADNNEGADGVGNSSGNWHCDSTWMGDRVITTSTRTWALSTYNNHLYKQISSQSGASNDNHYFGYSTPWGYFDFNRFHCHFSPRDWQRLINNNWGFRPKRLNFKLFNIQVKEVTQNDGTTTIANNLTSTVQVFTDSEYQLPYVLGSAHQGCLPPFPADVFMVPQYGYLTLNNGSQAVGRSSFYCLEYFPSQMLRTGNNFTFSYTFEDVPFHSSYAHSQSLDRLMNPLIDQYLYYLSRTNTPSGTTTQSRLQFSQAGASDIRDQSRNWLPGPCYRQQRVSKTSADNNNSEYSWTGATKYHLNGRDSLVNPGPAMASHKDDEEKFFPQSGVLIFGKQGSEKTNVDIEKVMITDEEEIRTTNPVATEQYGSVSTNLQRGNRQAATADVNTQGVLPGMVWQDRDVYLQGPIWAKIPHTDGHFHPSPLMGGFGLKHPPPQILIKNTPVPANPSTTFSAAKFASFITQYSTGQVSVEIEWELQKENSKRWNPEIQYTSNYNKSINVDFTVDTNGVYSEPRPIGTRYLTRN

SEQ ID NO: 189 - protein, 738 aa, Adeno-associated virus-2
MAADGYLPDWLEDTLSEGIRQWWKLKPGPPPPKPAERHKDDSRGLVLPGYKYLGPFNGLDKGEPVNEADAAALEHDKAYDRQLDGGDNPYLKYNHADAEFQERLKEDTSFGGNLGRAVFQAKKRVLEPLGLVEEPVKTAPGKKRPVEHSPVEPDSSSGTGKAGQQPARKRLNFGQTGDADSVPDPQPLGQPPAAPSGLGTNTMATGSGAPMADNNEGADGVGNSSGNWHCDSTWMGDRVITTSTRTWALPTYNNHLYKQISSQSGASNDNHYFGYSTPWGYFDFNRFHCHFSPRDWQRLINNNWGFRPKRLNFKLFNIQVKEVTQNDGTTTIANNLTSTVQVFTDSEYQLPYVLGSAHQGCLPPFPADVFMVPQYGYLTLNNGSQAVGRSSFYCLEYFPSQMLRTGNNFTFSYTFEDVPFHSSYAHSQSLDRLMNPLIDQYLYYLSRTNTPSGTTTQSGLQFSQAGASDIRDQSRNWLPGPCYRQQRVSKTSADNNNSEYSWTGATKYHLNGRDSLVNPGPAMASHKDDEEKFFPQSGVLIFGKQGSEKTNVDIEKVMITDEEEIRTTNPVATEQYGSVSTNLQRGNRQAATADVNTQGVLPGMVWQDRDVYLQGPIWAKIPHTDGHFHPSPLMGGFGLKHPPPQILIKNTPVPANPSTTFSAAKFASFITQYSTGQVSVEIEWELQKENSKRWNPEIQYTSNYNKSVNVDFTVDTNGVYSEPRPIGTRYLTRNLLRP

SEQ ID NO: 190 - DNA, 2208 bp, Artificial Sequence
  source: /note="Description of Artificial Sequence: Synthetic polynucleotide"
atggctgccgatggttatcttccagattggctcgaggacactctctctgaaggaataagacagtggtggaagctcaaacctggcccaccaccaccaaagcccgcagagcggcataaggacgacagcaggggtcttgtgcttcctgggtacaagtacctcggacccttcaacggactcgacaagggggagccggtcaacgaggcagacgccgcggccctcgagcacgacaaggcctacgaccggcagctcgacagcggagacaacccgtacctcaagtacaaccacgccgacgcagagtttcaggagcgccttaaagaagatacgtcttttgggggcaacctcggacgagcagtcttccaggcgaaaaagagggttcttgaacctctgggcctggttgaggaacctgttaagacggctccgggaaaaaagaggccggtagagcactctcctgtggagccagactcctcctcgggaaccggaaaagcgggccagcagcctgcaagaaaaagattaaattttggtcagactggagacgcagactccgtacctgacccccagcctctcggacagccaccagcagccccctctggtctgggatctactacaatggctacaggcagtggcgcaccaatggcagacaataacgagggtgccgatggagtgggtaattcctcaggaaattggcattgcgattcccaatggctgggcgacagagtcatcaccaccagcacccgaacctgggccctgcccacatacaacaaccacctctacaagcaaatctccagccaatcaggagccagcaacgacaaccactactttggctacagcaccccctgggggtattttgacttcaacagattccactgccacttttcaccacgtgactggcaaagactcatcaacaacaactggggattccggcccaaaagactcaacttcaagctctttaatattcaagtcaaagaggtcacgcagaatggcggtacgacgacgattgccaataaccttaccagcacggttcaggtgtttactgactcggagtaccagctcccgtacgtcctgggctcggcgcatcaaggatgcctcccgccgtttccagcggacgtcttcatggtcccacagtatggatacctcaccctgaacaacgggagtcaggcggtaggacgctcttccttttactgcctggagtactttccttctcagatgctgcgtactggaaacaactttcagttcagctacacttttgaagacgtgcctttccacagcagctacgctcacagccagagtctggatcggctgatgaatcctctgatcgaccagtacctgtattatctgaacaagacacaaacaaatagtggaactcttcagcagtctcggctactgtttagccaagctggaccaaccaacatgtctcttcaagctaaaaactggctgcctggaccttgctacagacagcagcgtctgtcaaaacaggcaaacggcaacaacaacagcaactttccctggactgcagctacaaagtatcatctaaatggccgggactcgttggttaatccaggaccagctatggccagtcacaaggatgacgaagaaaagtttttccccatgcatggaaccctgatatttggtaaacaaggaacaaatgccaacgacgcggatttggaaaatgtcatgattacagatgaagaagaaatcagggccaccaatcccgtggctacggagcagtacgggactgtgtcaaataatttgcaaaactcaaacactggtccaactactggaactgtcaatcaccaaggagcgttacctggtatggtgtggcaggatcgagacgtgtacctgcagggacccatttgggccaagattcctcacaccgatggacactttcatccttctccactgacgggaggttttggactcaaacacccgcctcctcagatcatgatcaaaaacactcccgttccagccaatcctcccacaaacttcagttctgccaagtttgcttctttcatcacacagtattccacgggacaggtcagcgtggagatcgagtgggagctgcagaaggagaacagcaaacgctggaatcccgaaattcagtacacttccaactacaacaagtctgttaatgtggactttactgtggacactaatggtgtgtattcagagcctcgccccattggcaccagatacctgactcgtaatctgtaa

SEQ ID NO: 191 - protein, 735 aa, Artificial Sequence
  source: /note="Description of Artificial Sequence: Synthetic polypeptide"
MAADGYLPDWLEDTLSEGIRQWWKLKPGPPPPKPAERHKDDSRGLVLPGYKYLGPFNGLDKGEPVNEADAAALEHDKAYDRQLDSGDNPYLKYNHADAEFQERLKEDTSFGGNLGRAVFQAKKRVLEPLGLVEEPVKTAPGKKRPVEHSPVEPDSSSGTGKAGQQPARKRLNFGQTGDADSVPDPQPLGQPPAAPSGLGSTTMATGSGAPMADNNEGADGVGNSSGNWHCDSQWLGDRVITTSTRTWALPTYNNHLYKQISSQSGASNDNHYFGYSTPWGYFDFNRFHCHFSPRDWQRLINNNWGFRPKRLNFKLFNIQVKEVTQNGGTTTIANNLTSTVQVFTDSEYQLPYVLGSAHQGCLPPFPADVFMVPQYGYLTLNNGSQAVGRSSFYCLEYFPSQMLRTGNNFQFSYTFEDVPFHSSYAHSQSLDRLMNPLIDQYLYYLNKTQTNSGTLQQSRLLFSQAGPTNMSLQAKNWLPGPCYRQQRLSKQANGNNNSNFPWTAATKYHLNGRDSLVNPGPAMASHKDDEEKFFPMHGTLIFGKQGTNANDADLENVMITDEEEIRATNPVATEQYGTVSNNLQNSNTGPTTGTVNHQGALPGMVWQDRDVYLQGPIWAKIPHTDGHFHPSPLTGGFGLKHPPPQIMIKNTPVPANPPTNFSSAKFASFITQYSTGQVSVEIEWELQKENSKRWNPEIQYTSNYNKSVNVDFTVDTNGVYSEPRPIGTRYLTRNL

SEQ ID NO: 192 - DNA, 2208 bp, Artificial Sequence
  source: /note="Description of Artificial Sequence: Synthetic polynucleotide"
atggctgccgatggttatcttccagattggctcgaggacactctctctgaaggaataagacagtggtggaagctcaaacctggcccaccaccaccaaagctcgcagagcggcatcaggacgacagcaggggtcttgtgcttcctgggtacaagtacctcggacccttcaacggactcgacaaaggagagccggtcaacgaggcagacgccgcggccctcgagcacgacaaggcctacgaccggcagctcgacagcggagacaacccgtacctcaagtacaaccacgccgacgcggagtttcaggagcgtcttaaagaagatacgtcttttgggggcaacctcggacgagcagtcttccaggcgaaaaagagggttcttgaacctctgggcctggttgaggaacctgttaagacggctccgggaaaaaagaggccggtagagcactctcctgtggagccagactcctcctcgggaaccggaaaggcgggccatcagcctgcgagaaagagattgaattttggtcagactggagacgcagactccgtacctgacccccagcctctcggacagccaccagcagcccccacaagtctgggatctactacaatggctacaggcagtggcgcaccaatggcagacaataacgagggtgccgatggagtgggtaattcctcaggaaattggcattgcgattcccaatggctgggcgacagagtcatcaccaccagcacccgaacctgggccctgcccacctacaacaaccacctctacaagcaaatctccagccaatcaggagcctcgaacgacaaccactactttggctacagcaccccctgggggtattttgacttcaacagattccactgtcacttctccccacgtgattggcaaagactcatcaacaacaactggggattccgacccaagagactcaacttcaagctctttaacattcaagtcaaagaggtcacgcagaatgacggtacgacgacgattgccaataaccttaccagcacggttcaggtgtttactgactcggagtaccagctcccgtacgtcctcggctcggcgcatcaaggatgcctcccgccgtttccagcggacgtcttcacggtcccacagtatggatacctcaccctgaacaacgggagtcaggcggtaggacgctcttccttttactgcctggagtactttccttctcagatgctgcgtactggaaacaaccttaccttcagctacacctttgaggacgttcctttccacagcagctacgctcacagccagagtttggaccggctgatgaatcctctgatcgaccagtatctatattatctgaacaggacacaatcaaatagtggaactcttcagcagtctaggctactgtttagccaagctggacccaccagcatgtctcttcaagctaaaaactggctgcctggaccttgctacagacagcagcgtctttcaaagcaggcaaacgacaacaacaacagcaactttccctggactgcggctacaaagtatcatctaaatggccgggactcgttggttaatccaggaccagctatggccagccacaaagacgatgaagaaaagtttttccccatgcatggaaccctgatatttggtaaacaaggaacaaatgctaacgacgcggatttggagcatgttatgattacagatgaagaagaaatcaggaccaccaatcctgtggctacagagcagtacggaaacgtgtcaaataatttgcaaaactcaaatactggtccaactacagaaaatgtcaatcaccagggagcgttacctggtatggtgtggcaggatcgagacgtgtacctgcagggacccatttgggccaagattcctcacaccgacggacactttcacccttctccactgatgggaggttttggactcaaacacccgcctcctcaaatcatgatcaaaaacactcccgttccagccaatcctcccacaaactacagttctgccaagtttgcttctttcatcacacagtattccacgggccaggtcagcgtggagattgagtgggagctgcggaaggagaacagcaaacgctggaaccccgagatccagtatacttccaactacaacaaatctgttaatgtggactttactgtggacactaatggtgtgtattcagagcctcgccccattggcaccagatacctgactcgtaatctgtaa

SEQ ID NO: 193 - protein, 735 aa, Artificial Sequence
  source: /note="Description of Artificial Sequence: Synthetic polypeptide"
MAADGYLPDWLEDTLSEGIRQWWKLKPGPPPPKLAERHQDDSRGLVLPGYKYLGPFNGLDKGEPVNEADAAALEHDKAYDRQLDSGDNPYLKYNHADAEFQERLKEDTSFGGNLGRAVFQAKKRVLEPLGLVEEPVKTAPGKKRPVEHSPVEPDSSSGTGKAGHQPARKRLNFGQTGDADSVPDPQPLGQPPAAPTSLGSTTMATGSGAPMADNNEGADGVGNSSGNWHCDSQWLGDRVITTSTRTWALPTYNNHLYKQISSQSGASNDNHYFGYSTPWGYFDFNRFHCHFSPRDWQRLINNNWGFRPKRLNFKLFNIQVKEVTQNDGTTTIANNLTSTVQVFTDSEYQLPYVLGSAHQGCLPPFPADVFTVPQYGYLTLNNGSQAVGRSSFYCLEYFPSQMLRTGNNLTFSYTFEDVPFHSSYAHSQSLDRLMNPLIDQYLYYLNRTQSNSGTLQQSRLLFSQAGPTSMSLQAKNWLPGPCYRQQRLSKQANDNNNSNFPWTAATKYHLNGRDSLVNPGPAMASHKDDEEKFFPMHGTLIFGKQGTNANDADLEHVMITDEEEIRTTNPVATEQYGNVSNNLQNSNTGPTTENVNHQGALPGMVWQDRDVYLQGPIWAKIPHTDGHFHPSPLMGGFGLKHPPPQIMIKNTPVPANPPTNYSSAKFASFITQYSTGQVSVEIEWELRKENSKRWNPEIQYTSNYNKSVNVDFTVDTNGVYSEPRPIGTRYLTRNL

SEQ ID NO: 194 - DNA, 2208 bp, Artificial Sequence
  source: /note="Description of Artificial Sequence: Synthetic polynucleotide"
atggctgccgatggttatcttccagattggctcgaggacactctctctgaaggaataagacagtggtggaagctcaaacctggcccaccaccaccaaagcccgcagagcggcatcaggacgacagcaggggtcttgtgcttcctgggtacaagtacctcggacccttcaacggactcgacaaaggagagccggtcaacgaggcagacgccgcggccctcgagcacgacaaggcctacgaccggcagctcgacagcggagacaacccgtacctcaagtacaaccacgccgacgcggagtttcaggagcgtcttaaagaagatacgtcttttgggggcaacctcggacgagcagtcttccaggcgaaaaagagggttcttgaacctctgggcctggttgaggaacctgttaagacggctccgggaaaaaagaggccggtagagcactctcctgtggagccagactcctcctcgggaaccggaaaagcgggccatcagcctgcgagaaagagattgaattttggtcagactggagacgcagactccgtacctgacccccagcctctcggacagccaccagcagcccccacaagtttgggatctactacaatggctacaggcagtggcgcaccaatggcagacaataacgagggtgccgatggagtgggtaattcctcaggaaattggcattgcgattcccaatggctgggcgacagagtcatcaccaccagcacccgaacctgggccctgcccacctacaacaaccacctctacaagcaaatctccagccaatcaggagcctcgaacgacaaccactactttggctacagcaccccctgggggtattttgacttcaacagattccactgtcacttctccccacgtgattggcaaagactcatcaacaacaactggggattccgacccaagagactcaacttcaagctctttaacattcaagtcaaggaggtcacgcagaatgacggtacgacgacgattgccaataaccttaccagcacggttcaggtgtttactgactcggagtaccagctcccgtacgtcctcggctcggcgcatcaaggatgcctcccgccgtttccagcggacgtcttcatggtcccacagtatggatacctcaccctgaacaacgggagtcaggcggtaggacgctcttccttttactgcctggagtactttccttctcagatgctgcgtactggaaacaactttaccttcagctacacctttgaggacgttcctttccacagcagctacgctcacagccagagtttggaccggctgatgaatcctctgatcgaccagtatctatattatctgaacaggacacaatcaaatagtggaactcttcagcagtctaggctactgtttagccaagctggacccaccagcatgtctcttcaagctaaaaactggctgcctggaccttgctacagacagcagcgtctttcaaagcaggcaaacgacaacaacaacagcaactttccctggactgcggctacaaagtatcgtctaaatggccgggactcgttggttaatccaggaccagctatggccagccacaaagacgatgaagaaaagtttttccccatgcatggaaccctgatatttggtaaacaaggaacaaatgctaacgacgcggatttggagcatgttatgattacagatgaagaagaaatcaggaccaccaatcctgtggctacagagcagtacggaaacgtgtcaaataatttgcaaaactcaaatactggtccaactacagaaaatgtcaatcaccagggagcgttacctggtatggtgtggcaggatcgagacgtgtacctgcagggacccatttgggccaagattcctcacaccgacggacactttcacccttctccactgatgggaggttttggactcaaacacccgcctcctcaaatcatgatcaaaaacactcccgttccagccaatcctcccacaaacttcagttctgccaagtttgcttctttcatcacacagtattccacgggccaggtcagcgtggagattgagtgggagctgcagaaggagaacagcaaacgctggaaccccgagatccagtatacttccaactacaacaaatctgttaatgtggactttactgtggacactaatggtgtgtattcagagcctcgccccattggcaccagatacctgactcgtaatctgtaa

SEQ ID NO: 195 - protein, 735 aa, Artificial Sequence
  source: /note="Description of Artificial Sequence: Synthetic polypeptide"
MAADGYLPDWLEDTLSEGIRQWWKLKPGPPPPKPAERHQDDSRGLVLPGYKYLGPFNGLDKGEPVNEADAAALEHDKAYDRQLDSGDNPYLKYNHADAEFQERLKEDTSFGGNLGRAVFQAKKRVLEPLGLVEEPVKTAPGKKRPVEHSPVEPDSSSGTGKAGHQPARKRLNFGQTGDADSVPDPQPLGQPPAAPTSLGSTTMATGSGAPMADNNEGADGVGNSSGNWHCDSQWLGDRVITTSTRTWALPTYNNHLYKQISSQSGASNDNHYFGYSTPWGYFDFNRFHCHFSPRDWQRLINNNWGFRPKRLNFKLFNIQVKEVTQNDGTTTIANNLTSTVQVFTDSEYQLPYVLGSAHQGCLPPFPADVFMVPQYGYLTLNNGSQAVGRSSFYCLEYFPSQMLRTGNNFTFSYTFEDVPFHSSYAHSQSLDRLMNPLIDQYLYYLNRTQSNSGTLQQSRLLFSQAGPTSMSLQAKNWLPGPCYRQQRLSKQANDNNNSNFPWTAATKYRLNGRDSLVNPGPAMASHKDDEEKFFPMHGTLIFGKQGTNANDADLEHVMITDEEEIRTTNPVATEQYGNVSNNLQNSNTGPTTENVNHQGALPGMVWQDRDVYLQGPIWAKIPHTDGHFHPSPLMGGFGLKHPPPQIMIKNTPVPANPPTNFSSAKFASFITQYSTGQVSVEIEWELQKENSKRWNPEIQYTSNYNKSVNVDFTVDTNGVYSEPRPIGTRYLTRNL

SEQ ID NO: 196 - DNA, 2208 bp, Artificial Sequence
  source: /note="Description of Artificial Sequence: Synthetic polynucleotide"
atggctgccgatggttatcttccagattggctcgaggacactctctctgaaggaataagacagtggtggaagctcaaacctggcccaccaccaccaaagcccgcagagcggcatcaggacgacagcaggggtcttgtgcttcctgggtacaagtacctcggacccttcaacggactcgacaaaggagagccggtcaacgaggcagacgccgcggccctcgagcacgacaaggcctacgaccggcagctcgacagcggagacaacccgtacctcaagtacaaccacgccgacgcggagtttcaggagcgtcttaaagaagatacgtcttttgggggcaacctcggacgagcagtcttccaggcgaaaaagagggttcttgaacctctgggcctggttgaggaacctgttaagacggctccgggaaaaaagaggccggtagagcactctcctgtggagccagactcctcctcgggaaccggaaaagcgggccatcagcctgcgagaaagagattgaattttggtcagactggagacgcagactccgtacctgacccccagcctctcggacagccaccagcagcccccacaagtttgggatctactacaatggctacaggcagtggcgcaccaatggcagacaataacgagggtgccgatggagtgggtaattcctcaggaaattggcattgcgattcccaatggctgggcgacagagtcatcaccaccagcacccgaacctgggccctgcccacctacaacaaccacctctacaagcaaatctccagccaatcaggagcctcgaacgacaaccactactttggctacagcaccccctgggggtattttgacttcaacagattccactgtcacttctccccacgtgattggcaaagactcatcaacaacaactggggattccgacccaagagactcaacttcaagctctttaacattcaagtcaaagaggtcacgcagaatgacggtacgacgacgattgccaataaccttaccagcacggttcaggtgtttactgactcggagtaccagctcccgtacgtcctcggctcggcgcatcaaggatgcctcccgccgtttccagcggacgtcttcatggtcccacagtatggatacctcaccctgaacaacgggagtcaggcggtaggacgcccttccttttactgcctggagtactttccttctcagatgctgcgtactggaaacaactttaccttcagctacacctttgaggacgttcctttccacagcagctacgctcacagccagagtttggaccggctgatgaatcctctgatcgaccagtatctatattatctgaacaggacacaatcaaatagtggaactcttcagcagtctaggctactgtttagccaagctggacccaccagcatgtctcttcaagctaaaaactggctgcctggaccttgctacagacagcagcgtctttcaaagcaggcaaacgacaacaacaacagcaactttccctggactgcggctacaaagtatcatctaaatggccgggactcgttggttaatccaggaccagctatggccagccacaaagacgatgaagaaaagtttttccccatgcatgggaccctgatatttggtaaacaaggaacaaatgctaacgacgcggatttggagcatgttatgattacagatgaagaagaaatcaggaccaccaatcctgtggctacagagcagtacggaaacgtgtcaaataatttgcaaaactcaaatactggtccaactacagaaaatgtcaatcaccagggagcgttacctggtatggtgtggcaggatcgagacgtgtacctgcagggacccatttgggccaagattcctcacaccgacggacactttcacccttctccactgatgggaggttttggactcaaacacccgcctcctcaaatcatgatcaaaaacactcccgttccagccaatcctcccacaaacttcagttctgccaagtttgcttctttcatcacacagtattccacgggccaggtcagcgtggagattgagtgggagctgcagaaggagaacagcaaacgctggaaccccgagatccagtatacttccaactacaacaaatctgttaatgtggactttactgtggacactaatggtgtgtattcagagcctcgccccattggcaccagatacctgactcgtaatctgtaa

SEQ ID NO: 197 - protein, 735 aa, Artificial Sequence
  source: /note="Description of Artificial Sequence: Synthetic polypeptide"
MAADGYLPDWLEDTLSEGIRQWWKLKPGPPPPKPAERHQDDSRGLVLPGYKYLGPFNGLDKGEPVNEADAAALEHDKAYDRQLDSGDNPYLKYNHADAEFQERLKEDTSFGGNLGRAVFQAKKRVLEPLGLVEEPVKTAPGKKRPVEHSPVEPDSSSGTGKAGHQPARKRLNFGQTGDADSVPDPQPLGQPPAAPTSLGSTTMATGSGAPMADNNEGADGVGNSSGNWHCDSQWLGDRVITTSTRTWALPTYNNHLYKQISSQSGASNDNHYFGYSTPWGYFDFNRFHCHFSPRDWQRLINNNWGFRPKRLNFKLFNIQVKEVTQNDGTTTIANNLTSTVQVFTDSEYQLPYVLGSAHQGCLPPFPADVFMVPQYGYLTLNNGSQAVGRPSFYCLEYFPSQMLRTGNNFTFSYTFEDVPFHSSYAHSQSLDRLMNPLIDQYLYYLNRTQSNSGTLQQSRLLFSQAGPTSMSLQAKNWLPGPCYRQQRLSKQANDNNNSNFPWTAATKYHLNGRDSLVNPGPAMASHKDDEEKFFPMHGTLIFGKQGTNANDADLEHVMITDEEEIRTTNPVATEQYGNVSNNLQNSNTGPTTENVNHQGALPGMVWQDRDVYLQGPIWAKIPHTDGHFHPSPLMGGFGLKHPPPQIMIKNTPVPANPPTNFSSAKFASFITQYSTGQVSVEIEWELQKENSKRWNPEIQYTSNYNKSVNVDFTVDTNGVYSEPRPIGTRYLTRNL

SEQ ID NO: 198 - DNA, 2208 bp, Artificial Sequence
  source: /note="Description of Artificial Sequence: Synthetic polynucleotide"
atggctgccgatggttatcttccagattggctcgaggacactctctctgaaggaataagacagtggtggaagctcaaacctggcccaccaccaccaaagcccgcagagcggcataaggacgacagcaggggtcttgtgcttcctgggtacaagtacctcggacccttcaacggactcgacaagggagagccggtcaacgaggcagacgccgcggccctcgagcacgacaaggcctacgaccggcagctcgacagcggagacaacccgtacctcaagtacaaccacgccgacgcggagtttcaggagcgccttaaagaagatacgtcttttgggggcaacctcggacgagcagtcttccaggcaaaaaagagggttcttgaacctctgggcctggttgaggagcctgttaaaacggctccgggaaaaaagaggccggtagagcactctcctgcggagccagactcctcctcgggaaccggaaaagcgggccagcagcctgcaagaaaaagattgaatttcggtcagactggagacgcagactccgtacctgacccccagcctctcggacagccaccagcagccccctctggtctgggaactaatacgatggcttcaggcagtggcgcaccaatggcagacaataacgagggcgccgacggagtgggtaattcctcgggaaattggcattgcgattccacatggatgggcgacagagtcatcaccaccagcacccgaacttgggccctgcccacctacaacaaccatctctacaagcaaatctccagccaatcaggagccagcaacgacaaccactactttggctacagcaccccttgggggtattttgacttcaacagattccactgccacttttcaccacgtgactggcaaagactcatcaacaacaactggggattccggcccaagagactcaacttcaagctctttaacattcaagtcaaagaggtcacgcagaatgacggtacgacgacgattgccaataaccttaccagcacggttcaggtgtttactgactcggagtaccagctcccgtacgtcctcggctcggcgcatcaaggatgcctcccgccgttcccagcagacgtcttcatggtgccacagtatggatacctcaccctgaacaacgggagtcaggcagtaggacgctcttcattttactgcctggagtactttccttctcagatgctgcgtaccggaaacaactttaccttcagctacacctttgaggacgttcctttccacagcagctacgctcacagccagagtttggaccgtctcatgaatcctctcatcgaccagtacctgtattacttgagcagaacaaacactccaagcggaaccaccacgcagtccaggcttcagttttctcaggccggagcaagtgacattcgggaccagtctaggaactggcttcctggaccctgttaccgccagcagcgagtatcaaagacatctgcggataacaacaacagtgaatactcgtggactggagctaccaagtaccacctcaatggcagagactctctggtgaatccgggcccggccatggccagccacaaggacgatgaagaaaagttttttcctcagagcggggttctcatctttgggaagcaaggctcagagaaaacaaatgtggacattgaaaaggtcatgattacagacgaagaggaaatcaggaccaccaatcccgtggctacggagcagtatggttctgtatctaccaacctgcagggcggcaacacacaagcagctaccgcagatgtcaacacacaaggcgttcttccaggcatggtctggcaggacagagacgtgtacctgcaggggcccatctgggcaaagattccacacacggacggacattttcacccctctcccctcatgggcggattcggacttaaacaccctcctccacagattctcatcaagaacaccccggtacctgcgaatccttcgaccaccttcagtgcggcaaagtttgcttctttcatcacacagtattccacggggcaggtcagcgtggagatcgagtgggagctgcagaaggagaacagcaaacgctggaatcccgagatccagtacacttccaactacaacaaatctgttaatgtggactttactgttgacactaatggcgtgtattcagagcctcgccccattggcaccagatacctgactcgtaatctgtaa

SEQ ID NO: 199 - protein, 735 aa, Artificial Sequence
  source: /note="Description of Artificial Sequence: Synthetic polypeptide"
MAADGYLPDWLEDTLSEGIRQWWKLKPGPPPPKPAERHKDDSRGLVLPGYKYLGPFNGLDKGEPVNEADAAALEHDKAYDRQLDSGDNPYLKYNHADAEFQERLKEDTSFGGNLGRAVFQAKKRVLEPLGLVEEPVKTAPGKKRPVEHSPAEPDSSSGTGKAGQQPARKRLNFGQTGDADSVPDPQPLGQPPAAPSGLGTNTMASGSGAPMADNNEGADGVGNSSGNWHCDSTWMGDRVITTSTRTWALPTYNNHLYKQISSQSGASNDNHYFGYSTPWGYFDFNRFHCHFSPRDWQRLINNNWGFRPKRLNFKLFNIQVKEVTQNDGTTTIANNLTSTVQVFTDSEYQLPYVLGSAHQGCLPPFPADVFMVPQYGYLTLNNGSQAVGRSSFYCLEYFPSQMLRTGNNFTFSYTFEDVPFHSSYAHSQSLDRLMNPLIDQYLYYLSRTNTPSGTTTQSRLQFSQAGASDIRDQSRNWLPGPCYRQQRVSKTSADNNNSEYSWTGATKYHLNGRDSLVNPGPAMASHKDDEEKFFPQSGVLIFGKQGSEKTNVDIEKVMITDEEEIRTTNPVATEQYGSVSTNLQGGNTQAATADVNTQGVLPGMVWQDRDVYLQGPIWAKIPHTDGHFHPSPLMGGFGLKHPPPQILIKNTPVPANPSTTFSAAKFASFITQYSTGQVSVEIEWELQKENSKRWNPEIQYTSNYNKSVNVDFTVDTNGVYSEPRPIGTRYLTRNL

SEQ ID NO: 200 - DNA, 3161 bp, Artificial Sequence
  source: /note="Description of Artificial Sequence: Synthetic polynucleotide"
gattgaatttagcggccgcgaattcgcccttgctgcgtcaactggaccaatgagaactttccattcaatgattgcgtcgacaagatggtgatctggtgggaggagggaaagatgaccgccaaggtcatggagtcggccaaagccattctcggaggaagcaaggtgcgcgtggaccagaaatgtaagtcctcggcccagatagacccgactcccgtgattgtcacctccaacaccaacatgtgcgccgtgattgacgggaactcaacgaccttcgagcaccagcagccgttgcaagaccggatgttcaaatttgaactcacccgccgtctggatcatgactttgggaaggtcaccaagcaggaagtcaaagactttttccggtgggcaaaggatcacgtggttgaggtggagcatgaattctacgtcaaaaagggtggagccaagaaaagacccgcccccagtgacgcagatataagtgagcccaaacgggcgcgcgggtcagttgcgcagccatcgacgtcagacgcggaagcttcgatcaactacgcggacaggtaccaaaacaaatgttctcgtcacgtgggcatgaatctgatgctgtttccctgcagacaatgcgagagaatgaatcaaaattcaaatatctgcttcactcacggacagaaggactgtttagagtgctttcccgtgtcagaatctcaacccgtttctgtcgtcaaaaaggcgtatcagaaactttgctacattcatcatatcatgggaaaggtgccagacgcttgcactgcctgcgatctggtcaatgtggatttggatgactgcatctctgaacaataaatgatttaaatcaggtatggctgccgatggttatcttccagattggctcaaggacactctctctgaaggaataagacagtggtggaagctcaaacctggcccaccaccaccaaagcccgcagagcggcataaggacgacagcgggggtcttgtgcttcctgggtacaagtacctcggacccttcaacggactcgacaagggagagccggtcaacgaggcagacgccgcggccctcgagtacgacaaggcctacgaccggcagctcgacagcggagacaacccgtacctcaagtacaaccacgccgacgcggagtttcaggagcgccttaaagaagatacgtcttttgggggcaacctcggacgagcagtcttccaggcgaaaaagagggttcttgaacctctgggcctggttgaggaacctgttaagacggctccgggaaaaaagaggccggtagagcactctcctgtggagccagactcctcctcgggaacaggaaaagcgggccagcagcctgcgagaaagagattgaattttggtcagactggagacgcagactccgtacctgacccccagcctctcggacagccaccagcagccccctctggtctgggaactaatacgatggctacaggcagtggcgcaccaatggcagacaataacgagggcgccgacggagtgggtaattcctcgggaagttggcattgcgattccacatggatgggcgacagagtcatcaccaccagcacccgaacctgggctctgcccacctacaacaaccatctgtacaagcagatctccagccaatcaggagccagcaacgacaaccactactttggctacagcaccccttgggggtattttgacttcaacagattccactgccacttttcaccacgtgactggcaaagactcatcaacaacaactggggattccggcccaagagactcaacttcaagctctttaacattcaagtcaaggaggtcacgcagaatgacggtacgacgacgattgccaataaccttaccagcacggttcaggtgtttactgactcggagtaccagctcccgtacgtccccggctcggcgcatcaaggatgcctcccgccgttcccagcagacgtcttcatggtgccacagtatggatacctcaccctgaacaacgggagtcaggcagtaggacgctcttcattttactgcctggagtactttccttctcagatgcttcgtaccggaaacaactttaccttcagctacacctttgaggatgttcctttccacagcagctacgctcacagccagagtttggaccgtctcatgaatcctctcatcgaccagtacctgtattacttgagcagaacaaacactccaagcggaaccaccacgcagtccaggcttcagttttctcaggccggagcaagtgacattcgggaccagtctaggaactggcttcctggaccctgttaccgccagcagcgagtatcaaagacagctgcggacaacaacaacagtgaatactcgtggactggagctaccaagtaccacctcaatggcagagactctctggtgaatccgggcccggccatggccagccacaaggacgatgaagaaaagttttttcctcaaagcggggttctcatctttgggaagcaaggctcagagaaaacaaatgtggacattgaaaaggtcatgattacagacgaagaggaaatcagaaccaccaatcccgtggccacggagcagtatggttctgtatctaccaacctccagagcggcaacacacaagcagctactgcagatgtcaacacacaaggcgttcttccaggcatggtctggcaggacagagacgtgcacctgcaggggcctatctgggcaaagattccacacacggacggacattttcacccctctcccctcatgggcggatttggacttaaacaccctcctccacagattctcatcaagaacaccccggtacctgcaaatccttcgaccaccttcagtgcggcaaagtttgcttccttcatcacacagtattccacagggcaggtcagcgtggagatcgagtgggagctgcagaaggagaacagcaaacgctggaaccccgagatccagtacacttccaactacaacaaatctgttaatgtggactttactgtggacactaatggtgtgtattcagagcctcgccccattggcaccagatacctgactcgtaatctgtaattgcttgttaatcaataaaccgtttaattcgtttcagttgaactttggtctctgcgaagggcgaattcgtttaaaccctgcaggactagtccctttagtgagg

SEQ ID NO: 201 - DNA, 3162 bp, Artificial Sequence
  source: /note="Description of Artificial Sequence: Synthetic polynucleotide"
gaattgaatttagcggccgcgaattcgcccttcgcagagaccaaagttcaactgaaacgaattaaacggtttattgattaacaagcaattacagattacgagtcaggtatctggtgccaatggggcgaggctctgaatacacgccattagtgtccacagtaaagtccacattaacagacttgttgtagttggaagtgtactgaatttcgggattccagcgtttgctgttttccttctgcagctcccactcgatctccacgctgacctgtcccgtggagtactgtgtgatgaaggaagcaaactttgccgcactgaaggtggtcgaaggattcgcaggtaccggggtgttcttgatgagaatctgtggaggagggtgtttaagtccgaatccacccatgaggggagaggggtgaaaatgtccgtccgtgtgtggaatctttgcccagatgggcccctgaaggtacacatctctgtcctgccagaccatgcctggaagaacgccttgtgtgttgacatctgcggtagctgcttgtctgttgcctctctggaggttggtagatacagaaccgtactgctccgtagccacgggattggttgtcctgatttcctcttcgtctgtaatcatgaccttttcaatgtccacatttgttttctctgagccttgcttcccaaagatgagaaccccgctctgaggaaaaaacttttcttcattgtccttgtggcttgccatggccgggcccggattcaccagagagtctctgccattgaggtggtacttggtagctccagtccacgagtattcactgttgttgttatccgcagatgtctttgatactcgctgctggcggtaacagggtccaggaagccagttcctagactggtcccgaatgtcactcgctccggcctgagaaaactgaagccttgactgcgtggtggttccacttggagtgtttgttgtgctcaagtaatacaggtactggtcgatgagaggattcatgagacggtccagactctggctgtgagcgtagccgctgtggaaaggaacgtcctcaaaagtgtagctgaaggtaaagttgtttccggtacgcagcatctgagaaggaaagtactccaggcagtaaaatgaagagcgtcctactgcctgactcccgttgttcagggtgaggtatccatactgtggcaccatgaagacgtctgctgggaacggcgggaggcatccttgatgcgccgagccgaggacgtacgggagctggtactccgagtcagtaaacacctgaaccgtgctggtaaggttattggcaatcgtcgtcgtaccgtcattctgcgtgacctctttgacttgaatgttaaagagcttgaagttgagtctcttgggtcggaatccccagttgttgttgatgagtctttgccagtcacgtggtgaaaagtggcagtggaatctgttgaagtcaaaatacccccaaggggtgctgtagccaaagtagtgattgtcgttcgaggctcctgattggctggaaatttgtttgtagaggtggttgttgtaggtgggcagggcccaggttcgggtgctggtggtgatgactctgtcgcccatccatgtggaatcgcaatgccaatttcccgaggaattacccactccgtcggcgccctcgttattgtctgccattggtgcgccactgcctgtagccatcgtattagttcccagaccagagggggctgctggtggctgtccgagaggctgggggtcaggtactgagtctgcgtctccagtctgaccaaaattcaatctttttcttgcaggctgctggcccgcctttccggttcccgaggaggagtctggctccacaggagagtgctctaccggcctcttttttcctggagccgtcttgacaggttccccaaccaggcccagaggttcaagaaccctctttttcgcctggaagactgctcgtccgaggttgcccccaaaagacgtatcttctttaaggcgctcctgaaactccgcgtcggcgtggttgtacttgaggtacgggttgtctccgctgtcgagctgccggtcgtaggctttgtcgtgctcgagggccgcggcgtctgcctcgttgaccggctctcccttgtcgagtccgttgaagggtccgaggtacttgtacccaggaagcacaagacccctgctgtcgtccttatgccgctctgcgggctttggtggtggtgggccaggtttgagcttccaccactgtcttattccttcagagagagtgtcctcgagccaatctggaagataaccatcggcagccatacctgatttaaatcatttattgttcaaagatgcagtcatccaaatccacattgaccagatcgcaggcagtgcaagcgtctggcacctttcccatgatatgatgaatgtagcacagtttctgatacgcctttttgacgacagaaacgggttgagattctgacacgggaaagcactctaaacagtctttctgtccgtgagtgaagcagatatttgaattctgattcattctctcgcattgtctgcagggaaacagcatcagattcatgcccacgtgacgagaacatttgttttggtacctgtctgcgtagttgatcgaagcttccgcgtctgacgtcgatggctgcgcaactgactcgcgcacccgtttgggctcacttatatctgcgtcactgggggcgggtcttttcttggctccaccctttttgacgtagaattcatgctccacctcaaccacgtgatcctttgcccaccggaaaaagtctttgacttcctgcttggtgaccttcccaaagtcatgatccagacggcgggtgagttcaaatttgaacatccggtcttgcaacggctgctggtgttcgaaggtcgttgagttcccgtcaatcacggcgcacatgttggtgttggaggtgacgatcacgggagtcgggtctatctgggccgaggacttgcatttctggtccacgcgcaccttgcttcctccgagaatggctttggccgactccacgaccttggcggtcatcttcccctcctcccaccagatcaccatcttgtcgacacagtcgttgaagggaaagttctcattggtccagttgacgcagcaagggcgaattcgtttaaacctgcaggactagtccctttagtgaggg

SEQ ID NO: 202 - DNA, 3164 bp, Artificial Sequence
  source: /note="Description of Artificial Sequence: Synthetic polynucleotide"
gcgaattgaatttagcggccgcgaattcgcccttcgcagagaccaaagttcaactgaaacgaattaaacggtttattgattaacaagcaattacaaattacgagtcaggtatctggtgccaatggggcgaggctctgaatacacgccattagtgtccacagtaaagtccacattaacagacttgttgtagttggaagtgtactgaatttcgggattccagcgtttgctgttttccttctgcagctcccactcgatctccacgctgacctgtcccgtggagtactgtgtgatgaaggaagcaaactttgccgcactgaaggtggtcgaaggattcgcaggtaccggggtgttcttgatgagaatctgtggaggagggtgtttaggtccgaatccacccatgaggggagaggggtgaaaatgtccgtccgtgtgtggaatctttgcccagatgggcccctgaaggtacacatctctgtcctgccagaccatgcctggaagaacgccttgtgtgttgacatctgcggtagctgcttgtctgttgcctctctggaggttggtagatacagaaccatactgctccgtagccacgggattggttgtcctgatttcctcttcgtctgtaatcatgaccttttcaatgtccacatttgttttctctgagccttgcttcccaaagatgagaaccccgctctgaggaaaaaacttttcttcattgtccttgtggcttgccatggccgggcccggattcaccagagagtctctgccattgaggtggtacttggtagctccagtccacgagtattcactgttgttgttatccgcagatgtctttgatactcgctgctggcggtaacagggtccaggaagccagttcctagactggtcccgaatgtcactcgctccggcctgagaaaactgaagccttgactgcgtggtggttccacttggagtgtttgttgtgctcaagtaatacaggtactggtcgatgagaggattcatgagacggtccagactctggctgtgagcgtagctgctgtggaaaggaacgtcctcaaaagtgtagctgaaggtaaagttgtttccggtacgcagcatctgagaaggaaagtactccgggcagtaaaatgaagagcgtcctactgcctgactcccgttgctcagggtgaggtatccatactgtggcaccatgaagacgtctgctgggaacggcgggaggcatccttgatgcgccgagccgaggacgtacgggagctggtactccgagtcagtaaacacctgaaccgtgctggtaaggttattggcaatcgtcgtcgtaccgtcattctgcgtgacctctttgacttgaatgttaaagagcttgaagttgagtctcttgggtcggaatccccagttgttgttgatgagtctttgccagtcacgtggtgaaaagtggcagtggaatctgttgaagtcaaaatacccccaaggggtgctgtagccaaagtagtgattgtcgttcgaggctcctgattggctggaaatttgtctgtagaggtggttgttgtaggtgggcagggcccaggttcgggtgctggtggtgatgactctgtcgcccatccatgtggaatcgcaatgccgatttcccgaggaattacccactccgtcggcgccctcgttattgtctgccattggtgcgccactgcctgtagccatcgtattagttcccagaccagagggggctgctggtggctgtccgagaggctgggggtcaggtactgagtctgcgtctccagtctgaccaaaattcaatctttttcttgcaggctgctggcccgcctttccggttcccgaggaggagtctggctccacaggagagtgctctaccggcctcttttttcccggagccgtcttaacaggttccccaaccaggcccagaggttcaagaaccctctttttcgcctggaagactgctcgtccgaggttgcccccaaaagacgtatcttctttaaggcgctcctgaaactccgcgtcggcgtggttgtacttgaggtacgggttgtctccgctgtcgagctgccggtcgtaggctttgtcgtgctcgagggccgcggcgtctgcctcgttgaccggctctcccttgtcgagtccgttgaagggtccgaggtacttgtacccaggaagcacaagacccctgctgtcgtccttatgccgctctgcgggctttggtggtggtgggccaggtttgagcttccaccactgtcttattccttcagagagagtgtcctcgagccaatctggaagataaccatcggcagccatacctgatttaaatcatttattgttcaaagatgcagtcatccaaatccacattgaccagatcgcaggcagtgcaagcgtctggcacctttcccatgatatgatgaatgtagcacagtttctgatacgcctttttgacgacagaaacgggttgagattctgacacgggaaagcactctaaacagtctttctgtccgtgagtgaagcagatatttgaattctgattcattctctcgcattgtctgcagggaaacagcatcagattcatgcccacgtgacgagaacatttgttttggtacctgtctgcgtagttgatcgaagcttccgcgtctgacgtcgatggctgcgcaactgactcgcgcacccgtttgggcccacttatatctgcgtcactgggggcgggtcttttcttggctccaccctttttgacgtagaattcatgctccacctcaaccacgtgatcctttgcccaccggaaaaagtctttgacttcctgcttggtgaccttcccaaagtcatgatccagacggcgggtgagttcaaatttgaacatccggtcttgcaacggctgctggtgttcgaaggtcgttgagttcccgtcaatcacggcgcacatgttggtgttggaggtgacgatcacgggagtcgggtctatctgggccgaggacttgcatttctggtccacgcgcaccttgcttcctccgagaatggctttggccgactccacgaccttggcggtcatcttcccctcctcccaccagatcaccatcttgtcgacacagtcgttgaagggaaagttctcattggtccagttgacgcagcaagggcgaattcgtttaaacctgcaggactagtccctttagtgaggg

SEQ ID NO: 203 - DNA, 3163 bp, Artificial Sequence
  source: /note="Description of Artificial Sequence: Synthetic polynucleotide"
accctcactaaagggactagtcctgcaggtttaaacgaattcgcccttgctgcgtcaactggagcaatgagaactttcccttcaacgactgtgtcgacaagatggtgatttggtgggaggaggggaagatgaccgccaaggtcgtggagtcggccaaagccattctcggaggaagcaaggtgcgcgtggaccagaaatgcaagtcctcggcccagatagatccgactcccgtgatcgtcacctccaacaccaacatgtgcgccgtgattgacgggaactcaacgaccttcgaacaccagcagccgttgcaagaccggatgttcaaatttgaactcacccgccgtctggatcatgactttgggaaggtcaccaagcaggaagtcaaagactttttccggtgggcaaaggatcacgtggttgaggtggagcatggattctacgtcaaaaagggtggagccaagaaaagacccgcccctagtgacgcagatataagtgagcccaaacgggtgcgcgagtcagttgcgcagccatcgacgtcggacgcggaagcttcgatcaactacgcggacaggtaccaaaacaaatgttctcgtcacgtgggcatgaatctgatgctgtttccctgcagacaatgcgagagaatgaatcaaaattcaaatatctgcttcactcacggacagaaagactgtttagagtgctttcccgtgtcagaatctcaacctgtttctgtcgtcaaaaaggcgtatcagaaactgcgctacattcatcatatcatgggaaaggtgccagacgcttgcactgcctgcgatctggtcaatgtggatttggatgactgcatctctgaacaataaatgatttaaatcaggtatggctgccgatggttatcttccagattggctcgaggacactctctctgaaggaataagacagtggtggaagctcaaacctggcccaccaccaccaaagcccgcagagcggcataaggacgacagcaggggtcttgtgcttcctgggtacaagtacctcggacccttcaacggactcgacaagggagagccggtcaacgaggcagacgccgcggccctcgagcacgacaaggcctacgaccggcagctcgacagcggagacaacccgtacctcaagtacaaccacgccgacgcggagtttcaggagcgtcttaaagaagatacgtcttttgggggcaacctcggacgagcagtcttccaggcgaaaaagagggttcttgaacctctgggcctggttgaggaacctgttaagacggctccgggaaaaaagaggccggtagagcactctcctgcggagccagactcctcctcgggaaccggaaaagcgggccagcagcctgcaagaaaaagactgaatttcggtcagactggagacgcagactccgtacctgacccccagcctctcggacagccaccagcagcccccacaagtttgggatctactacaatggctacaggcagtggcgcaccaatggcagacaataacgagggtgccgatggagtgggtaattcctcaggaaattggcattgcgattcccaatggctgggcgacagagtcatcaccaccagcacccgaacctgggccctgcccacctacaacaaccacctttacaagcaaatctccagccaatcaggagcctcaaacgacaaccactactttggctacagcaccccctgggggtattttgacttcaacagattccactgccacttttcaccacgtgactggcaaagactcatcaacaacaactggggattccgacccaagagactcaacttcaagctctttaacattcaagtcaaagaggtcacgcagaatgacggtacgacgacgattgccaataaccttaccagcacggttcaggtgtttactgactcggagtaccagctcccgtacgtcctcggctcggcgcatcaaggatgcctcccgccgtttccagcggacgtcttcatggtcccacagtatggatacctcaccctgaacaacgggagtcaggcggtaggacgctcttccttttactgcctggagtgctttccttctcagatgctgcgtactggaaacaactttcagttcagctacacttttgaagacgtgcctttccacagcagctacgctcacagccagagtttggatcggctgatgaatcctctgatcgaccagtacctgtattatctaaacagaacacaaacagctagtggaactcagcagtctcggctactgtttagccaagctggacccacaagcatgtctcttcaagctaaaaactggctgcctggaccgtgttatcgccagcagcgtttgtcaaagcaggcaaacgacaacaacaacagcaactttccctggactggagctaccaagtaccacctcaatggcagagactctttggtgaacccgggcccggccatggccagccacaaggacgatgaagaaaagtttttccccatgcatggaaccctaatatttggtaaagaaggaacaaatgctaccaacgcggaattggaaaatgtcatgattacagatgaagaggaaatcaggaccaccaatcccgtggctacagagcagtacggatatgtgtcaaataatttgcaaaactcaaatactgctgcaagtactgaaactgtgaatcaccaaggagcattacctggtatggtgtggcaggatcgagacgtgtacctgcagggacccatttgggccaagattcctcacaccgatggacactttcatccttctccactgatgggaggttttggactcaaacacccgcctcctcagattatgatcaaaaacactcccgttccagccaatcctcccacaaacttcagttctgccaagtttgcttccttcatcacacagtattccacgggacaggtcagcgtggagatcgagtgggagctgcagaaggagaacagcaaacgctggaatcccgaaattcagtacacttccaactacaacaaatctgttaatgtggactttactgtggacactaatggtgtgtattcagagcctcgccccattggcaccagatacctgactcgtaatctgtaattgcttgttaatcaataaaccgtttaattcgtttcagttgaactttggtctctgcgaagggcgaattcgcggccgctaaattcaattcgcc

SEQ ID NO: 204 - protein, 735 aa, Artificial Sequence
  source: /note="Description of Artificial Sequence: Synthetic polypeptide"
MAADGYLPDWLEDTLSEGIRQWWKLKPGPPPPKPAERHKDDSRGLVLPGYKYLGPFNGLYKGEPVDEADAAALEHDKAYDRQLDSGDNPYLKYNHADAEFQERLKEDTSFGGNLGRAVFQAKKRVLEPLGLVGEPVKTAPGKKRPVEHSPVEPDSSSGTGKAGNQPARKRLNFGQTGDADSVPDPQPLGQPPAAPSGLGSTTMATGSGAPVADNNEGADGVGNSSGNWHCDSQWLGDRVITTSTRTWALPTYNNHLYKQISSQSGASNDNHYFGYSTPWGYFDFNRFHCHFSPRDRQRLINNNWGFRPKRLNFKLFNIQVKEVTQNDGTTTIANNLTSTVQVFTDSGYQLPYVLGLAHQGCLPPFPADVFMVPQYGYLTLNNGSQAVGRSSFYCLEYFPSQMLRTGNNFQFSYTFEDVPFHSSYAHSQSLDRLMNPLIDQYLYYLNKTQSNSGTLQQSRLLFSQAGPTSMSLQAKNWLPGPCYRQQRLSKQANDNNNSNFPWTAATKYHLNGRDSLVNPGPAMASHKDDEEKFFPMHGTLIFGKQGTNANDADLDNVMITDEEEIRTTNPVATEQYGYVSNNLQNSNTGPTTGTVNHQGALPGMVWQDRDVYLQGPIWAKIPHTDGHFHPSPLMGGFGLKHPPPQIMIKNTPVPANPPTNFSSAKFASFITQYSTGQVSVEIEWELQKEDSKRWNPEIQYTSNYNKPVNVDFTVDTNGVYSEPRPIGTRYLTRNL

SEQ ID NO: 205 - DNA, 2208 bp, Artificial Sequence
  source: /note="Description of Artificial Sequence: Synthetic polynucleotide"
atggctgccgatggttatcttccagattggctcgaggacactctctctgaaggaataagacagtggtggaagctcaaacctggcccaccaccaccaaagcccgcagagcggcataaggacgacagcaggggtcttgtgcttcctgggtacaagtacctcggacccttcaacggactctacaagggagagccggtcgacgaggcagacgccgcggccctcgagcacgacaaggcctacgaccggcagctcgacagcggagacaacccgtacctcaagtacaaccacgccgacgcggagtttcaggagcgccttaaagaagatacgtcttttgggggcaacctcggacgagcagtcttccaggccaaaaagagggttcttgaacctctgggcttggttggggagcctgttaaaacggctccgggaaaaaagaggccggtagagcactctcctgtggagccagactcctcctcgggaaccggaaaagcgggcaaccagcctgcaagaaaaagattgaattttggtcagactggagacgcagactccgtacctgacccccagcctctcggacagccaccagcagccccctctggtctgggatctactacaatggctacaggcagtggcgcaccagtggcagacaataacgagggtgccgatggagtgggtaattcctcaggaaattggcattgcgattcccaatggctgggcgacagagtcatcaccaccagcacccgaacctgggctctgcccacctacaataaccacctctacaagcaaatctccagccaatcaggagcctcaaacgacaaccactactttggctacagcaccccctgggggtattttgacttcaacagattccactgccacttttcaccacgtgaccggcaaagactcatcaacaacaactggggattccgaccaaaaagactcaacttcaagctctttaacattcaagtcaaagaggtcacgcagaatgacggtacgacgacgattgccaataaccttaccagcacggttcaggtgtttactgactcggggtaccagctcccgtacgtcctcggcttggcgcatcaaggatgcctcccgccgttcccagcagacgtcttcatggtgccacagtatggatacctcaccctgaacaacgggagtcaggcggtaggacgctcttccttttactgcctggagtactttccttctcagatgctgcgtactggaaacaactttcagttcagctacacctttgaagacgttcctttccacagcagctacgctcacagccagagtctggatcggctgatgaatcctctgatcgaccagtacctgtattatctgaacaagacacaatcaaatagtggaactcttcagcagtctcggctactgtttagccaagctggacccaccagcatgtctcttcaagctaaaaactggctgcctggaccttgctacagacagcagcgtctgtcaaagcaggcaaacgacaacaacaacagcaactttccctggactgcggctacaaagtatcatctaaatggccgggactcgttggttaatccaggaccagctatggccagccacaaagacgatgaagaaaagtttttccccatgcatggaaccctgatatttggtaaacaaggaacaaatgctaacgacgcggatttggacaatgtcatgattacagatgaagaagaaatccgcaccaccaatcccgtggctacggagcagtacggatatgtgtcaaataatttgcaaaactcaaatactggtccaactactggaactgtcaatcaccaaggagcgttacctggtatggtgtggcaggatcgagacgtgtacctgcagggacccatttgggccaagattcctcacaccgatggacactttcatccttctccacttatgggaggttttggactcaaacacccacctcctcagatcatgattaaaaacactcccgttccagccaatcctcccacaaacttcagttctgccaagtttgcttctttcatcacacagtattccacgggacaagtcagcgtggagatcgagtgggagctgcagaaggaggacagcaaacgctggaaccccgagatccagtacacttccaactataacaaacctgttaatgtggactttactgtggacactaatggtgtgtattcagagcctcgccccattggcaccagatacctgactcgtaatctgtaa

SEQ ID NO: 206 - DNA, 3161 bp, Artificial Sequence
  source: /note="Description of Artificial Sequence: Synthetic polynucleotide"
cgaattgatttagcggccgcgaattcgcccttcgcagagaccaaagttcaactgaaacgaattaaacggtttattgattaacaagcaattacagattacgagtcaggtatctggtgccaatggggcgaggctctgaatacacaccattagtgtccacagtaaagtccacattaacagatttgttgtagttggaagtgtactggatctcgggattccagcgtttgctgttctccttctgtagctcccactcgatctccacgctgacccgccccgtggaatactgtgtgatgaaggaagcaaactttgccgcactgaaggtggtcgaaggattcgcaggtaccggggtgtttttgatgagaatctgtggaggagggtgtttaagtccgaatccgcccatgaggggagaggggtgaaaatgtccgtccgtgtgcggaatctttgcccagataggcccctgcaggtacacgtctctgtcctgccagaccatgcctggaagaacgccttgtgtgttgacatctgcagtagatgcttgtgtgttgccgctctggaggttggtagatacagaaccatactgctccgtggccacgggattggtggttctgatttcctcttcgtctgtaatcatgaccttttcaatgtccacatttgttttctctgatccttgttttccaaagatgagaaccccgctctgaggaaaaaacttttcttcatcgtccttgtggctggccattgccgggcccggattcaccagagagtctctgccattgaggtggtacttggtagctccaatccacgagtattcactgttgttgttgtccgcagatgtctttgatactcgctgctggcggtaacagggtccaggaagccagttcctagactgatcccgaatgtcactcgctccggcctgagaaaactgaagcctggactgcgtggtggttccgcttggagtgtttgttctgctcaagtaatacaggtactggtcgatgagaggattcatgagacggtccaaactctggctgtgagcgtagctgctgtggaaaggaacatcctcaaaggtgtagctgaaggtaaagttgtttccggtacgcagcatctgagaagggaagtactccaggcagtaaaatgaagagcgtcctactgcctgactcccgttgttcagggtgaggtatccatactgtggcaccatgaagacgtctgctgggaacggcgggaggcatccttgatgcgccgagccgaggacgtacgggagctggtactccgagtcagtaaacacctgaaccgtgctggtaaggttattggcaatcgtcgtcgtaccatcattctgcgtgacctctctgacttgaatgttaaagagcttgaagttgagtctcttgggccggaatccccagttgttgttgatgagtctttgccagtcacgtggtgaaaagtggcagtggaatctgttgaagtcaaaatacccccaaggggtgctgtagccaaagtagtggttgtcgttgctggctcctgattggctggaaatctgcttgtacagatggttgttgtaggtgggcagagcccaggttcgggtgctggtggtgatgactctgtcgcccatccatgtggaatcgcaatgccaatttcccgaggaattacccactccgtcggcgccatcgttattgtctgccattggtgcgccactgcctgtagccatcgtattagttcccagaccagagggggctgctggtggctgtccgagaggctgggggtcaggtacggagtctgcgtctccagtctgaccgaaattcaatctctttcttgcaggctggttgcccgcttttccggttcccgaggaggagtctggctccacaggagagtgctctaccggcctcttttttcccggagccgtcttaacaggctcctcaaccaggcccagaggttcaagaaccctcttttttgcctggaagactgctcgtccgaggttgcccccaaaagacgtatcttctttaaggcgctcctgaaactccgcgtcggcgtggtcgtacttgaggtacgggttgtctccgctgtcgagctgccggtcgtaggccttgtcgtgctcgagggccgcggcgtctgcctcgttgaccggctctcccttgtcgagtccgttgaagggtccgaggtacttgtacccaggaagcacaagacccctgctgtcgtccttatgccgctctgcgggctttggtggtggtgggccaggtttgagcttccaccactgtcttattccttcagagagagtgtcctcgagccaatctggaagataaccatcggcagccatacctgatttaaatcatttattgttcagagatgcagtcatccaaatccacattgaccagatcgcaggcagtgcaagcgtctggcacctttcccatgatatgatgaatgtagcaaagtttctgatacgcctttttgacgacagaaacgggttgagattctgacacgggaaagcactctaaacagtctttctgtccgtgagtgaagcagatatttgaattctgattcattctctcgcattgtctgcagggaaacagcatcagattcatgcccacgtgacgagaacatttgttttggtacctgtccgcgtagttgatcgaagcttccgcgtctgacgtcgatggctgcgcaactgactcgcgcgcccgtttgggctcacttatatctgcgtcactgggggcgggtcttttcttggctccaccctttttgacgtagaattcatgctccacctcaaccacgtgatcctttgcccaccggaaaaagtctttcacttcctgcttggtgaccttcccaaagtcatgatccagacggcgggttagttcaaatttgaacatccggtcttgcaacggctgctggtgttcgaaggtcgttgagttcccgtcaatcacggcgcacatgttggtgttggaggtggcgatcacgggagtcgggtctatctgggccgaggacttgcacttttggtccacgcgcaccttgcttcctccgagaatggcttcggccgattccacgaccttggcggtcatctttccctcctcccaccagatcaccatcttgtcgacacagtcgttgaagggaaagttctcattggtccagttgacgcagcaagggcgaattcgtttaaacctgcaggaactagtcccttagtgagg

SEQ ID NO: 207 - protein, 735 aa, Artificial Sequence
  source: /note="Description of Artificial Sequence: Synthetic polypeptide"
MAADGYLPDWLEDTLSEGIRQWWKLKPGPPPPKPAERHKDDSRGLVLPGYKYLGPFNGLYKGEPVNEADAAALEHDKAYDRQLDSGDNPYLKYNHAGAEFQERLKEDTSFGGNLGRAVFQAKKRVLEPLGLVEEPVKTAPGKKRPVEHSPVEPDSSSGTGKAGNQPARKRLNFGQTGDADSVPDPQPLGQPPAAPSGLGSTTMATGSGAPVADNNEGADGVGNSSGNWHCDSQWLGDRVITTSTRTWALPTYNNHLYKQISSQSGASNDNHYFGYSTPWGYFDFNRFHCHFSPRDWQRLINNNWGFRPKRLNFKLFNIQVKEVTQNDGTTTIANNLTSTVQVFTDSEYQLPYVLGSAHQGCLPPFPADVFMVPQYGYLTLNNGSQAVGRSSFYCLEYFPSQMLRTGNNFQFSYTFEDVPFHSSYAHSQSLDRLMNPLIDQYLYYLNKTQSNSGTLQQSRLLFSQAGPTSMSLQAKNWLPGPCYRQQRLSKQANDNNNSNFPWTAATKYHLNGRDSLVNPGPAMASHKDDEEKFFPMHGTLIFGKQGTNANDADLDNVMITDEEEIRTTNPVATEQYGYVSNNLQDSNTGPTTGTVNHQGALPGMVWQDRDVYLQGPIWAKIPHTDGHFHPSPLMGGFGLKHPPPQIMIKNTPVPANPPTNFSSAKFASFITQYSTGQVSVEIEWELQKENSKRWNPEIQYTSNYNKSVNVDFTVDTNGVYSEPRPIGTRYLTRNL

SEQ ID NO: 208 - DNA, 2208 bp, Artificial Sequence
  source: /note="Description of Artificial Sequence: Synthetic polynucleotide"
atggctgccgatggttatcttccagattggctcgaggacactctctctgaaggaataagacagtggtggaagctcaaacctggcccaccaccgccaaagcccgcagagcggcataaggacgacagcaggggtcttgtgcttcctgggtacaagtacctcggacccttcaacggactctacaagggagagccggtcaacgaggcagacgccgcggccctcgagcacgacaaggcctacgaccggcagctcgacagcggagacaacccgtacctcaagtacaaccacgccggcgcggagtttcaggagcgccttaaagaagatacgtcttttgggggcaacctcggacgagcagtcttccaggccaaaaagagggttcttgaacctctgggcttggttgaggagcctgttaaaacggctccgggaaaaaagaggccggtagagcactctcctgtggagccagactcctcctcgggaaccggaaaagcgggcaaccagcctgcaagaaaaagattgaattttggtcagactggagacgcagactccgtacctgacccccagcctctcggacagccaccagcagccccctctggtctgggatctactacaatggctacaggcagtggcgcaccagtggcagacaataacgagggtgccgatggagtgggtaattcctcaggaaattggcattgcgattcccaatggctgggcgacagagtcatcaccaccagcacccgaacctgggctctgcccacctacaacaaccacctctacaagcaaatctccagccaatcaggagcctcaaacgacaaccactactttggctacagcaccccctgggggtattttgacttcaacagattccactgccacttttcaccacgtgactggcaaagactcatcaacaacaactggggattccgaccaaagagactcaacttcaagctctttaacattcaagtcaaagaggtcacgcagaatgacggtacgacgacgattgccaataaccttaccagcacggttcaggtgtttactgactcggagtaccagctcccgtacgtcctcggctcggcgcatcaaggatgcctcccgccgttcccagcagacgtcttcatggtgccacagtatggatacctcaccctgaacaacgggagtcaggcggtaggacgctcttccttttactgcctggagtactttccttctcagatgctgcgtactggaaacaactttcagttcagctacacctttgaagacgttcctttccacagcagctacgctcacagccagagtctggatcggctgatgaatcctctgatcgaccagtacctgtattatctgaacaagacacaatcaaatagtggaacccttcagcagtctcggctactgtttagccaagctggacccaccagcatgtctcttcaagctaaaaactggctgcctggaccttgctacagacagcagcgtctgtcaaagcaggcaaacgacaacaacaacagcaactttccctggactgcggctacaaagtatcatctaaatggccgggactcgttggttaatccaggaccagctatggccagccacaaagacgatgaagaaaagtttttccccatgcatggaaccctgatatttggtaaacaaggaacaaatgctaacgacgcggatttggacaatgtcatgattacagatgaagaagaaatccgcaccaccaatcccgtggctacggagcagtacggatatgtgtcaaataatttgcaagactcaaatactggtccaactactggaactgtcaatcaccaaggagcgttacctggtatggtgtggcaggatcgagacgtgtacctgcagggacccatttgggccaagattcctcacaccgatggacactttcatccttctccacttatgggaggttttggactcaaacacccacctcctcagatcatgattaaaaacactcccgttccagccaatcctcccacaaacttcagttctgccaagtttgcttctttcatcacacagtattccacgggacaagtcagcgtagagatcgagtgggagctgcagaaggagaacagcaaacgctggaaccccgagatccagtacacttccaactataacaaatctgttaatgtggactttactgtggacactaatggtgtgtattcagagcctcgccccattggcaccagatacctgactcgtaatctgtaa

SEQ ID NO: 209 - protein, 738 aa, Artificial Sequence
  source: /note="Description of Artificial Sequence: Synthetic polypeptide"
MAADGYLPDWLEDNLSEGIREWWDLKPGAPKPKANQQKQDDGRGLVLPGCKYLGPFNGLDKGEPVNAADAAALEHDKAYDQQLKAGDNPYLRYNHADAEFQERLQEDTSFGGNLGRAVFQAKKRVLEPLGLVEEGAKTAPGKKRPVEPSPQRSPDSSTGIGKTGQQPAKKRLNFGQTGDSESVPDPQPIGEPPAGPSGLGSGTMAAGGGAPMADNNEGADGVGSSSGNWHCDSTWLGDRVITTSTRTWALPTYNNHLYKQISNGTSGGSTNDNTYFGYSTPWGYFDFNRFHCHFSPRDWQRLINNNWGFRPKRLNFKLFNIQVKEVTQNEGTKTIANNLTSTIQVFTDSEYQLPYVLGSAHQGCPPPFPADVFMIPQYGYLTLNNGSQAVGRSSFYCLEYFPSQMRRTGNNFEFSYQFEDVPFHSSYAHSQSLDRLMNPLIDQYLYYLSRTQSTGGTAGTQQLLFSQAGPNNMSAQAKNWLPGPCYRQQRVSTTLSQNNNSNFAWTGATKYHLNGRDSLVNPGVAMATHKDDEERFFPSSGVLMFGKQGAGKDNVDYSSVMLTSEEEIKTTNPVATEQYGVVADNLQQQNAAPIVGAVNSQGALPGMVWQNRDVYLQGPIWAKIPHTDGNFHPSPLMGGFGLKHPPPQILIKNTPVPADPPTTFSQAKLASFITQYSTGQVSVEIEWELQKENSKRWNPEIQYTSNYNKSVNVDFTVDTNGVYSEPRPIGTRYLTRNL

SEQ ID NO: 210 - DNA, 2217 bp, Artificial Sequence
  source: /note="Description of Artificial Sequence: Synthetic polynucleotide"
atggctgccgatggttatcttccagattggctcgaggacaacctctctgagggcattcgcgagtggtgggacttgaaacctggagccccgaaacccaaagccaaccagcaaaagcaggacgacggccggggtctggtgcttcctggctgcaagtacctcggacccttcaacggactcgacaagggggagcccgtcaacgcggcggacgcagcggccctcgagcacgacaaggcctacgaccagcagctcaaagcgggtgacaatccgtacctgcggtataaccacgccgacgccgagtttcaggagcgtctgcaagaagatacgtcttttgggggcaacctcgggcgagcagtcttccaggccaagaagcgggttctcgaacctctcggtctggttgaggaaggcgctaagacggctcctggaaagaagagaccggtagagccatcaccccagcgttctccagactcctctacgggcatcggcaagacaggccagcagcccgcgaaaaagagactcaactttgggcagactggcgactcagagtcagtgcccgaccctcaaccaatcggagaaccccccgcaggcccctctggtctgggatctggtacaatggctgcaggcggtggcgctccaatggcagacaataacgaaggcgccgacggagtgggtagttcctcaggaaattggcattgcgattccacatggctgggcgacagagtcatcaccaccagcacccgaacctgggccctccccacctacaacaaccacctctacaagcaaatctccaacgggacatcgggaggaagcaccaacgacaacacctacttcggctacagcaccccctgggggtattttgactttaacagattccactgccacttctcaccacgtgactggcagcgactcatcaacaacaactggggattccggcccaagagactcaacttcaagctcttcaacatccaggtcaaggaggtcacgcagaatgaaggcaccaagaccatcgccaataaccttaccagcacgattcaggtctttacggactcggaataccagctcccgtacgtcctcggctctgcgcaccagggctgcccgcctccgttcccggcggacgtcttcatgattcctcagtacgggtacctgactctgaacaacggcagtcaggccgtgggccgttcctccttctactgcctggagtactttccttctcaaatgcggagaacgggcaacaactttgagttcagctaccagtttgaggacgtgccttttcacagcagctacgcgcatagccaaagcctggaccggctgatgaaccccctcatcgaccagtacctgtactacctgtctcggactcagtccacgggaggtaccgcaggaactcagcagttgctattttctcaggccgggcctaataacatgtcggctcaggccaaaaactggctacccgggccctgctaccggcagcaacgcgtctccacgacactgtcgcaaaataacaacagcaactttgcttggaccggtgccaccaagtatcatctgaatggcagagactctctggtaaatcccggtgtcgctatggcaacgcacaaggacgacgaagagcgattttttccatccagcggagtcttgatgtttgggaaacagggagctggaaaagacaacgtggactatagcagcgttatgctaaccagtgaggaagaaatcaaaaccaccaacccagtggccacagaacagtacggcgtggtggccgataacctgcaacagcaaaacgccgctcctattgtaggggccgtcaacagtcaaggagccttacctggcatggtctggcagaaccgggacgtgtacctgcagggtcctatctgggccaagattcctcacacggacggcaactttcatccttcgccgctgatgggaggctttggactgaaacacccgcctcctcagatcctgattaagaatacacctgttcccgcggatcctccaactaccttcagtcaagccaagctggcgtcgttcatcacgcagtacagcaccggacaggtcagcgtggaaattgaatgggagctgcagaaagagaacagcaagcgctggaacccagagattcagtatacttccaactataacaaatctgttaatgtggactttactgtggacactaatggtgtgtattcagagcctcgccccattggcaccagatacctgactcgtaatctgtaa

SEQ ID NO: 211 - DNA, 3167 bp, Artificial Sequence
  source: /note="Description of Artificial Sequence: Synthetic polynucleotide"
attgaatttagcggccgcgaattcgcccttcgcagagaccaaagttcaactgaaacgaattaaacggtttattgattaacaagcaattacagattacgagtcaggtacctggtgccaatggggcgaggctctgaatacacaccattagtgtccacagtaaagtccacattaacagatttgttgtagttggaagtgtactgaatctcgggattccagcgtttgctgttctccttctgcagctcccactcgatctccacgctgacctgccccgtggagtactgtgtaatgaaggaagcaaactttgccgcactgaaggtagtcgaaggattcgcaggtaccggggtgttcttgatgagaatctgcgggggagggtgtttaagtccgaatccgcccatgaggggagaggggtgaaaatgtccgtccgtgtgtggaatctttgcccagatgggcccctgcaggtacacgtctctgtcctgccacaccatgcctggaagaacgccttgtgtgttgacatctgaggtagctgcttgtgtgttgccgctctggaggttggtagatacagaaccatactgctccgtagccacgggattggtggtcctgatttcctcttcgtctgtaatcatgaccttttcaatgtccacattagtttttcccgagtcttgttttccaaagatgagaaccccgctctgaggaaaaaacttttcttcatcgtccttgtggctggccatggccgggcccggattcaccagagagtctcttccattaaggtggtacttggtagctccagtccacgagtattcactgttgttgttatccgcagatgtctttgatactcgctgctggcggtaacagggtccaggaagccagttcctagactggtcccgaatgtcacttgctccggcctgagaaaactgaagccttgactgcgtggtggttccgcttggagtgtttgttctgctcaagtaatacaggtactggtcgatgagaggattcatgagacggtccaaactctggctgtgggcgtagctgctgtggaaaggaacgtcctcaaaggtgtagctgaaggtaaagttgtttccggtacgcagcatctgagaaggaaagtactccaggcagtaaaatgaagagcgtcctactgcctgactcccgttgttcagggtgaggtatccatactgtggcaccatgaagacgtctgctgggaacggcgggaggcatccttgatgcgccgagccgaggacgtacgggagctggtactccgagtcagtaaacacctgaaccgtgctggtaaggttattggcaatcgtcgtcgtaccgtcattctgcgtgacctccttgacttgaatgttaaagagcttgaagttgagtcttttgggccggaatccccaattgttgttgatgagtctttgccagtcacgtggcgaaaagtggcagtggaatctgttgaagtcaaaatacccccaaggggtgctgtagccaaagtagtggttgtcgtttgaggctcctgattggctggaaatctgcttgtagaggtggttgttgtaggtgggcagagcccaggtgcgggtgctggtggtgatgactctgtcgcccatccatgtggaatcgcaatgccaatttcccgaggaattacccactccgtcggcgccctcgttattgtctgccattggtgcgccactgcctgtagccatcgtattagttcccagaccagagggggctgctggtggctgtccgagaggctgggggtcaggtacggagtctgcgtctccagtctgaccgaaattcaatctctttcttgcaggctgctggcccgcttttccggttcccgaggaggagtctggctccgcaggagagtgctctaccggcctcttttttcccggagccgtcttaacaggttcctcaaccaggcccagaggttcaagaaccctctttttcgcctggaagactgctcgtccgaggttgcccccaaaagacgtatcttctttaagacgctcctggaactccgcgtcggcgtggttgtacttggggtacgggttgtctccgctgtcgagctgccggtcgtaggccttgtcgtgctcgagggccgcggcgtctgcctcgttgaccggctctcccttgtcgagtccgttgaagggtccaaggtacttgtacccaggaagcacaagacccctgctgtcgtccttatgccgctctgcgggctttggtggtggtgggccaggtttgagcttccaccactgtcttattccttcagagagagtgtcctcgagccaatctggaagataaccatcggcagccatacctgatttaaatcatttattgttcagagatgcagtcatccaaatccacattgaccagatcgcaagcagtgcaagcgtctggcacctttcccatgatatgatgaatgtagcacagtttctgatacgcctttttgacgacagaaacgggttgagattctgacacgggaaagcactctaaacagtctttctgtccgtgagtgaagcagatatttgaattctgattcattctctcgcattgtctgcagggaaacagcatcagattcatgcccacgtgacgagaacatttgttttggtacctgtccgcgtagttgattgaagcttccgcgtctgacgtcgatggctgcgcaactgactcgcgcgcccgtttgggctcacttatatctgcgtcactgggggcgggtctttttttggctccaccctttttgacgtagaattcatgctctacctcaaccacgtgatcctttgcccaccggaaaaagtctttgacttcctgcttggtgaccttcccaaagtcatgatccagacggcgggtgagttcaaatttgaacatccggtcttgcaacggctgctggtgttcgaaggtcgttgagttcccgtcaatcactgcgcacatgttggtgttggaggtgacaatcacgggagtcgggtctatctgggccgaggacttgcatttctggtccacgcgcaccttgcttcctccgagaatggctttggccgactccacgaccttggcggtcatcttcccctcctcccaccagatcaccatcttgtcgacgcaatcattgaaaggaaagttctcattggtccagttgacgcagccgtagaaagggcgaattcgtttaaacctgcaggactagtccctttagtgagggt

SEQ ID NO: 212 - DNA, 3161 bp, Artificial Sequence
  source: /note="Description of Artificial Sequence: Synthetic polynucleotide"
aattgaatttagcggccgcgaattcgcccttcgcagagaccaaagttcaactgaaacgaattaaacggtttattgattaacaagcaattacagattacgagtcaggtatctggtgccaatggggcgaggctctgaatacacaccattagtgtccacagtaaagtccacattaacagatttgttgtagttggaagtgtactgaatctcgggattccagcgtttgctgttctccttctgcagctcccactcgatctccacgctgacctgccccgtggagtactgtgtaatgaaggaagcaaactttgccgcactgaaggtagtcgaaggattcgcaggtaccggggtgttcttgatgagaatctgcgggggagggtgtttaagtccgaatccgcccatgaggggagaggggtgaaaatgtccgtccgtgtgtggaatctttgcccagatgggcccctgcaggtacacgtctctgtcctgccacaccatgcctggaagaacgccttgtgtgttgacatctgaggtagctgcttgtgtgttgccgctctggaggttggtagatacagaaccatactgctccgtagccacgggattggtggtcctgatttcctcttcgtctgtaatcatgaccttttcaatgtccacattagtttttcccgagtcttgttttccaaagatgagaaccccgctctgaggaaaaaacttttcttcatcgtccttgtggctggccatggccgggcccggattcaccagagagtctcttccattaaggtggtacttggtagctccagtccacgagtattcactgttgttgttatccgcagatgtctttgatactcgctgctggcggtaacagggtccaggaagccagttcctagactggtcccgaatgtcacttgctccggcctgagaaaactgaagccttgactgcgtggtggttccgcttggagtgtttgttctgctcaagtaatacaggtactggtcgacgagaggattcatgagacggtccaaactctggctgtgggcgtagctgctgtggaaaggaacgtcctcaaaggtgtagctgaaggtaaagttgtttccggtacgcagcatctgagaaggaaagtactccaggcagtaaaatgaagagcgtcctactgcctgactcccgttgttcagggtgaggtatccatactgtggcaccatgaagacgtctgctgggaacggcgggaggcatccttgatgcgccgagccgaggacgtacgggagctggtactccgagtcagtaaacacctgaaccgtgctggtaaggttattggcaatcgtcgtcgtaccgtcattctgcgtgacctccttgacttgaatgttaaagagcttgaagttgagtcttttgggccgggatccccaattgttgttgatgagtctttgccagtcacgtggcgaaaagtggcagtggaatctgttgaagtcaaaatacccccaaggggtgctgtagccaaagtagtggttgtcgtttgaggctcctgattggctggaaatctgcctgtagaggtggttgttgtaggtgggcagagcccaggtgcgggtgctggtggtgatgactctgtcgcccatccatgtggaatcgcaatgccaatttcccgaggaattacccactccgtcggcgccctcgttattgtctgccattggtgcgccactgcctgtagccatcgtattagttcccagaccagagggggctgctggtggctgtccgagaggctgggggtcaggtacggagtctgcgtctccagtctgaccgaaattcaatctccttcttgcaggctgctggcccgcttttccggttcccgaggaggagtctggctccgcaagagagtgctctaccggcctcttttttcccggagccgtcttaacaggttcctcaaccaggcccagaggttcaagaaccctctttttcgcctggaagactgctcgtccgaggttgcccccaaaagacgtatcttctttaagacgctcctggaactccgcgtcggcgtggttgtacttgaggtacgggttgtctccgccgtcgagctgccggtcgtaggccttgtcgtgctcgagggccgcggcgtctgcctcgttgaccggctctcccttgtcgagtccgttgaagggtccaaggtacttgtacccaggaagcacaagacccctgctgtcgtccttatgccgctctgcgggctttggtggtggtgggccaggtttgagcttccaccactgtcttattccttcagagagagtgtcctcgagccaatctggaagataaccatcggcagccatacctgatttaaatcatttattgttcagagatgcagtcatccaaatccacattgaccagatcgcaagcagtgcaagcgtctggcacctttcccatgatatgatgaatgtagcacagtttctgatacgcctttttgacgacagaaacgggttgagattctgacacgggaaagcactctaaacagtctttctgtccgtgagtgaagcagatatttgaattctgattcattctctcgcattgtctgcagggaaacagcatcagattcatgcccacgtgacgagaacatttgttttggtacctgtccgcgtagttgattgaagcttccgcgtctgacgtcgatggctgcgcaactgactcgcgcgcccgtttgggctcacttatatctgcgtcactgggggcgggtctttttttggctccaccctttttgacgtagaattcatgctctacctcaaccacgtgatcctttgcccaccggaaaaagtctttgacttcctgcttggtgaccttcccaaagtcatgatccagacggcgggtgagttcaaatttgaacatccggtcttgcaacggctgctggtgttcgaaggtcgttgagttcccgtcaatcactgcgcacatgttggtgttggaggtgacaatcacgggagtcgggtctatctgggccgaggacttgcatttctggtccacgcgcaccttgcttcctccgagaatggctttggccgactccacgaccttggcggtcatcttcccctcctcccaccagatcaccatcttgtcgacgcaatcattgaaaggaaagttctcattggtccagttgacgcagcaagggcgaattcgtttaaacctgcaggactagtccctttagtgaggg

SEQ ID NO: 213 - DNA, 3172 bp, Artificial Sequence
  source: /note="Description of Artificial Sequence: Synthetic polynucleotide"
gattgaatttagcggccgcgaattcgcccttgctgcgtcaactggaccaatgagaactttcccttcaacgattgcgtcgacaagatggtgatctggtgggaggagggcaagatgaccgccaaggtcgtggagtccgccaaggccattctgggtggaagcaaggtgcgcgtggaccaaaagtgcaagtcatcggcccagatcgaccccacgcccgtgatcgtcacctccaacaccaacatgtgcgccgtgatcgacgggaacagcaccaccttcgagcaccagcagcccctgcaggaccgcatgttcaagttcgagctcacccgccgtctggagcacgactttggcaaggtgaccaagcaggaagtcaaagagttcttccgctgggctcaggatcacgtgactgaggtggcgcatgagttctacgtcagaaagggcggagccaccaaaagacccgcccccagtgacgcggatataagcgagcccaagcgggcctgcccctcagttgcggagccatcgacgtcagacgcggaagcaccggtggactttgcggacaggtaccaaaacaaatgttctcgtcacgcgggcatgcttcagatgctgtttccctgcaagacatgcgagagaatgaatcagaatttcaacgtctgcttcacgcacggggtcagagactgctcagagtgcttccccggcgcgtcggaatctcaacccgtcgtcagaaaaaagacgtatcagaaactgtgcgcgattcatcatctgctggggcgggcacccgagattgcgtgttcggcctgcgatctcgtcaacgtggacttggatgactgtgtttctgagcaataaatgacttaaaccaggtatggctgctgacggttatcttccagattggctcgaggacaacctctctgagggcattcgcgagtggtgggacctgaaacctggagcccccaagcccaaggccaaccagcagaagcaggacgacggccggggtctggtgcttcctggctacaagtacctcggacccttcaacggactcgacaagggggagcccgtcaacgcggcggacgcagcggccctcgagcacgacaaggcctacgaccagcagctcaaagcgggtgacaatccgtacctgcggtataaccacgccgacgccgagtttcaggagcgtctgcaagaagatacgtcttttgggggcaacctcgggcgagcagtcttccaggccaagaagcgggttctcgaacctctcggtctggttgaggaagctgctaagacggctcctggaaagaagagaccggtagaaccgtcacctcagcgttcccccgactcctccgcgggcatcggcaagaaaggccagcagcccgctaaaaagagactgaactttggtcagactggcgactcagagtcagtccccgaccctcaaccaatcggagaaccaccagcaggcccctctggtctgggatctggtacaatggctgcaggcggtggcgctccaatggcagacaataacgaaggcgccgacggagtgggtagttcctcaggaaattggcattgcgattccacatggctgggcgacagagtcatcaccaccagcacccgaacctgggccctgcccacctacaacaaccacctctacaagcaaatatccaatgggacatcgggaggaagcaccaacgacaacacctacttcggctacagcaccccctgggggtattttgacttcaacagattccactgccacttctcaccacgtgactggcagcgactcatcaacaacaactggggattccggccaaaaagactcagcttcaagctcttcaacatccaggtcaaggaggtcacgcagaatgaaggcaccgagaccatcgccaataaccttaccagcacgattcaggtatttacggactcggaataccagctgccgtacgtcctcggctccgcgcaccagggctgcctgcctccgttcccggcggacgtcttcatgattccccagtacggctaccttacactgaacaatggaagtcaagccgtaggccgttcctccttctactgcctggaatattttccatctcaaatgctgcgaactggaaacaattttgaattcagctacaccttcgaggacgtgcctttccacagcagctgcgcacacagccagagctcggaccgactgatgaatcctctcatcgaccagtacctgtactacttatccagaactcggtccacaggaggaactcaaggtacccagcaattgttattttctcaagctgggcctgcaaacatgtcggctcaggctaagaactggctacctggaccttgctaccggcagcagcgagtctctacgacactgtcgcaaaacaacaacagcaactttgcttggactggtgccaccaaatatcacctgaacggaagagactctttggtaaatcccggtgtcgccatggcaacccacaaggacgacgaggaacgcttcttcccgtcgagtggagtcctgatgtttggaaaacagggtgctggaagagacaatgtggactacagcagcgttatgctaaccagcgaagaagaaattaaaaccactaaccctgtagccacagaacaatacggtgtggtggctgacaacttgcagcaaaccaatacagggcctattgtgggaaatgtcaacagccaaggagccttacctggcatggtctggcagaaccgagacgtgtacctgcagggtcccatctgggccaagattcctcacacggacggcaacttccacccttcaccgctaatgggaggatttggactgaagcacccacctcctcagatcctgatcaagaacacgccggtacctgcggatcctccaacaacgttcagccaggcgaaattggcttccttcattacgcagtacagcaccggacaggtcagcgtggaaatcgagtgggagctgcagaaggagaacagcaaacgctggaacccagagattcagtacacttcaaactactacaaatctacaaatgtggactttgctgtcaatacagagggaacttattctgagcctcgccccattggtactcgttacctcacccgtaatctgtaattgctggttaatcaataaaccgtttgattcgtttcagttgaactttggtctctgcgaagggcgaattcgtttaaacctgcaggactagtccctttagtgagg

SEQ ID NO: 214 - DNA, 3172 bp, Artificial Sequence
  source: /note="Description of Artificial Sequence: Synthetic polynucleotide"
gattgaatttagcggccgcgaattcgcccttgctgcgtcaactggaccaatgagaactttcccttcaacgattgcgtcgacaagatggtgatctggtgggaggagggcaagatgaccgccaaggtcgtggagtccgccaaggccattctgggtggaagcaaggtgcgcgtggaccaaaagtgcaagtcatcggcccagatcgaccccacgcccgtgatcgtcacctccaacaccaacatgtgcgccgtgatcggcgggaacagcaccaccttcgagcaccagcagcccctgcaggaccgcatgttcaagttcgagctcacccgccgtctggagcacgactttggcaaggtgaccaagcaggaagtcaaagagttcttccgctgggctcaggatcacgtgactgaggtggcgcatgagttctacgtcagaaagggcggagccaccaaaagacccgcccccagtgacgcggatataagcgagcccaagcgggcctgcccctcagttgcggagccatcgacgtcagacgcggaagcaccggtggactttgcggacaggtaccaaaacaaatgttctcgtcacgcgggcatgcttcagatgctgtttccctgcaagacatgcgagagaatgaatcagaatttcaacgtctgcttcacgcacggggtcagagactgctcagagtgcctccccggcgcgtcagaatctcaacccgtcgtcagaaaaaagacgtatcagaaactgtgcgcgattcatcatctgctggggcgggcacccgagattgcgtgttcggcctgcgatctcgtcaacgtggacttggatgactgtgtttctgagcaataaatgacttaaaccaggtatggctgctgacggttatcttccagattggctcgaggacaacctctctgagggcattcgcgagtggtgggacctgaaacctggagcccccaagcccaaggccaaccagcagaagcaggacgacggccggggtctggtgcttcttggctacaagtacctcggacccttcaacggactcgacaagggggagcccgtcaatgcggcggacgcagcggccctcgagcacgacaaggcctacgaccagcagctcaaagcgggtgacaatccgtacctgcggtataaccacgccgacgccgagtttcaggagcgtctgcaagaagatacgtcttttgggggcaacctcgggcgagcagtcttccaggccaagaagcgggttctcgaacctctcggtctggttgaggaagctgctaagacggctcctggaaagaagagaccggtagaaccgtcacctcagcgttcccccgactcctccacgggcatcggcaagaaaggccagcagcccgctaaaaagagactgaactttggtcagactggcgactcagagtcagtccccgaccctcaaccaatcggagaaccaccagcaggcccctctggtctgggatctggtacaatggctgcaggcggtggcgctccaatggcagacaataacgaaggcgccgacggagtgggtagttcctcaggaaattggcattgcgattccacatggctgggcgacagagtcatcaccaccagcacccgaacctgggccctgcccacctacaacaaccacctctacaagcaaatatccaatgggacatcgggaggaagcaccaacgacaacacctacttcggctacagcaccccctgggggtattttgacttcaacagattccactgccacttctcaccacgtgactggcagcgactcatcaacaacaactggggattccggccaaaaagactcagcttcaagctcttcaacatccaggtcaaggaggtcacgcagaatgaaggcaccaagaccatcgccaataaccttaccagcacgattcaggtatttacggactcggaataccagctgccgtacgtcctcggctccgcgcaccagggctgcctgcctccgttcccggcggacgtcttcatgattccccagtacggctaccttacactgaacaatggaagtcaagccgtaggccgttcctccttctactgcctggaatattttccatctcaaatgctgcgaactggaaacaattttgaattcagctacaccttcgaggacgtgcctttccacagcggctacgcacacagccagagcttggaccgactgatgaatcctctcatcgaccagtacctgtactacttatccagaactcagtccacaggaggaactcaaggtacccagcaattgttattttctcaagctgggcctgcaaacatgtcggctcaggctaagaactggctacctggaccttgctaccggcagcagcgagtctctacgacactgtcgcaaaacaacaacagcaactttgcttggactggtgccaccaaatatcacctgaacggaagagactctttggtaaatcccggtgtcgccatggcaacccacaaggacgacgaggaacgcttcttcccgtcgagtggagtcctgatgtttggaaaacagggtgctggaagagacaatgtggactacagcagcgttatgctaaccagcgaagaagaaattaaaaccactaaccctgtagccacagaacaatacggtgtggtggctgacaacttgcagcaaaccaatacagggcctattgtgggaaatgtcaacagccaaggagccttacctggcatggtctggcagaaccgagacgtgtacctgcagggtcccatctgggccaagattcctcacacggacggcaacttccacccttcaccgctaatgggaggatttggactgaagcacccacctcctcagatcctgatcaagaacacgccggtacctgcggatcctccaacgacgttcagccaggcgaaattggcttccttcattacgcagtacagcaccggacaggtcagcgtggaaatcgagtgggagctgcagaaggagaacagcaaacgctggaacccagagattcagtacacttcaaactactacaaatctacaaatgtggactttgctgtcaatacagagggaacttattctgagcctcgccccattggtactcgttacctcacccgtaatctgtaattgctggttaatcaataaaccgtttgattcgtttcagttgaactttggtctctgcgaagggcgaattcgtttaaacctgcaggactagtccctttagtgagg

SEQ ID NO: 215 - DNA, 2208 bp, Artificial Sequence
  source: /note="Description of Artificial Sequence: Synthetic polynucleotide"
atggctgccgatggttatcttccagattggctcgaggacactctctctgaaggaataagacagtggtggaagctcaaacctggcccaccaccaccaaagcccgcagagcggcataaggacgacagcaggggtcttgtgcttcctgggtacaagtacctcggacccttcaacggactcgacaagggagagccggtcaacgaggcagacgccgcggccctcgagcacgacaaggcctacgaccggcagctcgaaagcggagacaacccgtacctcaagtacaaccacgccgacgcggagtttcaggagcgtcttaaagaagatacgtcttttgggggcaacctcggacgagcagtcttccaggcgaaaaagagggttcttgaacctctgggcctggttgaggagcctgttaaaacggctccgggaaaaaagaggccggtagagcactctcctgtggagccagactcctcctcgggaaccggaaaagcgggccagcagcctgcgagaaaaagattgaattttggtcagactggagacgcagactccgtacctgacccccagcctctcggacagccaccagcagccccctctggtctgggatctactacaatggcttcaggcagtggcgcaccagtggcagacaataacgagggtgccgatggagtgggtaattcctcaggaaattggcattgcgattcccaatggctgggcgacagagtcatcaccaccagcacccgaacctgggccctgcccacctacaacaaccacctctacaagcaaatctccagccaatcaggagcctcaaacgacaaccactactttggctacagcaccccctgggggtattttgacttcaacagattccactgccacttttcaccacgtgactggcaaagactcatcaacaacagctggggattccgacccaaaagactcaacttcaagctctttaacattcaagtcaaagaggtcacgcagaatgacggtacgacgacgattgccaataaccttaccagcacggttcaagtgtttaccgactcggagtaccagctcccgtacgtcctcggctcggcgcatcaaggatgcctcccgccgttcccagcagacgtctttatggtcccacagtatggatacctcaccctgaacaacgggagtcaggcggtaggacgctcttccttttactgcctggagtactttccttctcagatgctgcgtactggaaacaactttcagttcagctacacctttgaagacgttcccttccacagcagctacgctcacagccagagtctggatcggctgctgaatcctctgatcgaccagtacctatattatctgaacaagacacaatcaaatagtggaactcttcagcagtctcggctactgtttagccaagctggacccaccagcatgtctcttcaagctaaaaactggctgcctggaccttgctacagacagcagcgtctgtcaaagcaggcaaacgacaacaacaacagcaactttccctggactgcggctacaaagtatcatctaaatggccgggactcgttggttaatccaggaccagctatggccagccacaaagacgatgaagaaaagtttttccccatgcatggaaccctgatatttggtaaacaaggaacaaatgctaacgacgcggatttggacaatgtcatgattacagatgaagaagaaatccgcaccaccaatcccgtggctacggagcagtacggatatgtgtcaaataatttgcaaaactcaaatactggtccaactactggaactgtcaatcaccaaggagcgttacctggtatggtgtggcaggatcgagacgtgtacctgcagggacccatttgggccaagattcctcacacggacgggcactttcatccttctccactaatgggaggttttgggctcaaacacccgcctcctcagatcatgatcaaaaacactcccgttccagccaatcctcctacaaacttcagttcttccaagtttgcttctttcatcacacagtattccacggggcaggtcagcgtggagatcgagtgggagctgcagaaggagaacagcaaacgctggaatcccgaaattcagtatacttccaactacaacaaatctgttaatgtggactttactgtggacactaatggtgtgtattcagagcctcgccccattggcaccagatacccgactcgtaatctgtaa

SEQ ID NO: 216 - protein, 735 aa, Artificial Sequence
  source: /note="Description of Artificial Sequence: Synthetic polypeptide"
MAADGYLPDWLEDTLSEGIRQWWKLKPGPPPPKPAERHKDDSRGLVLPGYKYLGPFNGLDKGEPVNEADAAALEHDKAYDRQLESGDNPYLKYNHADAEFQERLKEDTSFGGNLGRAVFQAKKRVLEPLGLVEEPVKTAPGKKRPVEHSPVEPDSSSGTGKAGQQPARKRLNFGQTGDADSVPDPQPLGQPPAAPSGLGSTTMASGSGAPVADNNEGADGVGNSSGNWHCDSQWLGDRVITTSTRTWALPTYNNHLYKQISSQSGASNDNHYFGYSTPWGYFDFNRFHCHFSPRDWQRLINNSWGFRPKRLNFKLFNIQVKEVTQNDGTTTIANNLTSTVQVFTDSEYQLPYVLGSAHQGCLPPFPADVFMVPQYGYLTLNNGSQAVGRSSFYCLEYFPSQMLRTGNNFQFSYTFEDVPFHSSYAHSQSLDRLLNPLIDQYLYYLNKTQSNSGTLQQSRLLFSQAGPTSMSLQAKNWLPGPCYRQQRLSKQANDNNNSNFPWTAATKYHLNGRDSLVNPGPAMASHKDDEEKFFPMHGTLIFGKQGTNANDADLDNVMITDEEEIRTTNPVATEQYGYVSNNLQNSNTGPTTGTVNHQGALPGMVWQDRDVYLQGPIWAKIPHTDGHFHPSPLMGGFGLKHPPPQIMIKNTPVPANPPTNFSSSKFASFITQYSTGQVSVEIEWELQKENSKRWNPEIQYTSNYNKSVNVDFTVDTNGVYSEPRPIGTRYPTRNL

SEQ ID NO: 217 - DNA, 2208 bp, Artificial Sequence
  source: /note="Description of Artificial Sequence: Synthetic polynucleotide"
atggctgccgatggttatcttccagattggctcgaggacactctctctgaaggaataagacagtggtggaagctcaaacctggcccaccaccaccaaagcccgcagagcggcataaggacgacagcaggggtcttgtgcttcctgggtacaagtacctcggacccttcaacggactcgacaagggagagccggtcaacgaggcagacgccgcggccctcgagcacgacaaggcctacgaccggcagctcgacagcggagacaacccgtacctcaagtacaaccacgccgacgcggagtttcaggagcgtcttaaagaagatacgtcttttgggggcaacctcggacgagcagtcttccaggccaaaaagaggattcttgaacctctgggcctggttgaggaacctgttaagacggctccgggagaaaagaggccggtagagcactctcctgcggagccagactcctcctcgggaaccggaaaagcgggccagcagcctgcaagaaagagattgaattttggccagactggagacgcagactcagtacctgacccccagcctctcggacagccaccagcagccccctctggtctgggaactaatacgatggcttcaggcagtggcgcaccaatggcagacaataacgagggcgccgacggagtgggtaattcctcgggaaattggtattgcgattccacatggatgggcgacagagtcatcaccaccagcacccgcacctgggccctgcccacctacaacaaccatctgtacaagcaaatctccagccagtctggagccagcaacgacaaccactactttggctacagcaccccctgggggtattttgacttcaacagattccactgccacttctccccacgtgactggcaaagactcatcaacaacaactggggattccggcccaagagactcagcttcaagctctttaacattcaagtcaaagaggtcacgcagaatgacggtacgacgacgattgccaataaccttaccagcacggttcaggtgtttactgactcggagtaccagctcccgtacgtcctcggctcggcgcatcaaggatgcctcccgccgttcccagcagacgtcttcatggtgccacagtatggatacctcaccctgaacaacggcagtcaggcggtaggacgctcttccttttactgcctggagtactttccttctcagatgcttcgtaccggaaacaactttaccttcagctacacctttgaagacgttcctttccatagcagctacgctcacagccaaagtctggaccgtctcatgaatcctctcatcgaccagtacctgtattacttgagcagaacaaacactccaagcggaaccaccacgatgtccaggcttcagttttctcaggccggagcaagtgacattcgggaccagtctagaaactggcttcctggaccctgttaccgccagcagcgagtatcaaagacagctgcggacaacaacaacagtgattactcgtggactggagctaccaagtaccacctcaatggaagagactctctggtgaatccgggcccagctatggccagccacaaggacgatgaagaaaaatattttcctcagagcggggttctcatctttggaaaacaagactcgggaaaaactaatgtggacattgaaaaggttatgattacagacgaagaggaaatcaggaccaccaatcccgtggctacggagcagtatggttctgtatctaccaacctccagagcggcaacacacaagcagctacctcagatgtcaacacacaaggcgttcttccaggcatggtctggcaggacagagacgtgtacctgcaggggcccatctgggcaaagattccacacacggacggacattttcacccctctcccctcgtgggcggattcggacttaaacaccctcctccacaaattctcatcaagaacaccccggtacctgcgaatccttcgaccactttcagtgcggcaaagtttgcttccttcatcacacagtactccacggggcaggtcagcgtggagatcgagtgggagctgcagaaggagaacagcaaacgctggaatcccgaaattcagtacacttccaactacaacaaatctgttaatgtggactttactgtggacactaatggtgtgtattcagagcctcgccccattggcaccagatacctgactcgtaatctgtaa

SEQ ID NO: 218 - protein, 735 aa, Artificial Sequence
  source: /note="Description of Artificial Sequence: Synthetic polypeptide"
MAADGYLPDWLEDTLSEGIRQWWKLKPGPPPPKPAERHKDDSRGLVLPGYKYLGPFNGLDKGEPVNEADAAALEHDKAYDRQLDSGDNPYLKYNHADAEFQERLKEDTSFGGNLGRAVFQAKKRILEPLGLVEEPVKTAPGEKRPVEHSPAEPDSSSGTGKAGQQPARKRLNFGQTGDADSVPDPQPLGQPPAAPSGLGTNTMASGSGAPMADNNEGADGVGNSSGNWYCDSTWMGDRVITTSTRTWALPTYNNHLYKQISSQSGASNDNHYFGYSTPWGYFDFNRFHCHFSPRDWQRLINNNWGFRPKRLSFKLFNIQVKEVTQNDGTTTIANNLTSTVQVFTDSEYQLPYVLGSAHQGCLPPFPADVFMVPQYGYLTLNNGSQAVGRSSFYCLEYFPSQMLRTGNNFTFSYTFEDVPFHSSYAHSQSLDRLMNPLIDQYLYYLSRTNTPSGTTTMSRLQFSQAGASDIRDQSRNWLPGPCYRQQRVSKTAADNNNSDYSWTGATKYHLNGRDSLVNPGPAMASHKDDEEKYFPQSGVLIFGKQDSGKTNVDIEKVMITDEEEIRTTNPVATEQYGSVSTNLQSGNTQAATSDVNTQGVLPGMVWQDRDVYLQGPIWAKIPHTDGHFHPSPLVGGFGLKHPPPQILIKNTPVPANPSTTFSAAKFASFITQYSTGQVSVEIEWELQKENSKRWNPEIQYTSNYNKSVNVDFTVDTNGVYSEPRPIGTRYLTRNL

SEQ ID NO: 219 - DNA, 2209 bp, Artificial Sequence
  source: /note="Description of Artificial Sequence: Synthetic polynucleotide"
atggctgccgatggttatcctccagattggctcgaggacactctctctgaagggataagacagtggtggaagctcaaacctggcccaccaccaccaaagcccgcagagcggcataaggacgacagcaggggtcttgtgcttcctgggtacaagtacctcggacccttcaacggactcgacaagggggagccggtcaacgaggcagacgccgcggccctcgagcacgacaaggcctacgaccggcagctcgacagcggagacaacccgtacctcaagtacaaccacgccgacgcagagtttcaggagcgccttaaagaagatacgtcttttgggggcaacctcggacgagcagtcttccaggcgaaaaagagggttcttgaacctctgggcctggttgaggaacctgttaagacggctccgggaaaaaagaggccggtagagcactctcctgtggagccagactcctcctcgggaaccggaaaagcgggccagcggcctgcaagaaaaagattaaattttggtcagactggagacgcagactccgtacctgacccccagcctctcggacagccaccagcagccccctctggtctgggatctactacaatggctacaggcagtggcgcaccaatggcagacaataacgagggtgccgatggagtgggtaattcctcaggaaattggcattgcgattcccaatggctgggcgacagagtcatcaccaccagcacccgaacctgggccctgcccacatacaacaaccacctctacaagcaaatctccagccaatcaggagccagcaacgacaaccactactttggctacagcaccccctgggggtattttgacttcaacagattccactgccacttttcaccacgtgactggcaaagactcatcaacaacaactggggattccggcccaaaagactcaacttcaagctctttaatattcaagtcaaagaggtcacgcagaatgacggtacgacgacgattgccaataaccttaccagcacggttcaggtgtttactgactcggagtaccagctcccgtacgtcctgggctcggcgcatcaaggatgcctcccgccgtttccagcggacgtcttcatggtcccacagtatggatacctcaccctgaacaacgggagtcaggcggtaggacgctcttccttttactgcctggagtactttccttctcagatgctgcgtactggaaacaactttcagttcagctacacttttgaagacgtgcctttccacagcagctacgctcacagccagagtctggatcggctgatgaatcctctgatcgaccagtacctgtattatctgaacaagacacaaacaaatagtggaactcttcagcagtctcggctactgtttagccaagctggaccaaccaacatgtctcttcaagctaaaaactggctgcctggaccttgctacagacagcagcgtctgtcaaaacaggcaaacgacaacaacaacagcaactttccctggactgcagctacaaagtatcatctaaatggccgggactcgttggttaatccaggaccagctatggccagtcacaaggatgacgaagaaaagtttttccccatgcatggaaccctgatatttggtaaacaaggaacaaatgccaacgacgcggatttggaaaatgtcatgattacagatgaagaagaaatcagggccaccaatcccgtggctacggagcagtacgggactgtgtcaaataatttgcaaaactcaaacactggtccaactactggaactgtcaatcgccaaggagcgttacctggtatggtgtggcaggatcgagacgtgtacctgcagggacccatttgggccaagattcctcacaccgatggacactttcatccttctccactgatgggaggttttggactcaaacacccgcctcctcagatcatgatcaaaaacactcccgttccagccaatcctcccacaaacttcagttctgccaagtttgcttctttcatcacacagtattccacgggacaggtcagcgtggagatcgagtgggagctgcagaaggagaacagcaaacgctggaatcccgaaattcagtacacttccaactacaacaagtctgttaatgtggactttactgtggacactaatggtgtgtattcagagcctcgccccattggcaccagatacctgactcgtaatctgtaat

SEQ ID NO: 220 - protein, 735 aa, Artificial Sequence
  source: /note="Description of Artificial Sequence: Synthetic polypeptide"
MAADGYPPDWLEDTLSEGIRQWWKLKPGPPPPKPAERHKDDSRGLVLPGYKYLGPFNGLDKGEPVNEADAAALEHDKAYDRQLDSGDNPYLKYNHADAEFQERLKEDTSFGGNLGRAVFQAKKRVLEPLGLVEEPVKTAPGKKRPVEHSPVEPDSSSGTGKAGQRPARKRLNFGQTGDADSVPDPQPLGQPPAAPSGLGSTTMATGSGAPMADNNEGADGVGNSSGNWHCDSQWLGDRVITTSTRTWALPTYNNHLYKQISSQSGASNDNHYFGYSTPWGYFDFNRFHCHFSPRDWQRLINNNWGFRPKRLNFKLFNIQVKEVTQNDGTTTIANNLTSTVQVFTDSEYQLPYVLGSAHQGCLPPFPADVFMVPQYGYLTLNNGSQAVGRSSFYCLEYFPSQMLRTGNNFQFSYTFEDVPFHSSYAHSQSLDRLMNPLIDQYLYYLNKTQTNSGTLQQSRLLFSQAGPTNMSLQAKNWLPGPCYRQQRLSKQANDNNNSNFPWTAATKYHLNGRDSLVNPGPAMASHKDDEEKFFPMHGTLIFGKQGTNANDADLENVMITDEEEIRATNPVATEQYGTVSNNLQNSNTGPTTGTVNRQGALPGMVWQDRDVYLQGPIWAKIPHTDGHFHPSPLMGGFGLKHPPPQIMIKNTPVPANPPTNFSSAKFASFITQYSTGQVSVEIEWELQKENSKRWNPEIQYTSNYNKSVNVDFTVDTNGVYSEPRPIGTRYLTRNL

SEQ ID NO: 221 - DNA, 2208 bp, Artificial Sequence
  source: /note="Description of Artificial Sequence: Synthetic polynucleotide"
atggctgccgatggttatcttccagattggctcgaggacactctctctgaaggaataagacagtggtggaagctcaaacctggcccaccaccaccaaagcccgcagagcggcataaggacgacagcaggggtcttgtgcttcctgggtacaggtacctcggacccttcaacggactcgacaagggagagccggtcaacgaggcagacgccgcggccctcgagcacgacaaggcctacgaccggcagctcgacagcggagacaacccgtacctcaagtacaaccacgtcgacgcggagtttcaggagcgtcttaaagaagatacgtcttttgggggcaacctcggacgagcagtcttccaggccaaaaagaggattcttgaacctctgggcctggttgaggaacctgttaaggcggctccgggagaaaagaggccggtagagcactctcctgcggagccagactcctcctcgggaaccggaaaagcgggccagcagcctgcaagaaagagattgaattttggtcagactggagacgcagactcagtacctgacccccagcctctcggacagccaccagcagccccctctggtctgggaactaatacgatggcttcaggcagtggcgcaccaatggcagacaataacgagggcgccgacggagtgggtaattcctcgggaaattggcattgcgattccacatggatgggcgacagagtcatcaccaccagcacccgcacctgggccctgcccacctacaacaaccatctgtacaagcaaatctccagccagtctggagccagcaacgacaaccactactttggctacagcaccccctgggggcattttgacttcaacagattccactgccacttctccccacgtgactggcaaagactcatcaacaacaactggggattccggcccaagagactcagcttcaagctctttaacattcaagtcaaagaggtcacgcagaatgacggtacgacgacgattgccaataaccttaccagcacggttcaggtgtttactgactcggagtaccagctcccgtacgtcctcggctcggcgcatcaaggatgcctcccgccgttcccagcagacgtcttcatggtgccacagtatggatacctcaccctgaacaacggcagtcaggcggtaggacgctcttccttttactgcctggagtactttccttctcagatgcttcgtaccggaaacaactttaccttcagctacacctttgaagacgttcctttccatagcagctacgctcacagccaaagtctggaccgtctcatgaatcctctcatcgaccagtacctgtattacttgagcagaacaaacactccaagcggaaccaccacgatgtccaggcttcagttttctcaggccggagcaagtgacattcgggaccagtctagaaactggcttcctggaccctgttaccgccagcagcgagtatcaaagacagctgcggacaacaacaacagtgattactcgtggactggagctaccaagtaccacctcaatggaagagactctctggtgaatccgggcccagctatggccagccacaaggacgatgaagaaaaatattttcctcagagcggggttctcatctttggaaaacaagactcgggaaaaactaatgtggacattgaaaaggttatgattacagacgaagaggaaatcaggaccaccaatcccgtggctacggagcagtatggttctgtatctaccaacctccagagcggcaacacacaagcagctacctcagatgtcaacacacaaggcgttcttccaggcatggtctggcaggacagagacgtgtacctgcaggggcccatctgggcaaagattccacacacggacggacattttcacccctctccccccatgggcggattcggacttaaacaccctcctccacaaattctcatcaagaacaccccggtacctgcgaatccttcgaccactttcagtgcggcaaagtttgcttccttcatcacacagtactccacggggcaggtcagcgtggagatcgagtgggagctgcagaaggagaacagcaaacgctggaatcccgaaattcagtacacttccaactacaacaaatctgttaatgtggactttactgtggacactaatggtgtgtattcagagcctcgccccattggcgccagatacctgactcgtaatctgtaa

SEQ ID NO: 222 - protein, 735 aa, Artificial Sequence
  source: /note="Description of Artificial Sequence: Synthetic polypeptide"
MAADGYLPDWLEDTLSEGIRQWWKLKPGPPPPKPAERHKDDSRGLVLPGYRYLGPFNGLDKGEPVNEADAAALEHDKAYDRQLDSGDNPYLKYNHVDAEFQERLKEDTSFGGNLGRAVFQAKKRILEPLGLVEEPVKAAPGEKRPVEHSPAEPDSSSGTGKAGQQPARKRLNFGQTGDADSVPDPQPLGQPPAAPSGLGTNTMASGSGAPMADNNEGADGVGNSSGNWHCDSTWMGDRVITTSTRTWALPTYNNHLYKQISSQSGASNDNHYFGYSTPWGHFDFNRFHCHFSPRDWQRLINNNWGFRPKRLSFKLFNIQVKEVTQNDGTTTIANNLTSTVQVFTDSEYQLPYVLGSAHQGCLPPFPADVFMVPQYGYLTLNNGSQAVGRSSFYCLEYFPSQMLRTGNNFTFSYTFEDVPFHSSYAHSQSLDRLMNPLIDQYLYYLSRTNTPSGTTTMSRLQFSQAGASDIRDQSRNWLPGPCYRQQRVSKTAADNNNSDYSWTGATKYHLNGRDSLVNPGPAMASHKDDEEKYFPQSGVLIFGKQDSGKTNVDIEKVMITDEEEIRTTNPVATEQYGSVSTNLQSGNTQAATSDVNTQGVLPGMVWQDRDVYLQGPIWAKIPHTDGHFHPSPPMGGFGLKHPPPQILIKNTPVPANPSTTFSAAKFASFITQYSTGQVSVEIEWELQKENSKRWNPEIQYTSNYNKSVNVDFTVDTNGVYSEPRPIGARYLTRNL

SEQ ID NO: 223 - DNA, 2208 bp, Artificial Sequence
  source: /note="Description of Artificial Sequence: Synthetic polynucleotide"
atggctgccgatggttatcttccagattggctcgaggacaccctctctgaaggaataagacagtggtggaagctcaaacctggcccaccaccaccaaagcccgcagagcggcataaggacgacagcaggggtcttgtgcttcctgggtacaagtacctcggacccttcaacggactcgacaagggagagccggtcaacgaggcagacgccgcggccctcgagcacgacaaggcctacgaccggcagctcgacagcggagataacccgtacctcaagtacaaccacgccgacgcggagtttcaggagcgccttaaagaggatacgtcttttgggggcaacctcggacgagcagtcttccaggccaaaaagaggattcttgaacctctgggcctggttgaggaacctgttaagacggctccgggaaaaaagaggccggtagagcactctcctgcggagccagactcctcctcgggaaccggaaaagcgggccagcagcctgcaagaaagagattgaattttggtcagactggagacgcagactcagtacctgacccccggcctctcggacagccaccagcagccccctctggtctgggaactaatacgatggcttcaggcagtggcgcaccaatggcagacaataacgagggcgccgacggagtgggtaattcctcgggaaattggcattgcgattccacatggatgggcgacagagtcatcaccaccagcacccgcacctgggccctgcccacctacaacaaccatctgtacaagcaaatctccagccagtctggagccagcaacgacaaccactactttggctacagcaccccctgggggtattttgacttcaacagattccactgccacttctccccacgtgactggcaaagactcatcaacaacaactggggattccggcccaagagactcagcttcaagctctttaacattcaagtcaaagaggtcacgcagaatgacggtacgacgacgattgccaataaccttaccagcacggttcaggtgtttactgactcggagtaccagctcccgtacgtcctcggctcggcgcatcaaggatgcctcccgccgttcccagcagacgtcttcatggtgccacagtatggatacctcaccctgaacaacggcagtcaggcggtaggacgctcttccttttactgcctggagtactttccttctcagatgcttcgtaccggaaacaactttaccttcagctacacctttgaagacgttcctttccatagcagctacgctcacagccaaagtctggaccgtctcatgaatcctctcatcgaccagtacctgtattacttgagcagaacaaacactccaagcggaaccaccacgatgtccaggcttcagttttctcaggccggagcaagtgacattcgggaccagtctagaaactggcttcctggaccctgttaccgccagcagcgagtatcaaagacagctgcggacaacaacaacagtgattactcgtggactggagctaccaagtaccacctcaatggaagagactctctggtgaatccgggcccagctatggccagccacaaggacgatgaagaaaaatattttcctcagagcggggttctcatctttggaaaacaagactcgggaaaaactaatgtggacattgaaaaggttatgattacagacgaagaggaaatcaggaccaccaatcccgtggctacggagcagtatggttctgtatctaccaacctccagagcggcaacacacaagcagctacctcagatgtcaacacacaaggcgttcttccaggcatggtctggcaggacagagacgtgtacctgcaggggcccatctgggcaaagattccacacacggacggacattttcacccctctcccctcatgggcggattcggacttaaacaccctcctccacaaattctcatcaagaacaccccggtacctgcgaatccttcgaccactttcagtgcggcaaagtttgcttccttcatcacacagtactccacggggcaggtcagcgtggagatcgagtgggagctgcagaaggagaacagcaaacgctggaatcccgaaattcagtacacttccaactacaacaaatctgttaatgtggactttactgtggacactaatggtgtgtattcagagcctcgccccattggcaccagatacctgactcgtaatctgtaa

SEQ ID NO: 224 - protein, 735 aa, Artificial Sequence
  source: /note="Description of Artificial Sequence: Synthetic polypeptide"
MAADGYLPDWLEDTLSEGIRQWWKLKPGPPPPKPAERHKDDSRGLVLPGYKYLGPFNGLDKGEPVNEADAAALEHDKAYDRQLDSGDNPYLKYNHADAEFQERLKEDTSFGGNLGRAVFQAKKRILEPLGLVEEPVKTAPGKKRPVEHSPAEPDSSSGTGKAGQQPARKRLNFGQTGDADSVPDPRPLGQPPAAPSGLGTNTMASGSGAPMADNNEGADGVGNSSGNWHCDSTWMGDRVITTSTRTWALPTYNNHLYKQISSQSGASNDNHYFGYSTPWGYFDFNRFHCHFSPRDWQRLINNNWGFRPKRLSFKLFNIQVKEVTQNDGTTTIANNLTSTVQVFTDSEYQLPYVLGSAHQGCLPPFPADVFMVPQYGYLTLNNGSQAVGRSSFYCLEYFPSQMLRTGNNFTFSYTFEDVPFHSSYAHSQSLDRLMNPLIDQYLYYLSRTNTPSGTTTMSRLQFSQAGASDIRDQSRNWLPGPCYRQQRVSKTAADNNNSDYSWTGATKYHLNGRDSLVNPGPAMASHKDDEEKYFPQSGVLIFGKQDSGKTNVDIEKVMITDEEEIRTTNPVATEQYGSVSTNLQSGNTQAATSDVNTQGVLPGMVWQDRDVYLQGPIWAKIPHTDGHFHPSPLMGGFGLKHPPPQILIKNTPVPANPSTTFSAAKFASFITQYSTGQVSVEIEWELQKENSKRWNPEIQYTSNYNKSVNVDFTVDTNGVYSEPRPIGTRYLTRNL

SEQ ID NO: 225 - DNA, 2208 bp, Artificial Sequence
  source: /note="Description of Artificial Sequence: Synthetic polynucleotide"
atggctgccgatggttatcttccagattggctcgaggacactctctctgaaggaataagacagtggtggaagctcaaacctggcccaccaccaccaaagcccgcagagcggcataaggacgacagcaggggtcttgtgcttcctgggtacaagtacctcggacccttcaacggactcgacaagggagagccggtcaacgaggcagacgccgcggccctcgagcacgacaaggcctacgaccggcagctcgacagcggagacaacccgtacctcaagtacaaccacgccgacgcggagtttcaggagcgccttaaaggagatacgtcttttgggggcaacctcggacgagcagtcttccaggccaaaaagaggattcttgaacctctgggcctggttgaggaacctgttaagacggctccgggaaaaaagaggccggtagagcactctcctgcggagccagactcctcctcgggaaccggaaaagcgggccagcagcctgcaagaaagagattgaattttggtcagactggagacgcagactcagtacctgacccccagcctctcggacagccaccagcagccccctctggtctgggaactaatacgatggcttcaggcagtggcgcaccaatggcagacaataacgagggcgccgacggagtgggtaattcctcgggaaattggcattgcgattccacatggatgggcggcagagtcatcaccaccagcacccgcacctgggccctgcccacctacaacaaccatctgtacaagcaaatctccagccagtctggagccagcaacgacaaccactactttggctacagcaccccctgggggtattttgacttcaacagattccactgccacttctccccacgtgactggcaaagactcatcaacaacaactggggattccggcccaagagactcagcttcaagctctttaacattcaagtcaaagaggtcacgcagaatgacggtacgacgacgattgccaataaccttaccagcacggttcaggtgtttactgactcggagtaccagctcccgtacgtcctcggctcggcgcatcaaggatgcctcccgccgttcccagcagacgtcttcatggtgccacagtatggatacctcaccctgaacaacggcagtcaggcggtaggacgctcttccttttactgcctggagtactttccttctcagacgcttcgtaccggaaacaactttaccttcagctacacctttgaagacgttcctttccatagcagctacgctcacagccaaagtctggaccgtctcatgaatcctctcatcgaccagtacctgtattacttgagcagaacaaacactccaagcggaaccaccacgatgtccaggcttcagttttctcaggccggagcaagtgacattcgggaccagtctagaaactggcttcctggaccctgttaccgccagcagcgagtatcaaagacagctgcggacaacaacaacagtgattactcgtggactggagctaccaagtaccacctcaatggaagagactctctggtgaatccgggcccagctatggccagccacaaggacgatgaagaaaaatattttcctcagagcggggttctcatctttggaaaacaagactcgggaaaaactaatgtggacattgaaaaggttatgattacagacgaagaggaaatcaggaccaccaatcccgtggctacggagcagtatggttctgtatctaccaacctccagagcggcaacacacaagcagctacctcagatgtcaacacacaaggcgttcttccaggcatggtctggcaggacagagacgtgtacctgcaggggcccatctgggcaaagattccacacacggacggacattttcacccctctcccctcatgggcggattcggacttaaacaccctcctccacaaattctcatcaagaacaccccggtacctgcgaatccttcgaccactttcagtgcggcaaagtttgcttccttcatcacacagtactccacggggcaggtcagcgtggagatcgagtgggagctgcagaaggagaacagcaaacgctggaatcccgaaattcagtacacttccaactacaacaaatctgttaatgtggactttactgtggacactaatggtgtgtattcagagcctcgccccattggcaccagatacctgactcgtaatctgtaa

SEQ ID NO: 226 - protein, 735 aa, Artificial Sequence
  source: /note="Description of Artificial Sequence: Synthetic polypeptide"
MAADGYLPDWLEDTLSEGIRQWWKLKPGPPPPKPAERHKDDSRGLVLPGYKYLGPFNGLDKGEPVNEADAAALEHDKAYDRQLDSGDNPYLKYNHADAEFQERLKGDTSFGGNLGRAVFQAKKRILEPLGLVEEPVKTAPGKKRPVEHSPAEPDSSSGTGKAGQQPARKRLNFGQTGDADSVPDPQPLGQPPAAPSGLGTNTMASGSGAPMADNNEGADGVGNSSGNWHCDSTWMGGRVITTSTRTWALPTYNNHLYKQISSQSGASNDNHYFGYSTPWGYFDFNRFHCHFSPRDWQRLINNNWGFRPKRLSFKLFNIQVKEVTQNDGTTTIANNLTSTVQVFTDSEYQLPYVLGSAHQGCLPPFPADVFMVPQYGYLTLNNGSQAVGRSSFYCLEYFPSQTLRTGNNFTFSYTFEDVPFHSSYAHSQSLDRLMNPLIDQYLYYLSRTNTPSGTTTMSRLQFSQAGASDIRDQSRNWLPGPCYRQQRVSKTAADNNNSDYSWTGATKYHLNGRDSLVNPGPAMASHKDDEEKYFPQSGVLIFGKQDSGKTNVDIEKVMITDEEEIRTTNPVATEQYGSVSTNLQSGNTQAATSDVNTQGVLPGMVWQDRDVYLQGPIWAKIPHTDGHFHPSPLMGGFGLKHPPPQILIKNTPVPANPSTTFSAAKFASFITQYSTGQVSVEIEWELQKENSKRWNPEIQYTSNYNKSVNVDFTVDTNGVYSEPRPIGTRYLTRNL

SEQ ID NO: 227 - DNA, 2208 bp, Artificial Sequence
  source: /note="Description of Artificial Sequence: Synthetic polynucleotide"
atggctgccgatggttatcttccagattggctcgaggacactctctctgaaggaataagacagtggtggaagctcaaacctggcccaccaccaccaaagcccgcagagcggcataaggacgacagcaggggtcttgtgcttcctgggtacaagtacctcggacccttcaacggactcgacaagggagagccggtcaacgaggcagacgccgcggccctcgagcacgacaaggcctacgaccggcagctcgacagcggagacaacccgtacctcaagtacaaccacgccgacgcggagtttcaggagcgtcttaaagaagatacgtcttttgggggcaacctcggacgagcagtcttccaggccaaaaagaggattcttgaacctctgggcctggttgaggaacctgttaagacggctccgggaaaaaagaggccggtagagcactctcctgcggagccagactcctcctcgggaaccggaaaagcgggccagcagcctgcaagaaagagattgaattttggtcagactggagacgcagactcagtacctgacccccagcctctcggacagccaccagcagccccctctggtctgggaactaatacgatggcttcaggcagtggcgcaccaatggcagacaataacgagggcgccgacggagtgggtaattcctcgggaaattggcattgcgattccacatggatgggcgacagagtcatcaccaccagcacccgcacctgggccctgcccacctgcaacaaccatctgtacaagcaaatctccagccagtctggagccagcaacgacaaccactactttggctacagcaccccctgggggtattttgacttcaacagattccactgccacttctccccacgtgactggcaaagactcatcaacaacaactggggattccggcccaagagactcagcttcaagctctttaacattcaagtcaaagaggtcacgcagaatgacggtacgacgacgattgccaataaccttaccagcacggttcaggtgtttactgactcggagtaccagctcccgtacgtcctcggctcggcgcatcaaggatgcctcccgccgttcccagcagacgtcttcatggtgccacagtatggatacctcaccctgaacaacggcagtcaggcggtaggacgctcttccttttactgcctggagtattttccttctcagatgcttcgtaccggaaacaactttaccttcagctacacctttgaagacgttcctttccatagcagctacgctcacagccaaagtctggaccgtctcatgaatcctctcatcgaccagtacctgtattacttgagcagaacaaacactccaagcggaaccaccacgatgtccaggcttcagttttctcaggccggagcaagtgacattcgggaccagtctagaaactggcttcctggaccctgttaccgccagcagcgagtatcaaagacagctgcggacaacaacaacagtgattactcgtggactggagctaccaagtaccacctcaatggaagagactctctggtgaatccgggcccagctatggccagccacaaggacgatgaagaaaaatattttcctcagagcggggttctcatctttggaaaacaagactcgggaaaaactaatgtggacattgaaaaggttatgattacagacgaagaggaaatcaggaccaccaatcccgtggctacggagcagtatggttctgtatctacctacctccagagcggcaacacacaagcagctacctcagatgtcaacacacaaggcgttcttccaggcatggtctggcaggacagagacgtgtacctgcgggggcccatctgggcaaagattccacacacggacggacattttcacccctctcccctcatgggcggatttggacttaaacaccctcctccacaaattctcatcaagaacaccccggtacctgcgaatccttcgaccactttcagtgcggcaaagtttgcttccttcatcacacagtactccacggggcaggtcagcgtggagatcgagtgggagctgcagaaggagaacagcaaacgctggaatcccgaaattcagtacacttccaactacaacaaatctgttaatgtggactttactgtggacactaatggtgtgtattcagagcctcgccccattggcaccagatacctgactcgtaatctgtaa

SEQ ID NO: 228 - protein, 735 aa, Artificial Sequence
  source: /note="Description of Artificial Sequence: Synthetic polypeptide"
MAADGYLPDWLEDTLSEGIRQWWKLKPGPPPPKPAERHKDDSRGLVLPGYKYLGPFNGLDKGEPVNEADAAALEHDKAYDRQLDSGDNPYLKYNHADAEFQERLKEDTSFGGNLGRAVFQAKKRILEPLGLVEEPVKTAPGKKRPVEHSPAEPDSSSGTGKAGQQPARKRLNFGQTGDADSVPDPQPLGQPPAAPSGLGTNTMASGSGAPMADNNEGADGVGNSSGNWHCDSTWMGDRVITTSTRTWALPTCNNHLYKQISSQSGASNDNHYFGYSTPWGYFDFNRFHCHFSPRDWQRLINNNWGFRPKRLSFKLFNIQVKEVTQNDGTTTIANNLTSTVQVFTDSEYQLPYVLGSAHQGCLPPFPADVFMVPQYGYLTLNNGSQAVGRSSFYCLEYFPSQMLRTGNNFTFSYTFEDVPFHSSYAHSQSLDRLMNPLIDQYLYYLSRTNTPSGTTTMSRLQFSQAGASDIRDQSRNWLPGPCYRQQRVSKTAADNNNSDYSWTGATKYHLNGRDSLVNPGPAMASHKDDEEKYFPQSGVLIFGKQDSGKTNVDIEKVMITDEEEIRTTNPVATEQYGSVSTYLQSGNTQAATSDVNTQGVLPGMVWQDRDVYLRGPIWAKIPHTDGHFHPSPLMGGFGLKHPPPQILIKNTPVPANPSTTFSAAKFASFITQYSTGQVSVEIEWELQKENSKRWNPEIQYTSNYNKSVNVDFTVDTNGVYSEPRPIGTRYLTRNL

SEQ ID NO: 229 - DNA, 2208 bp, Artificial Sequence; identical to SEQ ID NO: 223
  source: /note="Description of Artificial Sequence: Synthetic polynucleotide"

SEQ ID NO: 230 - protein, 735 aa, Artificial Sequence; identical to SEQ ID NO: 224
  source: /note="Description of Artificial Sequence: Synthetic polypeptide"

SEQ ID NO: 231 - DNA, 2208 bp, Artificial Sequence
  source: /note="Description of Artificial Sequence: Synthetic polynucleotide"
atggctgccgatggttatcttccagattggctcgaggacactctctctgaaggaataagacagtggtggaagctcaaacctggcccaccaccaccaaagcccgcagagcggcataaggacggcagcaggggtcttgtgcttcctgggtacaagtacctcggacccttcaacggactcgacaagggagagccggtcaacgaggcagacgccgcggccctcgagcacgacaaggcctacgaccggcagctcaacagcggagacaacccgtacctcaagtacaaccacgccgacgcggagtttcaggagcgccttaaagaagatacgtcttttgggggcaacctcggacgagcagtcttccaggcaaaaaagagggttcttgaacctctgggcctggttgaggagcctgttaaaacggctccgggaaaaaagagaccggtagagcactctcctgcggagccagactcctcctcgggaaccggaaaagcgggccagcagcctgcaagaaagagattgaattttggtcagactggagacgcagactccgtacctgacccccagcctctcggacagccaccagcagccccctctggtctgggatctactacaatggctacaggcagtggcgcaccaatggcagacaataacgagggtgccgatggagtgggtaattcctcaggaaattggcattgcgattcccaatggctgggcgacagagtcatcaccacaagcactcgaacctgggccctgcccacctacaacaaccacctctacaagcaaatctccagccaatcaggagcctcaaacgacaaccactattttggctacagcaccccttgggggtattttgacttcaacagattccactgccacttttcaccacgtgactggcaaagactcatcaacaacaactggggattccgacccaagagactcaacttcaagctctttaacattcaagtcaaagaggtcacgcagaatgacggtacgacgacgattgccaataaccttaccagcacggttcaggtgtttactgactcggagtaccagctcccgtacgtcctcggctcggcgcatcaaggatgcctcccgccgttcccagcggacgtcttcatggtcccacagtatggatacctcaccctgaacaacgggagtcaggcggtaggacgctctcccttttactgcctggagtactttccttctcagatgctgcgtactggaaacaactttcagttcagctacacttttgaagacgtgcctttccacagcagctacgctcacagccagagtctggatcggctgatgaatcctctgatcgaccagtacctgtattatctgaacaagacacaaacaaatagtggaactcttcagcagtctcggctactgtttagccaagctggacccaccaacatgtctcttcaagctaaaaactggctgcctggaccttgctacagacagcagcgtctgtcaaagcaggcaaacgacaacaacaacagcaactttccctggactgcagctacaaagtatcatctaaatggccgggactcgttggttaatccaggaccagctatggccagtcacaaggatgacgaagaaaagtttttccccatgcatggaaccctgatatttggtaaacaaggaacaaatgccaacgacgcggatttggaaaatgtcatgattacagatgaagaagaaatcaggaccaccaatcccgtggctacggagcagtacgggactgtgtcaaataatttgcaaaactcaaacactggtccaactactggaactgtcaatcaccaaggagcgttacctggtatggtgtggcaggatcgagatgtgtaccttcagggacccatttgggccaagattcctcacaccgatggacactttcatccttctccactgatgggaggttttggactcaaacacccgcctcctcagattatgatcaaaaacactcccgttccagccaatcctcctacaaacttcagttctgccaagtttgcttctttcatcacacagtattccacggggcaggtcagcgtggagatcgagtgggagctgcagaaggagaacagcaaacgctggaatcccgaaattcagtacacttccaactacaacaaatctgttaatgtggactttactgtggacaataatggcgtgtactcagagcctcgccccattggcaccagatacctgactcgtaatctgtaa

SEQ ID NO: 232 - protein, 735 aa, Artificial Sequence
  source: /note="Description of Artificial Sequence: Synthetic polypeptide"
MAADGYLPDWLEDTLSEGIRQWWKLKPGPPPPKPAERHKDGSRGLVLPGYKYLGPFNGLDKGEPVNEADAAALEHDKAYDRQLNSGDNPYLKYNHADAEFQERLKEDTSFGGNLGRAVFQAKKRVLEPLGLVEEPVKTAPGKKRPVEHSPAEPDSSSGTGKAGQQPARKRLNFGQTGDADSVPDPQPLGQPPAAPSGLGSTTMATGSGAPMADNNEGADGVGNSSGNWHCDSQWLGDRVITTSTRTWALPTYNNHLYKQISSQSGASNDNHYFGYSTPWGYFDFNRFHCHFSPRDWQRLINNNWGFRPKRLNFKLFNIQVKEVTQNDGTTTIANNLTSTVQVFTDSEYQLPYVLGSAHQGCLPPFPADVFMVPQYGYLTLNNGSQAVGRSPFYCLEYFPSQMLRTGNNFQFSYTFEDVPFHSSYAHSQSLDRLMNPLIDQYLYYLNKTQTNSGTLQQSRLLFSQAGPTNMSLQAKNWLPGPCYRQQRLSKQANDNNNSNFPWTAATKYHLNGRDSLVNPGPAMASHKDDEEKFFPMHGTLIFGKQGTNANDADLENVMITDEEEIRTTNPVATEQYGTVSNNLQNSNTGPTTGTVNHQGALPGMVWQDRDVYLQGPIWAKIPHTDGHFHPSPLMGGFGLKHPPPQIMIKNTPVPANPPTNFSSAKFASFITQYSTGQVSVEIEWELQKENSKRWNPEIQYTSNYNKSVNVDFTVDNNGVYSEPRPIGTRYLTRNL

SEQ ID NO: 233 - DNA, 2208 bp, Artificial Sequence
  source: /note="Description of Artificial Sequence: Synthetic polynucleotide"
atggctgccgatggttatcttccagattggctcgaggacactctctctgaaggaataagacagtggtggaagctcaaacctggcccaccaccaccaaagcccgcagagcggcataaggacgacagcaggggtcttgtgcttcctgggtacaagtacctcggacccttcaacggactcgacaagggagagccggtcaacgaggcagacgccgcggccctcgagcacgacaaggcctacgaccggcagctcgacagcggagacaacccgtacctcaagtacaaccacgccgacgcggagtttcaggagcgtcttaaagaagatacgtcttttgggggcaacctcggacgagcagtcttccaggccaaaaagaggattcttgaacctctgggcctggttgaggaacctgttaagacggctccgggaaaaaagaggccggtagagcactctcctgcggagccagactcctcctcgggaaccggaaaagcgggccagcagcctgcaagaaagagattgaattttggtcagactggagacgcagactcagtacctgacccccagcctctcggacagccaccagcagccccctctggtctgggaactaatacgatggcttcaggcagtggcgcaccaatggcagacaataacgagggcgccgacggagtgggtaattcctcgggaaattggcattgcgattccacatggatgggcgacagagtcatcaccaccagcacccgcacctgggccctgcccacctacaacaaccatctgtacaagcaaatctccagccagtctggagccagcaacgacaaccactactttggctacagcaccccctgggggtattttgacttcaacagattccactgccacttctccccacgtgactggcaaagactcatcaacaacaactggggattccggcccaagagactcagcttcaagctctttaacattcaagtcaaagaggtcacgcagaatgacggtacgacgacgattgccaataaccttaccagcacggttcaggtgtttactgactcggagtaccagctcccgtacgtcctcggctcggcgcatcaaggatgcctcccgccgttcccagcagacgtcttcatggtgccacagtatggatacctcaccctgaacaacggcagtcaggcggtaggacgctcttccttttactgcctggagtactttccttctcagatgcttcgtaccggaaacaactttaccttcagctacacctttgaagacgttcctttccatagcagctacgctcacagccaaagtctggaccgtctcatgaatcctctcatcgaccagtacctgtattacttgagcagaacaaacactccaagcggaaccaccacgatgtccaggcttcagttttctcaggccggagcaagtgacattcgggaccagtctagaaactggcttcctggaccctgttaccgccagcagcgagtatcaaagacagctgcggacaacaacaacagtgattactcgtggactggagctaccaagtaccacctcaatggaagagactctctggtgaatccgggcccagctatggccagccacaaggacgatgaagaaaaatattttcctcagagcggggttctcatctttggaaaacaagactcgggaaaaactaatgtggacattgaaaaggttatgattacagacgaagaggaaatcaggaccaccaatcccgtggctacggagcagtatggttctgtatctaccaacctccagagcggcaacacacaagcagctacctcagatgtcaacacacaaggcgttcttccaggcatggtctggcaggacagagacgtgtacctgcaggggcccatctgggcaaagattccacacacggacggacattttcacccctctcccctcatgggcggattcggacttaaacaccctcctccacaaattctcatcaagaacaccccggtacctgcgaatccttcgaccactttcagtgcggcaaagtttgcttccttcatcacacagtactccacggggcaggtcagcgtggagatcgagtgggagctgcagaaggagaacagcaaacgctggaatcccgaaattcagtacacttccaactacaacaaatctgttaatgtggactttactgtggacactaatggtgtgtattcagagcctcgccccattggcaccagatacctgactcgtaatctgtaa

SEQ ID NO: 234 - protein, 735 aa, Artificial Sequence
  source: /note="Description of Artificial Sequence: Synthetic polypeptide"
MAADGYLPDWLEDTLSEGIRQWWKLKPGPPPPKPAERHKDDSRGLVLPGYKYLGPFNGLDKGEPVNEADAAALEHDKAYDRQLDSGDNPYLKYNHADAEFQERLKEDTSFGGNLGRAVFQAKKRILEPLGLVEEPVKTAPGKKRPVEHSPAEPDSSSGTGKAGQQPARKRLNFGQTGDADSVPDPQPLGQPPAAPSGLGTNTMASGSGAPMADNNEGADGVGNSSGNWHCDSTWMGDRVITTSTRTWALPTYNNHLYKQISSQSGASNDNHYFGYSTPWGYFDFNRFHCHFSPRDWQRLINNNWGFRPKRLSFKLFNIQVKEVTQNDGTTTIANNLTSTVQVFTDSEYQLPYVLGSAHQGCLPPFPADVFMVPQYGYLTLNNGSQAVGRSSFYCLEYFPSQMLRTGNNFTFSYTFEDVPFHSSYAHSQSLDRLMNPLIDQYLYYLSRTNTPSGTTTMSRLQFSQAGASDIRDQSRNWLPGPCYRQQRVSKTAADNNNSDYSWTGATKYHLNGRDSLVNPGPAMASHKDDEEKYFPQSGVLIFGKQDSGKTNVDIEKVMITDEEEIRTTNPVATEQYGSVSTNLQSGNTQAATSDVNTQGVLPGMVWQDRDVYLQGPIWAKIPHTDGHFHPSPLMGGFGLKHPPPQILIKNTPVPANPSTTFSAAKFASFITQYSTGQVSVEIEWELQKENSKRWNPEIQYTSNYNKSVNVDFTVDTNGVYSEPRPIGTRYLTRNL

SEQ ID NO: 235 - DNA, 2208 bp, Artificial Sequence
  source: /note="Description of Artificial Sequence: Synthetic polynucleotide"
atggctgccgatggttatcttccagattggctcgaggacactctctctgaaggaataagacagtggtggaagctcaaacctggcccaccaccaccaaagcccgcagagcggcataaggacgacagcaggggtcttgtgcttcctgggtacaagtacctcggacccttcaacggactcgacaagggagagccggtcaacgaggcagacgccgcggccctcgagcacgacaaggcctacgaccggcagctcgacagcggagacaacccgtacctcaagtacaaccacgccgacgcggagtttcaggagcgtcttaaagaagatacgtcttttgggggcaacctcggacgagcagtcttccaggccaaaaagaggattcttgaacctctgggcctggttgaggaacctgttaagacggctccgggaaaaaagaggccggtagagcactctcctgcggagccagactcctcctcgggaaccggaaaagcgggccagcagcctgcaagaaagagattgaattttggtcagactggagacgcagactcagtacctgacccccagcctctcggacagccaccagcagccccctctggtctgggaactaatacgatggcttcaggcagtggcgcaccaatggcagacaataacgagggcgccgacggagtgggtaattcctcgggaaattggcattgcgattccacatggatgggcgacagagtcatcaccaccagcacccgcacctgggccctgcccacctacaacaaccatctgtacaagcaaatctccagccagtctggagccagcaacgacaaccactactttggctacagcaccccctgggggtatttcgacttcaacagattccactgccacttctccccacgtgactggcaaagactcatcaacaacaactggggattccggcccaagagactcagcttcaagctctttaacattcaagtcaaagaggtcacgcagaatgacggtacgacgacgattgccaataaccttaccagcacggttcaggtgtttactgactcggggtaccagctcccgtacgtcctcggctcggcgcatcaaggatgccttccgccgttcccagcagacgtcttcatggtgccacagtatggatacctcaccctgaacaacggcagtcaggcggtaggacgctcttccttttactgcctggagtactttccttctcagatgcttcgtaccggaaacaactttaccttcagctacacctttgaagacgttcctttccatagcagctacgctcacggccaaagtctggaccgtctcatgaatcctctcatcgaccagtacctgtattacttgagcagaacaaacactccaagcggaaccaccacgatgtccaggcttcagttttctcaggccggagcaagtgacgttcgggaccagtctagaaactggcttcctggaccctgttaccgccagcagcgagtatcaaagacagctgcggacaacaacaacagtgattactcgtggactggagctaccaagtaccacctcaatggaagagactctctggtgaatccgggcccagctatggccagccacaaggacgatgaagaaaaatattttcctcagagcggggttctcgtctttggaaaacaagactcgggaaaaactaatgtggacattgaaaaggttatgattacagacgaagaggaaatcaggaccaccaatcccgcggctacggagcagtatggttctgtatctaccaacctccagagcggcaacacacaagcagctacctcagatgtcaacacacaaggcgttcttccaggcatggtctggcaggacagagacgtgtacctgcaggggcccatctgggcaaagattccacacacggacggacattttcacccctctcccctcatgggcggattcggacttaaacaccctcctccacaaattctcatcaagaacaccccggtacctgcgaatccttcgaccactttcagtgcggcaaagtttgtttccttcatcacacagtactccacggggcaggtcagcgtggagatcgagtgggagctgcagaaggagaacagcaaacgctggaatcccgaaattcagtacacttccaactacaacaaatctgttaatgtggactttactgtggacactaatggtgtgtattcagagcctcgccccattggcaccagatacctgactcgtaatctgtaa

SEQ ID NO: 236 - protein, 735 aa, Artificial Sequence
  source: /note="Description of Artificial Sequence: Synthetic polypeptide"
MAADGYLPDWLEDTLSEGIRQWWKLKPGPPPPKPAERHKDDSRGLVLPGYKYLGPFNGLDKGEPVNEADAAALEHDKAYDRQLDSGDNPYLKYNHADAEFQERLKEDTSFGGNLGRAVFQAKKRILEPLGLVEEPVKTAPGKKRPVEHSPAEPDSSSGTGKAGQQPARKRLNFGQTGDADSVPDPQPLGQPPAAPSGLGTNTMASGSGAPMADNNEGADGVGNSSGNWHCDSTWMGDRVITTSTRTWALPTYNNHLYKQISSQSGASNDNHYFGYSTPWGYFDFNRFHCHFSPRDWQRLINNNWGFRPKRLSFKLFNIQVKEVTQNDGTTTIANNLTSTVQVFTDSGYQLPYVLGSAHQGCLPPFPADVFMVPQYGYLTLNNGSQAVGRSSFYCLEYFPSQMLRTGNNFTFSYTFEDVPFHSSYAHGQSLDRLMNPLIDQYLYYLSRTNTPSGTTTMSRLQFSQAGASDVRDQSRNWLPGPCYRQQRVSKTAADNNNSDYSWTGATKYHLNGRDSLVNPGPAMASHKDDEEKYFPQSGVLVFGKQDSGKTNVDIEKVMITDEEEIRTTNPAATEQYGSVSTNLQSGNTQAATSDVNTQGVLPGMVWQDRDVYLQGPIWAKIPHTDGHFHPSPLMGGFGLKHPPPQILIKNTPVPANPSTTFSAAKFVSFITQYSTGQVSVEIEWELQKENSKRWNPEIQYTSNYNKSVNVDFTVDTNGVYSEPRPIGTRYLTRNL

SEQ ID NO: 237 - DNA, 2208 bp, Artificial Sequence
  source: /note="Description of Artificial Sequence: Synthetic polynucleotide"
atggctgccgatggttatcttccagattggctcgaggacactctctctgaaggaataagacagtggtggaaactcaaacctggcccaccaccaccaaagcccgcagagcggcataaggacgacagcaggggtcttgtgcttcctgggtacaagtacctcggacccttcaacggactcgacaagggagagccggtcaacgaggcagacgccgcggccctcgagcacgacaaggcctacgaccggcagctcgacagcggagacaacccgtacctcaagtacaaccacgccgacgcggagtttcaggagcgccttaaagaagatacgtcttttgggggcaacctcggacgagcagtcttccaggcaaaaaagagggttctggaacctctgagcctggttgaggagcctgttaagacggctccgggaaaaaagaggccggtagagcactctcccgcagagccagattcctcctccggaactggaaagtcgggcaaccagcctgcaagaaagagattgaatttcggtcagactggagactcagactccgtacctgacccccagcctctcggacagccaccagcagccccctctggtctgggaactaatacgatggctacaggcagtggcgcaccaatggcagacaataacgagggcgccgacggagtgggtaattcctcgggaaattggcattgcgattccacatggatgggcgacagagtcatcaccaccagcacccgaacctgggccctgcccacctacaacaaccatctgtacaagcaaatatccagccagtctggagccagcaacgacaatcactactttggctacagcaccccctgggggtattttgacttcaacagattccactgccacttttcaccacgtgactggcaaagactcatcaacaacaactggggattccgacccaagagactcaacttcaagctctttaacattcaagtcaaagaggtcacgcagaatgacggtacgacgacgattgccaataaccttaccagcacggttcaggtgtttactgactcggagtaccagctcccgtacgtcctcggctcggcgcatcaaggatgcctcccgccgttcccagcagacgtcttcatggtgccacagtatggatacctcaccctgaacaacgggagtcaggcagtaggacgctcttcattttactgcctagagtactttccttctcagatgctgcgtaccggaaacaactttaccttcagctacacctttgaggacgttcctttccacagcagctacgctcacagccagagtttggaccgtctcatgaatcctctcatcgaccagtacctgtattacttgagcagaacaaacactccaagcggaaccaccacgcagtccaggcttcagttttctcaggccggagcgagtgacattcaggaccagtctaggaactggcttcctggaccctgttaccgtcagcagcgagtatcaaagacatctgcggataacaacaacagtgaatactcgtggactggagctaccaagtaccacctcaatggcagagactctctggtgaatccgggcccggccatggccagccacaaagacgatgaagaaaagttttttcctcagagcggggttcttatctttgggaagcaaggctcagagaaaacaaatgtggatattgaaaaggtcatgattacagacgaagaggaaatcaggaccaccaatcccgtggctacggagcagtatggttctgtatctaccaacctccagagcggcaacacacaagcagctaccgcagatgtcaacacacaaggcgttcttccaggcatggtcgggcaagacagagacgtgtacctgcaggggcctacttgggcaaagattccacacacggacggacattttcacccctctcccctcatgggcggatttggacttaaacaccctcctccacagattctcatcaagaacaccccggtacctgcgaatccttcgaccaccttcagtgcggcaaagtttgcttccttcattacacagtactccacggggcaggtcagcgtggagatcgagtgggagctgcagaaggagaacagcaaacgctggaatcccgagatccagtacacttccaactacaacaagtctgttaatgtggactttactgtggacactaatggcgtgtattcagagcctcgccccattggcaccagatacctgactcgtaatctgtaa

SEQ ID NO: 238 - protein, 735 aa, Artificial Sequence
  source: /note="Description of Artificial Sequence: Synthetic polypeptide"
MAADGYLPDWLEDTLSEGIRQWWKLKPGPPPPKPAERHKDDSRGLVLPGYKYLGPFNGLDKGEPVNEADAAALEHDKAYDRQLDSGDNPYLKYNHADAEFQERLKEDTSFGGNLGRAVFQAKKRVLEPLSLVEEPVKTAPGKKRPVEHSPAEPDSSSGTGKSGNQPARKRLNFGQTGDSDSVPDPQPLGQPPAAPSGLGTNTMATGSGAPMADNNEGADGVGNSSGNWHCDSTWMGDRVITTSTRTWALPTYNNHLYKQISSQSGASNDNHYFGYSTPWGYFDFNRFHCHFSPRDWQRLINNNWGFRPKRLNFKLFNIQVKEVTQNDGTTTIANNLTSTVQVFTDSEYQLPYVLGSAHQGCLPPFPADVFMVPQYGYLTLNNGSQAVGRSSFYCLEYFPSQMLRTGNNFTFSYTFEDVPFHSSYAHSQSLDRLMNPLIDQYLYYLSRTNTPSGTTTQSRLQFSQAGASDIQDQSRNWLPGPCYRQQRVSKTSADNNNSEYSWTGATKYHLNGRDSLVNPGPAMASHKDDEEKFFPQSGVLIFGKQGSEKTNVDIEKVMITDEEEIRTTNPVATEQYGSVSTNLQSGNTQAATADVNTQGVLPGMVGQDRDVYLQGPTWAKIPHTDGHFHPSPLMGGFGLKHPPPQILIKNTPVPANPSTTFSAAKFASFITQYSTGQVSVEIEWELQKENSKRWNPEIQYTSNYNKSVNVDFTVDTNGVYSEPRPIGTRYLTRNL

SEQ ID NO: 239 - DNA, 2208 bp, Artificial Sequence
  source: /note="Description of Artificial Sequence: Synthetic polynucleotide"
atggctgccgatggttatcttccagattggctcgaggacactctctctgaaggaataagacagtggtggaagctcaaacctggcccaccaccaccaaagcccgcagagcggcataaggacgacagcaggggtcttgtgcttcctgggtacaagtacctcggacccttcaacggactcgacaagggagagccggtcaacgaggcagacgccgcggccctcgagcacgacaaggcctacgaccggcagctcgacagcggagacaacccgtacctcaagtacaaccacgccgacgcagagtttcaggagcgccttaaagaagatacgtcttttgggggcaacctcggacgagcagtcttccaggcaaaaaagagggttctggaacctctgggcctggttgaggagcctgttaagacggctccgggaaaaaagaggccggtagagcactctcctgcagagccagattcctcctccggaactggaaagtcgggcaaccagcctgcaagaaagagattgaatttcggtcagactggagactcagactccgtacctgacccccagcctctcggacagccaccagcagccccctctggtctgggaactaatacgatggctacaggcagtggcgcaccaatggcagacaataacgagggcgccgacggagtgggtaattcctcgggaaattggcattgcgattccacatggatgggcgacagagtcatcaccaccagcacccgaacctgggccctgcccacctacaacaaccatctgtacaagcaaatatccagccagtctggagccagcaacgacaatcactactttggctacagcaccccctgggggtattttgacttcaacagattccactgccacttttcaccacgtgactggcaaagactcatcaacaacaactggggattccgacccaagagactcaacttcaagctctttaacattcaagtcaaagaggtcacgcagaatgacggtacgacgacgattgccaataaccttaccagcacggttcaggtgtttactgactcggagtaccagctcccgtacgtcctcggctcggcgcatcaaggatgcctcccgccgttcccagcagacgtcttcatggtgccacagtatggatacctcaccctgaacaacgggagtcaggcagtaggacgctcttcattttactgcctagggtactttccttctcagatgctgcgtaccggaaacaactttaccttcagctacacctttgaggacgttcctttccacagcagctacgctcacagccagagtttggaccgtctcatgaatcctctcatcgaccagtacctgtattacttgagcagaacaaacactccaagcggaaccaccacgcagtccaggcttcagttttctcaggccggagcgagtgacattcgggaccagtctaggaactggcttcctggaccctgttaccgtcagcagcgagtatcaaagacatctgcggataacaacaacagtgaatactcgtggactggagctaccaagtaccacctcaatggcagagactctctggtgaatccgggcccggccatggccagccacaaagacgatgaagaaaagttttttcctcagagcggggttcttatctttgggaagcaaggcccagagaaaacaaatgtggatattgaaaaggtcatgattacagacgaagaggaaatcaggaccaccaatcccgtggctacggagcagtatggttctgtatctaccaacctccagagcggcaacacacaagcagctaccgcagatgtcaacacacaaggcgttcttccaggcatggtctggcaagacagagacgtgtacctgcaggggcctatttgggcaaagattccacacacggacggacattttcacccctctcccctcatgggcggatttggacttaaacaccctcctccacagattctcatcaagaacaccccggtacctgcgaatccttcgaccaccttcagtgcggcaaagtttgcttccttcattacacagtactccacggggcaggtcagcgtggagatcgagtgggagctgcagaaggagaacagcaaacgctggaatcccgagatccagtacacttccaactacaacaagtctgttaatgtggactttactgtggacactaatggcgtgtattcagagcctcgccccattggcaccagatacctgactcgtaatctgtaa

SEQ ID NO: 240 - protein, 735 aa, Artificial Sequence
  source: /note="Description of Artificial Sequence: Synthetic polypeptide"
MAADGYLPDWLEDTLSEGIRQWWKLKPGPPPPKPAERHKDDSRGLVLPGYKYLGPFNGLDKGEPVNEADAAALEHDKAYDRQLDSGDNPYLKYNHADAEFQERLKEDTSFGGNLGRAVFQAKKRVLEPLGLVEEPVKTAPGKKRPVEHSPAEPDSSSGTGKSGNQPARKRLNFGQTGDSDSVPDPQPLGQPPAAPSGLGTNTMATGSGAPMADNNEGADGVGNSSGNWHCDSTWMGDRVITTSTRTWALPTYNNHLYKQISSQSGASNDNHYFGYSTPWGYFDFNRFHCHFSPRDWQRLINNNWGFRPKRLNFKLFNIQVKEVTQNDGTTTIANNLTSTVQVFTDSEYQLPYVLGSAHQGCLPPFPADVFMVPQYGYLTLNNGSQAVGRSSFYCLGYFPSQMLRTGNNFTFSYTFEDVPFHSSYAHSQSLDRLMNPLIDQYLYYLSRTNTPSGTTTQSRLQFSQAGASDIRDQSRNWLPGPCYRQQRVSKTSADNNNSEYSWTGATKYHLNGRDSLVNPGPAMASHKDDEEKFFPQSGVLIFGKQGPEKTNVDIEKVMITDEEEIRTTNPVATEQYGSVSTNLQSGNTQAATADVNTQGVLPGMVWQDRDVYLQGPIWAKIPHTDGHFHPSPLMGGFGLKHPPPQILIKNTPVPANPSTTFSAAKFASFITQYSTGQVSVEIEWELQKENSKRWNPEIQYTSNYNKSVNVDFTVDTNGVYSEPRPIGTRYLTRNL

SEQ ID NO: 241 - protein, 735 aa, Artificial Sequence
  source: /note="Description of Artificial Sequence: Synthetic polypeptide"
MAADGYLPDWLEDTLSEGIRQWWKLKPGPPPPKPAERHKDDSRGLVLPGYKYLGPFNGLDKGEPVNEADAAALEHDKAYDRQLDSGDNPYLKYNHADAEFQERLKEDTSFGGNLGRAVFQAKKRVLEPLGLVEEPVKTAPGKKRPVEHSPAEPDSSSGTGKSGNQPARKRLNFGQTGDSDSVPDPQPLGQPPAAPSGLGTNTMATGSGAPMADNNEGADGVGNSSGNWHCDSTWMGDRVITTSTRTWALPTYNNHLYKQISSQSGASNDNHYFGYSTPWGYFDFNRFHCHFSPRDWQRLINNNWGFRPKRLNFKLFNIQVKEVTQNDGTTTIANNLTSTVQVFTDSEYQLPYVLGSAHQGCLPPFPADVFMVPQYGYLTLNNGSQAVGRSSFYCLEYFPSQMLRTGNNFTFSYTFEDVPFHSSYAHSQSLDRLMNPLIDQYLYYLSRTNTPSGTTTQSRLQFSQAGASDIRDQSRNWLPGPCYRQQRVSKTSADNNNSEYSWTGATKYHLNGRDSLVNPGPAMASHKDDEEKFFPQSGVLIFGKQGPEKTNVDIEKVMITDEEEIRTTNPVATEQYGSVSTNLQSGNTQAATADVNTQGVLPGMVWQDRDVYLQGPIWAKIPHTDGHFHPSPLMGGFGLKHPPPQILIKNTPVPANPSTTFSAAKFASFITQYSTGQVSVEIEWELQKENSKRWNPEIQYTSNYNKSVNVDFTVDTNGVYSEPRPIGTRYLTRNL

SEQ ID NO: 242 - protein, 735 aa, Artificial Sequence; identical to SEQ ID NO: 241
  source: /note="Description of Artificial Sequence: Synthetic polypeptide"

SEQ ID NO: 243 - DNA, 2211 bp, Artificial Sequence
  source: /note="Description of Artificial Sequence: Synthetic polynucleotide"
atggctgccgatggttatcttccagattggctcgaggacactctctctgaaggaataagacagtggtggaagctcaaacctggcccaccaccaccaaagcccgcagagcggcataaggacgacagcaggggtcttgtgcttcctgggtacaagtacctcggacccttcaacggactcgacaagggggagccggtcaacgaggcagacgccgcggccctcgagcacgacaaggcctacgaccggcagctcgacagcggagacaacccgtacctcaagtacaaccacgccgacgcagagtttcaggagcgccttaaagaagatacgtcttttgggggcaacctcggacgagcagtcttccaggcgaaaaagagggttcttgaacctctgcggcctggtttgaggaaacctgttaagacggctccgggaaaaaagaggccggtagagcactctcctgtggagccagactcctcctcgggaaccggaaaagcgggccagcagcctgcaagaaaaagattaaattttggtcagactggagacgcagactccgtacctgacccccagcctctcggacagccaccagcagccccctctggtctgggatctactacaatggctacaggcagtggcgcaccaatggcagacaataacgagggtgccgatggagtgggtaattcctcaggaaattggcattgcgattcccaatggctggacgacagagtcatcgccaccagcacccgaacctgggccctgcccacatacaacaaccacctctacaagcaaatctccagccaatcaggagcctgcaacgacaaccactactttggctacagcaccccctgggggtattttgacttcaacagattccactgccacttttcaccacgtgactggcaaagactcatcaacagcaactggggattccggcccaaaagactcaacttcaagctctttaatattcaagtcaaagaggtcacgcagaatgacggtacgacgacgattgccaataaccttaccagcacggttcaggtgtttactgactcggagtaccagctcccgtacgtcccgggctcggcgcatcaaggatgcctcccgccgtttccagcggacgtcttcatggtcccacagtatggatacctcaccctgaacaacgggagtcaggcggtaggacgctcttccttttactgcctggagtactttccttctcagatgctgcgtactggaaacaactttcagttcagctacacttttgaagacgtgcctttccacagcagctacgctcactgccagagtctggatcggctgatgaatcctctgatcgaccagtacctgtattatctgaacaagacacaaacaaatagtggaactcttcagcagtctcggctactgtttagccaagctggaccaaccaacatgtctcttcaagctaaaaactggctgcctggaccttgctacagacagcagcgtctgtcaaaacaggcaaacgacaataacaactgcaactttccctggactgcagctacaaagtatcatctaaatggccgggactcgttggttaatccaggaccagctatggccagtcacaaggatgacgaagaaaagtttttccccatgcatggaaccctgatatttggtaaacaaggaacaaatgccaacgacgcggatttggaaaatgtcatgattacagatgaagaagaaatcaggcccaccaatcccgtggctacggagcagtacgggactgtgtcaaataatttgcaaaactcaaacactggtccaactacaggaactgtcaatcaccaaggagcgttacctggtatggtgtggcaggatcgagacgtgtacctgcagggacccatttgggccaagattcctcacaccgatggacactttcatccttctccactgatgggaggttttggactcaaacacccgcctcctcagatcatgatcaaaagcactcccgttccagccaatcctcccacaaacttcagttctgccaagtttgcttcttccatcacacagtattccacgggacaggtcagcgtggagatcgagtgggagctgcagaaggagaacagcaaacgctggaatcccgaaattcagtacacttccaactacaacaagtctgttaatgtggactttactgtggacactaatggtgtgtattcagagcctcgccccattggcaccagatacctgactcgtaatctgtaa

SEQ ID NO: 244 - protein, 736 aa, Artificial Sequence
  source: /note="Description of Artificial Sequence: Synthetic polypeptide"
MAADGYLPDWLEDTLSEGIRQWWKLKPGPPPPKPAERHKDDSRGLVLPGYKYLGPFNGLDKGEPVNEADAAALEHDKAYDRQLDSGDNPYLKYNHADAEFQERLKEDTSFGGNLGRAVFQAKKRVLEPLRPGLRKPVKTAPGKKRPVEHSPVEPDSSSGTGKAGQQPARKRLNFGQTGDADSVPDPQPLGQPPAAPSGLGSTTMATGSGAPMADNNEGADGVGNSSGNWHCDSQWLDDRVIATSTRTWALPTYNNHLYKQISSQSGACNDNHYFGYSTPWGYFDFNRFHCHFSPRDWQRLINSNWGFRPKRLNFKLFNIQVKEVTQNDGTTTIANNLTSTVQVFTDSEYQLPYVPGSAHQGCLPPFPADVFMVPQYGYLTLNNGSQAVGRSSFYCLEYFPSQMLRTGNNFQFSYTFEDVPFHSSYAHCQSLDRLMNPLIDQYLYYLNKTQTNSGTLQQSRLLFSQAGPTNMSLQAKNWLPGPCYRQQRLSKQANDNNNCNFPWTAATKYHLNGRDSLVNPGPAMASHKDDEEKFFPMHGTLIFGKQGTNANDADLENVMITDEEEIRPTNPVATEQYGTVSNNLQNSNTGPTTGTVNHQGALPGMVWQDRDVYLQGPIWAKIPHTDGHFHPSPLMGGFGLKHPPPQIMIKSTPVPANPPTNFSSAKFASSITQYSTGQVSVEIEWELQKENSKRWNPEIQYTSNYNKSVNVDFTVDTNGVYSEPRPIGTRYLTRNL

SEQ ID NO: 245 - DNA, 2208 bp, Artificial Sequence
  source: /note="Description of Artificial Sequence: Synthetic polynucleotide"
atggctgccgatggttatcttccagattggctcgaggacactctctctgaaggaataagacagtggtggaagctcaaacctggcccaccaccaccaaagcccgcagagcggcataaggacgacagcaggggtcttgtgcttcctgggtacaagtacctcggacccttcaacggactcgacaagggagagccggtcaacgaggcagacgccgcggccctcgagcacgacaaggcctacgaccggcagctcgacagcggagacaacccgtacctcaagtacaaccacgccgacgcggagtttcaggagcgccttaaagaggatacgtcttttgggggcaacctcggacgagcagtcttccaggcaaaaaagagggttctggaacctctgggcctggttgaggagcctgttaagacggctccgggaaaaaagaggccggtagagcactctcctgcagagccagattcctcctccggaactggaaagtcgggcaaccagcctgcaagaaagagattgaatttcggtcagactggagactcagactccgtacctgacccccagcctctcggacagccaccagcagccccctctggtctgggaactaatacgatggctacaggcagtggcgcaccaatggcagacaataacgagggcgccgacggagtgggtaattcctcgggaaattggcattgcgattccacatggatgggcgacagagtcatcaccaccagcacccgaacctgggccctgcccacctacaacaaccatctgtacaagcaaatatccagccagtctggagccagcaacgacaatcactactttggctacagcaccccctgggggtattttgacttcaacagattccactgccacttttcaccacgtgactggcaaagactcatcaacaacaactggggattccgacccaagagactcaacttcaagctctttaacattcaagtcaaagaggtcacgcagaatgacggtacgacgacgattgccaataaccttaccagcacggttcaggtgtttactgactcggagtaccagctcccgtacgtcctcggctcggcgcatcaaggatgcctcccgccgttcccagcagacgtcttcatggtgccacagtatggatacctcaccctgaacaacgggagtcaggcagtaggacgctcttcattttactgcctagagtactttccttctcagatgctgcgtaccggaaacagctttaccttcagctacacctttgaggacgttcctttccacagcagctacgctcacagccagagtttggaccgtctcatgaatcctctcatcgaccagtacctgtattacttgagcagaacaaacactccaagcggaaccaccacgcagtccaggcttcagttttctcaggccggagcgagtgacattcgggaccagtctaggaactggcttcctggaccctgttaccgtcagcagcgagtatcaaagacatctgcggataacaacaacagtgaatactcgtggactggagctaccaagtaccacctcaatggcagagactctctggtgaatccgggcccggccatggccagccacaaagacgatgaagaaaagttctttcctcagagcggggttcttatctttgggaagcaaggctcagagaaaacaaatgtggatattgaaaaggtcatgattacagacgaagaggaaatcaggaccaccaatcccgtggctacggagcagtatggttctgtatctaccaacctccagagcggcaacacacaagcagctaccgcagatgtcaacacacaaggcgttcttccaggcatggtctggcaagacagagacgtgtacctgcaggggcctatttgggcaaagattccacacacggacggacattttcacccctctcccctcatgggcggatttggacttaaacaccctcctccacagattctcatcaagaacaccccggtacctgcgaatccttcgaccaccttcagtgcggcaaagtttgcttccttcattacacagtactccacggggcaggtcagcgtggagatcgagtgggagctgcagaaggagaacagcaaacgctggaatcccgagatccagtacacttccaactacaacaagtctgttaatgtggactttactgtggacactaatggcgtgtattcagagcctcgccccattggcaccagatacctgactcgtaatctgtaa

SEQ ID NO: 246 - protein, 735 aa, Artificial Sequence
  source: /note="Description of Artificial Sequence: Synthetic polypeptide"
MAADGYLPDWLEDTLSEGIRQWWKLKPGPPPPKPAERHKDDSRGLVLPGYKYLGPFNGLDKGEPVNEADAAALEHDKAYDRQLDSGDNPYLKYNHADAEFQERLKEDTSFGGNLGRAVFQAKKRVLEPLGLVEEPVKTAPGKKRPVEHSPAEPDSSSGTGKSGNQPARKRLNFGQTGDSDSVPDPQPLGQPPAAPSGLGTNTMATGSGAPMADNNEGADGVGNSSGNWHCDSTWMGDRVITTSTRTWALPTYNNHLYKQISSQSGASNDNHYFGYSTPWGYFDFNRFHCHFSPRDWQRLINNNWGFRPKRLNFKLFNIQVKEVTQNDGTTTIANNLTSTVQVFTDSEYQLPYVLGSAHQGCLPPFPADVFMVPQYGYLTLNNGSQAVGRSSFYCLEYFPSQMLRTGNSFTFSYTFEDVPFHSSYAHSQSLDRLMNPLIDQYLYYLSRTNTPSGTTTQSRLQFSQAGASDIRDQSRNWLPGPCYRQQRVSKTSADNNNSEYSWTGATKYHLNGRDSLVNPGPAMASHKDDEEKFFPQSGVLIFGKQGSEKTNVDIEKVMITDEEEIRTTNPVATEQYGSVSTNLQSGNTQAATADVNTQGVLPGMVWQDRDVYLQGPIWAKIPHTDGHFHPSPLMGGFGLKHPPPQILIKNTPVPANPSTTFSAAKFASFITQYSTGQVSVEIEWELQKENSKRWNPEIQYTSNYNKSVNVDFTVDTNGVYSEPRPIGTRYLTRNL

SEQ ID NO: 247 - DNA, 2211 bp, Artificial Sequence; identical to SEQ ID NO: 137
  source: /note="Description of Artificial Sequence: Synthetic polynucleotide"

SEQ ID NO: 248 - protein, 736 aa, Artificial Sequence
  source: /note="Description of Artificial Sequence: Synthetic polypeptide"
MAADGYLPDWLEDTLSEGIRQWWKLKPGPPPPKPAERHKDDSRGLVLPGYKYLGPGNGLDKGEPVNAADAAALEHDKAYDQQLKAGDNPYLKYNHADAEFQERLKEDTSFGGNLGRAVFQAKKRLLEPLGLVEEAAKTAPGKKRPVEQSPQEPDSSAGIGKSGSQPAKKKLNFGQTGDTESVPDPQPIGEPPAAPSGVGSLTMASGGGAPVADNNEGADGVGSSSGNWHCDSQWLGDRVITTSTRTWALPTYNNHLYKQISNSTSGGSSNDNAYFGYSTPWGYFDFNRFHCHFSPRDWQRLINNNWGFRPKRLNFKLFNIQVKEVTDNNGVKTIANNLTSTVQVFTDSDYQLPYVLGSAHEGCLPPFPADVFMIPQYGYLTLNDGGQAVGRSSFYCLEYFPSQMLRTGNNFQFSYEFENVPFHSSYAHSQSLDRLMNPLIDQYLYYLSKTINGSGQNQQTLKFSVAGPSNMAVQGRNYIPGPSYRQQRVSTTVTQNNNSEFAWPGASSWALNGRNSLMNPGPAMASHKEGEDRFFPLSGSLIFGKQGTGRDNVDADKVMITNEEEIKTTNPVATESYGQVATNHQSAQAQAQTGWVQNQGILPGMVWQDRDVYLQGPIWAKIPHTDGNFHPSPLMGGFGMKHPPPQILIKNTPVPADPPTAFNKDKLNSFITQYSTGQVSVEIEWELQKENSKRWNPEIQYTSNYYKSNNVEFAVSTEGVYSEPRPIGTRYLTRNL

SEQ ID NO: 249 - DNA, 2211 bp, Artificial Sequence
  source: /note="Description of Artificial Sequence: Synthetic polynucleotide"
atggctgccgatggttatcttccagattggctcgaggacactctctctgaaggaataagacagtggtggaagctcaaacctggcccaccaccaccaaagcccgcagagcggcataaggacgacagcaggggtcttgtgcttcctgggtacaagtacctcggacccggcaacggactcgacaagggggagccggtcaacgcagcagacgcggcggccctcgagcacgacaaggcctacgaccagcagctcaaggccggagacaacccgtacctcaagtacaaccacgccgacgccgagttccaggagcggctcaaagaagatacgtcttttgggggcaacctcgggcgagcagtcttccaggccaaaaagaggcttcttgaacctcttggtctggttgaggaagcggctaagacggctcctggaaagaagaggcctgtagagcagtctcctcaggaaccggactcctccgcgggtattggcaaatcgggttcacagcccgctaaaaagaaactcaatttcggtcagactggcgacacagagtcagtccccgaccctcaaccaatcggagaacctcccgcagccccctcaggtgtgggatctcttacaatggcttcaggtggtggcgcaccagtggcagacaataacgaaggtgccgatggagtgggtagttcctcgggaaattggcattgcgattcccaatggctgggggacagagtcatcaccaccagcacccgaacctgggccctgcccacctacaacaatcacctctacaagcaaatctccaacagcacatctggaggatcttcaaatgacaacgcctacttcggctacagcaccccctgggggtattttgacttcaacagattccactgccacttctcaccacgtgactggcagcgactcatcaacaacaactggggattccggcctaagcgactcaacttcaagctcttcaacattcaggtcaaagaggttacggacaacaatggagtcaagaccatcgccaataaccttaccagcacggtccaggtcttcacggactcagactatcagctcccgtacgtgctcgggtcggctcacgagggctgcctcccgccgttcccagcggacgttttcatgattcctcagtacgggtatctgacgcttaatgatgggagccaggccgtgggtcgttcgtccttttactgcctggaatatttcccgtcgcaaatgctaagaacgggtaacaacttccagttcagctacgagtttgagaacgtacctttccatagcagctacgctcacagccaaagcctggaccgactaatgaatccactcatcgaccaatacttgtactatctctcaaagactattaacggttctggacagaatcaacaaacgctaaaattcagcgtggccggacccagcaacatggctgtccagggaagaaactacatacctggacccagctaccgacaacaacgtgtctcaaccactgtgactcaaaacaacaacagcgaatttgcttggcctggagcttcttcttgggctctcaatggacgtaatagcttgatgaatcctggacctgctatggccagccacaaagaaggagaggaccgtttctttcctttgtctggatctttaatttttggcaaacaaggaactggaagagacaacgtggatgcggacaaagtcatgataaccaacgaagaagaaattaaaactactaacccggtagcaacggagtcctatggacaagtggccacaaaccaccagagtgcccaagcacaggcgcagaccggctgggttcaaaaccaaggaatacttccgggtatggtttggcaggacagagatgtgtacctgcaaggacccatttgggccaaaattcctcacacggacggcaactttcacccttctccgctaatgggagggtttggaatgaagcacccgcctcctcagatcctcatcaaaaacacacctgtacctgcggatcctccaacggctttcaataaggacaagctgaactctttcatcacccagtattctactggccaagtcagcgtggagattgagtgggagctgcagaaggaaaacagcaagcgctggaacccggagatccagtacacttccaactattacaagtctaataatgttgaatttgctgttaatactgaaggtgtatatagtgaaccccgccccattggcaccagatacctgactcgtaatctgtaa

SEQ ID NO: 250 - protein, 736 aa, Artificial Sequence
  source: /note="Description of Artificial Sequence: Synthetic polypeptide"
MAADGYLPDWLEDTLSEGIRQWWKLKPGPPPPKPAERHKDDSRGLVLPGYKYLGPGNGLDKGEPVNAADAAALEHDKAYDQQLKAGDNPYLKYNHADAEFQERLKEDTSFGGNLGRAVFQAKKRLLEPLGLVEEAAKTAPGKKRPVEQSPQEPDSSAGIGKSGSQPAKKKLNFGQTGDTESVPDPQPIGEPPAAPSGVGSLTMASGGGAPVADNNEGADGVGSSSGNWHCDSQWLGDRVITTSTRTWALPTYNNHLYKQISNSTSGGSSNDNAYFGYSTPWGYFDFNRFHCHFSPRDWQRLINNNWGFRPKRLNFKLFNIQVKEVTDNNGVKTIANNLTSTVQVFTDSDYQLPYVLGSAHEGCLPPFPADVFMIPQYGYLTLNDGSQAVGRSSFYCLEYFPSQMLRTGNNFQFSYEFENVPFHSSYAHSQSLDRLMNPLIDQYLYYLSKTINGSGQNQQTLKFSVAGPSNMAVQGRNYIPGPSYRQQRVSTTVTQNNNSEFAWPGASSWALNGRNSLMNPGPAMASHKEGEDRFFPLSGSLIFGKQGTGRDNVDADKVMITNEEEIKTTNPVATESYGQVATNHQSAQAQAQTGWVQNQGILPGMVWQDRDVYLQGPIWAKIPHTDGNFHPSPLMGGFGMKHPPPQILIKNTPVPADPPTAFNKDKLNSFITQYSTGQVSVEIEWELQKENSKRWNPEIQYTSNYYKSNNVEFAVNTEGVYSEPRPIGTRYLTRNL

SEQ ID NO: 251 - DNA, 2208 bp, Artificial Sequence
  source: /note="Description of Artificial Sequence: Synthetic polynucleotide"
atggctgccgatggttatcttccagattggctcgaggacactctctctgaaggaataagacagcggtggaagctcaaacctggcccaccaccaccagagcccgcagagcggcataaggacgacagcaggggtcttgtgcttcctgggtacaagtacctcggacccttcaacggactcgacaagggagagccggtcaacgaggcagacgccgcggccctcgagcacgacaaagcctacgaccggcagctcgacagcggagacaacccgtacctcaagtacaaccacgccgacgcggagtttcaggagcgccttaaagaagatacgtcttttgggggcaacctcggacgagcagtcttccaggcgaaaaagagggtacttgaacctctgggcctggttgaggaacctgttaagacggctccgggaaaaaagaggccggtagagcactctcctgtggagccagactcctcctcgggaaccggaaaggcgggccagcagcctgcaagaaaaagattgaattttggtcagactggagacgcagactcagtacctgacccccagcctctcggacagccaccagcagccccctctggtctgggaactaatacgatggctacaggcagtggcgcaccaatggcagacaataacgagggcgccgacggagtgggtaattcctcgggaaattggcattgcgattccacatggatgggcgacagagtcatcaccaccagcacccgaacctgggccctgcccacctacaacaaccacctctacaaacaaatttccagccaatcaggagcctcgaacgacaatcactactttggctacagcaccccttgggggtattttgacttcaacagattccactgccacttttcaccacgtgactggcaaagactcatcaacaacaactggggattccgacccaagagactcaacttcaagctctttaacattcaagtcaaagaggtcacgcagaatgacggtacgacgacgattgccaataaccttaccggcacggttcaggtgtttactgactcggagtaccagctcccgtacgtcctcggctcggcgcatcaaggatgcctcccgccgttcccagcagacgtcttcatggtgccacagtatggatacctcaccctgaacaacgggagtcaggcagtaggacgctcttcattttactgcctggagtactttccttctcagatgctgcgtaccggaaacaactttaccttcagctacacttttgaggacgttcctttccacagcagctacgctcacagccagagtctgggccgtctcatgaatcctctcatcgaccagtacctgtattacttgagcagaacaaacactccaagtggaaccaccacgcagtcaaggcttcagttttctcaggccggagcgagtgacattcgggaccagtctaggaactggcttcctggaccctgttaccgccagcagcgagtatcaaagacatctgcggataacaacaacagtgaatactcgtggactggagctaccaagtaccacctcaatggcagagactctctggtgaatccgggcccggccatggcaagccacaaggacgatgaagaaaagttttttcctcagagcggggttctcatctttgggaagcaaggctcagagaaaacaaatgtggacattgaaaaggtcatgattacagacgaagaggaaatcaggacaaccaatcccgtggctacggagcagtatggttctgtatctaccaacctccagagaggcaacagacaagcagctaccgcagatgtcaacacacaaggcgttcttccaggcatggtctggcaggacagagatgtgtaccttcaggggcccatctgggcaaagattccacacacggacggacattttcacccctctcccctcatgggtggattcggacttaaacaccctcctccacagattctcatcaagaacaccccggtacctgcgaatccttcgaccaccttcagtgcggcaaagtttgcttccttcatcacacagtactccacgggacaggtcagcgtggagatcgagtgggagctgcagaaggaaaacagcaaacgctggaatcccgaaattcagtacacttccaactacaacaagtctgttaatgtggactttactgtggacactaatggcgtgtattcagagcctcgccccattggcaccagatacctgactcgtaatctgtaa

SEQ ID NO: 252 - protein, 735 aa, Artificial Sequence
  source: /note="Description of Artificial Sequence: Synthetic polypeptide"
MAADGYLPDWLEDTLSEGIRQRWKLKPGPPPPEPAERHKDDSRGLVLPGYKYLGPFNGLDKGEPVNEADAAALEHDKAYDRQLDSGDNPYLKYNHADAEFQERLKEDTSFGGNLGRAVFQAKKRVLEPLGLVEEPVKTAPGKKRPVEHSPVEPDSSSGTGKAGQQPARKRLNFGQTGDADSVPDPQPLGQPPAAPSGLGTNTMATGSGAPMADNNEGADGVGNSSGNWHCDSTWMGDRVITTSTRTWALPTYNNHLYKQISSQSGASNDNHYFGYSTPWGYFDFNRFHCHFSPRDWQRLINNNWGFRPKRLNFKLFNIQVKEVTQNDGTTTIANNLTGTVQVFTDSEYQLPYVLGSAHQGCLPPFPADVFMVPQYGYLTLNNGSQAVGRSSFYCLEYFPSQMLRTGNNFTFSYTFEDVPFHSSYAHSQSLGRLMNPLIDQYLYYLSRTNTPSGTTTQSRLQFSQAGASDIRDQSRNWLPGPCYRQQRVSKTSADNNNSEYSWTGATKYHLNGRDSLVNPGPAMASHKDDEEKFFPQSGVLIFGKQGSEKTNVDIEKVMITDEEEIRTTNPVATEQYGSVSTNLQRGNRQAATADVNTQGVLPGMVWQDRDVYLQGPIWAKIPHTDGHFHPSPLMGGFGLKHPPPQILIKNTPVPANPSTTFSAAKFASFITQYSTGQVSVEIEWELQKENSKRWNPEIQYTSNYNKSVNVDFTVDTNGVYSEPRPIGTRYLTRNL

SEQ ID NO: 253 - DNA, 2208 bp, Artificial Sequence
  source: /note="Description of Artificial Sequence: Synthetic polynucleotide"
atggctgccgatggttatcttccagattggctcgaggacactctctctgaaggaataagacagcggtggaagctcaaacctggcccaccaccaccagagcccgcagagcggcataaggacgacagcaggggtcttgtgcttcctgggtacaagtacctcggacccttcaacggactcgacaagggagagccggtcaacgaggcagacgccgcggccctcgagcacgacaaagcctacgaccggcagctcgacagcggagacaacccgtacctcaagtacaaccacgccgacgcggagtttcaggagcgccttaaagaagatacgtcctttgggggcaacctcggacgagcagtcttccaggcgaaaaagagggtacttgaacctctgggcctggttgaggaacctgttaagacggctccgggaaaaaagaggccggtagagcactctcctgtggagccagactcctcctcgggaaccggaaaggcgggccagcagcctgcaagaaaaagattgaattttggtcagactggagacgcagactcagtacctgacccccagcctctcggacagccaccagcagccccctctggtctgggaactaatacgatggctacaggcagtggcgcaccaatggcagacaataacgagggcgccgacggagtgggtaattcctcgggaaattggcattgcgattccacatggatgggcgacagagtcatcaccaccagcacccgaacctgggccctgcccacctacaacaaccacctctacaaacaaatttccagccaatcaggagcctcgaacgacaatcactactttggctacagcaccccttgggggtattttgacttcaacagattccactgccacttttcaccacgtgactggcaaagactcatcaacaacaactggggattccgacccaagagactcaacttcaagctctttaacattcaagtcaaagaggtcacgcagaatgacggtacgacgacgattgccaataaccttaccagcacggttcaggtgtttactgactcggagtaccagctcccgtacgtcctcggctcggcgcatcaaggatgcctcccgccgttcccagcagacgtcttcatggtgccacagtatggatacctcaccctgaacaacgagagtcaggcagtaggacgctcttcattttactgcctggagtactttccttctcagatgctgcgtaccggaaacaactttaccttcagctacacttttgaggacgttcctttccacagcagctacgctcacagccagagtctgggccgtctcatgaatcctctcatcgaccagtacctgtattacttgagcagaacaaacactccaagtggaaccaccacgcagtcaaggcttcagttttctcaggccggagcgagtgacattcgggaccagtctaggaactggcttcctggaccctgttaccgccagcagcgagtatcaaagacatctgcggataacaacaacagtgaatactcgtggactggagctaccaagtaccacctcaatggcagagactctctggtgaatccgggcccggccatggcaagccacaaggacgatgaagaaaagttttttcctcagagcggggttctcatctttgggaagcaaggctcagagaaaacaaatgtggacattgaaaaggtcatgattacagacgaagaggaaatcaggacaaccaatcccgtggctacggagcagtatggttctgtatctaccaacctccagagaggcaacagacaagcagctaccgcagatgtcaacacacaaggcgttcttccaggcatggtctggcaggacagagatgtgtaccttcaggggcccatctgggcaaagattccacacacggacggacattttcacccctctcccctcatgggtggattcggacttaaacaccctcctccacagattctcatcaagaacaccccggtacctgcgaatccttcgaccaccttcagtgcggcaaagtttgcttccttcatcacacagtactccacgggacaggtcagcgtggagatcgagtgggagctgcagaaggaaaacagcaaacgctggaatcccgaaattcagtacacttccaactacaacaagtctgttaatgtggactttactgtggacactaatggcgtgtattcagagcctcgccccattggcaccagatacctgactcgtaatctgtaa

SEQ ID NO: 254 - protein, 735 aa, Artificial Sequence
  source: /note="Description of Artificial Sequence: Synthetic polypeptide"
MAADGYLPDWLEDTLSEGIRQRWKLKPGPPPPEPAERHKDDSRGLVLPGYKYLGPFNGLDKGEPVNEADAAALEHDKAYDRQLDSGDNPYLKYNHADAEFQERLKEDTSFGGNLGRAVFQAKKRVLEPLGLVEEPVKTAPGKKRPVEHSPVEPDSSSGTGKAGQQPARKRLNFGQTGDADSVPDPQPLGQPPAAPSGLGTNTMATGSGAPMADNNEGADGVGNSSGNWHCDSTWMGDRVITTSTRTWALPTYNNHLYKQISSQSGASNDNHYFGYSTPWGYFDFNRFHCHFSPRDWQRLINNNWGFRPKRLNFKLFNIQVKEVTQNDGTTTIANNLTSTVQVFTDSEYQLPYVLGSAHQGCLPPFPADVFMVPQYGYLTLNNESQAVGRSSFYCLEYFPSQMLRTGNNFTFSYTFEDVPFHSSYAHSQSLGRLMNPLIDQYLYYLSRTNTPSGTTTQSRLQFSQAGASDIRDQSRNWLPGPCYRQQRVSKTSADNNNSEYSWTGATKYHLNGRDSLVNPGPAMASHKDDEEKFFPQSGVLIFGKQGSEKTNVDIEKVMITDEEEIRTTNPVATEQYGSVSTNLQRGNRQAATADVNTQGVLPGMVWQDRDVYLQGPIWAKIPHTDGHFHPSPLMGGFGLKHPPPQILIKNTPVPANPSTTFSAAKFASFITQYSTGQVSVEIEWELQKENSKRWNPEIQYTSNYNKSVNVDFTVDTNGVYSEPRPIGTRYLTRNL

SEQ ID NO: 255 - DNA, 2208 bp, Artificial Sequence
  source: /note="Description of Artificial Sequence: Synthetic polynucleotide"
atggctgccgatggttatcttccagattggctcgaggacactctctctgaaggaataagacagcggtggaagctcaaacctggcccaccaccaccagagcccgcagagcggcataaggacgacagcaggggtcttgtgcttcctgggtacaagtacctcggacccttcaacggactcgacaagggagagccggtcaacgaggcagacgccgcggccctcgagcacgacaaagcctacgaccggcagctcgacagcggagacaacccgtacctcaagtacaaccacgccgacgcggagtttcaggagcgccttaaagaagatacgtcttttgggggcaacctcggacgagcagtcttccaggcgaaaaagagggtacttgaacctctgggcctggttgaggaacctgttaagacggctccgggaaaaaagaggccggtagagcactctcctgtggagccagactcctcctcgggaaccggaaaggcgggccagcagcctgcaagaaaaagattgaattttggtcagactggagacgcagactcagtacctgacccccagcctctcggacagccaccagcagccccctctggtctgggaactaatacgatggctacaggcagtggcgcaccaatggcagacaataacgagggcgccgacggagtgggtaattcctcgggaaattggcattgcgattccacatggatgggcgacagagtcatcaccaccagcacccgaacctgggccctgcccacctacaacaaccacctctacaaacaaatttccagccaatcaggagcctcgaacgacaatcactactttggctacagcaccccttgggggtattttgacttcaacagattccactgccacttttcaccacgtgactggcaaagactcatcaacaacaactggggattccgacccaagagactcaacttcaagctctttaacattcaagtcaaagaggtcacgcagaatgacggtacgacgacgattgccaataaccttaccagcacggttcaggtgtttactgactcggagtaccagctcccgtacgtcctcggctcggcgcatcaaggatgcctcccgccgttcccagcagacgtcttcatggtaccacagtatggatacctcaccctgaacaacgggagtcaggcagtaggacgctcttcattttactgcctggagtactttccttctcagatgctgcgtaccggaaacaactttaccttcagctacacttttgaggacgttcctttccacagcagctacgctcacagccagagtctgggccgtctcatgaatcctctcatcgaccagtacctgtattacttgagcagaacaaacactccaagtggaaccaccacgcagtcaaggcttcagttttctcaggccggagcgagtgacattcgggaccagtctaggaactggcttcctggaccctgttaccgccagcagcgagtatcaaagacatctgcggataacaacaacagtgaatactcgtggactggagctaccaagtaccacctcaatggcagagactctctggtgaatccgggcccggccatggcaagccacaaggacgatgaagaaaagttttttcctcagagcggggttctcatctttgggaagcaaggctcagagaaaacaaatgtggacattgaaaaggtcatgattacagacgaagaggaaatcaggacaaccaatcccgtggctacggagcagtatggttctgtatctaccaacctccagagaggcaacagacaagcagctaccgcagatgtcaacacacaaggcgttcttccaggcatggtctggcaggacagagatgtgtaccttcaggggcccatctgggcaaagattccacacacggacggacattttcacccctctcccctcatgggtggattcggacttaaacaccctcctccacagattctcatcaagaacaccccggtacctgcgaatccttcgaccaccttcagtgcggcaaagtttgcttccttcatcacacagtactccacgggacaggtcagcgtggagatcgagtgggagctgcagaaggaaaacagcaaacgctggaatcccgaaattcagtacacttccaactacaacaagtctgttaatgtggactttactgtggacactaatggcgtgtattcagagcctcgccccattggcaccagatacctgactcgtaatctgtaa

SEQ ID NO: 256 - protein, 735 aa, Artificial Sequence
  source: /note="Description of Artificial Sequence: Synthetic polypeptide"
MAADGYLPDWLEDTLSEGIRQRWKLKPGPPPPEPAERHKDDSRGLVLPGYKYLGPFNGLDKGEPVNEADAAALEHDKAYDRQLDSGDNPYLKYNHADAEFQERLKEDTSFGGNLGRAVFQAKKRVLEPLGLVEEPVKTAPGKKRPVEHSPVEPDSSSGTGKAGQQPARKRLNFGQTGDADSVPDPQPLGQPPAAPSGLGTNTMATGSGAPMADNNEGADGVGNSSGNWHCDSTWMGDRVITTSTRTWALPTYNNHLYKQISSQSGASNDNHYFGYSTPWGYFDFNRFHCHFSPRDWQRLINNNWGFRPKRLNFKLFNIQVKEVTQNDGTTTIANNLTSTVQVFTDSEYQLPYVLGSAHQGCLPPFPADVFMVPQYGYLTLNNGSQAVGRSSFYCLEYFPSQMLRTGNNFTFSYTFEDVPFHSSYAHSQSLGRLMNPLIDQYLYYLSRTNTPSGTTTQSRLQFSQAGASDIRDQSRNWLPGPCYRQQRVSKTSADNNNSEYSWTGATKYHLNGRDSLVNPGPAMASHKDDEEKFFPQSGVLIFGKQGSEKTNVDIEKVMITDEEEIRTTNPVATEQYGSVSTNLQRGNRQAATADVNTQGVLPGMVWQDRDVYLQGPIWAKIPHTDGHFHPSPLMGGFGLKHPPPQILIKNTPVPANPSTTFSAAKFASFITQYSTGQVSVEIEWELQKENSKRWNPEIQYTSNYNKSVNVDFTVDTNGVYSEPRPIGTRYLTRNL

SEQ ID NO: 257 - DNA, 2208 bp, Artificial Sequence
  source: /note="Description of Artificial Sequence: Synthetic polynucleotide"
atggctgccgatggttatcttccagattggctcgaggacactctctctgaaggaataagacagcggtggaagctcaaacctggcccaccaccaccagagcccgcagagcggcataaggacgacagcaggggtcttgtgcttcctgggtacaagtacctcggacccttcaacggactcgacaagggagagccggtcaacgaggcagacgccgcggccctcgagcacgacaaagcctacgaccggcagctcgacagcggagacaacccgtacctcaagtacaaccacgccgacgcggagtttcaggagcgccttaaagaagatacgtcttttgggggcaacctcggacgagcagtcttccaggcgaaaaagagggtactcgaacctctgggcctggttgaggaacctgttaagacggctccgggaaaaaagaggccggtagagcactctcctgtggagccagactcctcctcgggaaccggaaaggcgggccagcagcctgcaagaaaaagattgaattttggtcagactggagacgcagactcagtacctgacccccagcctctcggacagccaccagcagccccctctggtctgggaactaatacgatggctacaggcagtggcgcaccaatggcagacaataacgagggcgccgacggagtgggtaattcctcgggaaattggcattgcgattccacatggatgggcgacagagtcatcaccaccagcacccgaacctgggccctgcccacctacaacaaccacctctacaaacaaatttccagccaatcaggagcctcgaacgacaatcactactttggctacagcaccccttgggggtattttgacttcaacagattccactgccacttttcaccacgtgactggcaaagactcatcaacaacaactggggattccgacccaagagactcaacttcaagctctttaacattcaagtcaaagaggtcacgcagaatgacggtacgacgacgattgccaataaccttaccagcacggttcaggtgtttactgactcggagtaccagctcccgtacgtcctcggctcggcgcatcaaggatgcctcccgccgttcccagcagacgtcttcatggtgccacagtatggatacctcaccctgaacaacgggagtcaggcagcaggacgctcttcattttactgcctggagtactttccttctcagatgctgcgtaccggaaacaactttaccttcagctacacttttgaggacgttcctttccacagcagctacgctcacagccagagtctgggccgtctcatgaatcctctcatcgaccagtacctgtattacttgagcagaacaaacactccaagtggaaccaccacgcagtcaaggcttcagttttctcaggccggagcgagtgacattcgggaccagtctaggaactggcttcctggaccctgttaccgccagcagcgagtatcaaagacatctgcggataacaacaacagtgaatactcgtggactggagctaccaagtaccacctcaatggcagagactctctggtgaatccgggcccggccatggcaagccacaaggacgatgaagaaaagttttttcctcagagcggggttctcatctttgggaagcaaggctcagagaaaacaaatgtggacattgaaaaggtcatgattacagacgaagaggaaatcaggacaaccaatcccgtggctacggagcagtatggttctgtatctaccaacctccagagaggcaacagacaagcagctaccgcagatgtcaacacacaaggcgttcttccaggcatggtctggcaggacagagatgtgtaccttcaggggcccatctgggcaaagattccacacacggacggacattttcacccctctcccctcatgggtggattcggacttaaacaccctcctccacagattctcatcaagaacaccccggtacctgcgaatccttcgaccaccttcagtgcggcaaagtttgcttccttcatcacacagtactccacgggacaggtcagcgtggagatcgagtgggagctgcagaaggaaaacagcaaacgctggaatcccgaaattcagtacacttccaactacaacaagtccgttaatgtggactttactgtggacactaatggcgtgtattcagagcctcgccccattggcaccagatacctgactcgtaatctgtaa

SEQ ID NO: 258 - protein, 735 aa, Artificial Sequence
  source: /note="Description of Artificial Sequence: Synthetic polypeptide"
MAADGYLPDWLEDTLSEGIRQRWKLKPGPPPPEPAERHKDDSRGLVLPGYKYLGPFNGLDKGEPVNEADAAALEHDKAYDRQLDSGDNPYLKYNHADAEFQERLKEDTSFGGNLGRAVFQAKKRVLEPLGLVEEPVKTAPGKKRPVEHSPVEPDSSSGTGKAGQQPARKRLNFGQTGDADSVPDPQPLGQPPAAPSGLGTNTMATGSGAPMADNNEGADGVGNSSGNWHCDSTWMGDRVITTSTRTWALPTYNNHLYKQISSQSGASNDNHYFGYSTPWGYFDFNRFHCHFSPRDWQRLINNNWGFRPKRLNFKLFNIQVKEVTQNDGTTTIANNLTSTVQVFTDSEYQLPYVLGSAHQGCLPPFPADVFMVPQYGYLTLNNGSQAAGRSSFYCLEYFPSQMLRTGNNFTFSYTFEDVPFHSSYAHSQSLGRLMNPLIDQYLYYLSRTNTPSGTTTQSRLQFSQAGASDIRDQSRNWLPGPCYRQQRVSKTSADNNNSEYSWTGATKYHLNGRDSLVNPGPAMASHKDDEEKFFPQSGVLIFGKQGSEKTNVDIEKVMITDEEEIRTTNPVATEQYGSVSTNLQRGNRQAATADVNTQGVLPGMVWQDRDVYLQGPIWAKIPHTDGHFHPSPLMGGFGLKHPPPQILIKNTPVPANPSTTFSAAKFASFITQYSTGQVSVEIEWELQKENSKRWNPEIQYTSNYNKSVNVDFTVDTNGVYSEPRPIGTRYLTRNL

SEQ ID NO: 259 - protein, 738 aa, Artificial Sequence; identical to SEQ ID NO: 101
  source: /note="Description of Artificial Sequence: Synthetic polypeptide"

SEQ ID NO: 260 - DNA, 2217 bp, Artificial Sequence
  source: /note="Description of Artificial Sequence: Synthetic polynucleotide"
atggctgctgacggttatcttccagattggctcgaggacaacctctctgagggcattcgcgagtggtgggacctgaaacctggagcccccaagcccaaggccaaccagcagaagcaggacgacggccggggtctggtgcttcctggctacaagtacctcggacccttcaacggactcgacaagggggagcccgtcaacgcggcggacgcagcggccctcgagcacgacaaggcctacgaccagcagctcaaagcgggtgacaatccgtacctgcggtataaccacgccgacgccgagtttcaggagcgtctgcaagaagatacgtcttttgggggcaacctcgggcgagcagtcttccaggccaagaagcgggttctcgaacctctcggtctggttgaggaagctgctaagacggctcctggaaagaagagaccggtagaaccgtcacctcagcgttcccccgactcctccacgggcatcggcaagaaaggccagcagcccgctaaaaagagactgaactttggtcagactggcgactcagagtcagtccccgaccctcaaccaatcggagaaccaccagcaggcccctctggtctgggatctggtacaatggctgcaggcggtggcgctccaatggcagacaataacgaaggcgccgacggagtgggtagttcctcaggaaattggcattgcgattccacatggctgggcgacagagtcatcaccaccagcacccgaacctgggccctgcccacctacaacaaccacctctacaagcaaatatccaatgggacatcgggaggaagcaccaacgacaacacctacttcggctacagcaccccctgggggtattttgacttcaacagattccactgccacttctcaccacgtgactggcagcgactcatcaacaacaactggggattccggccaaaaagactcagcttcaagctcttcaacatccaggtcaaggaggtcacgcagaatgaaggcaccaagaccatcgccaataaccttaccagcacgattcaggtatttacggactcggaataccagctgccgtacgtcctcggctccgcgcaccagggctgcctgcctccgttcccggcggacgtcttcatgattccccagtacggctaccttacactgaacaatggaagtcaagccgtaggccgttcctccttctactgcctggaatattttccatctcaaatgctgcgaactggaaacaattttgaattcagctacaccttcgaggacgtgcctttccacagcagctacgcacacagccagagcttggaccgactgatgaatcctctcatcgaccagtacctgtactacttatccagaactcagtccacaggaggaactcaaggtacccagcaattgttattttctcaagctgggcctgcaaacatgtcggctcaggctaagaactggctacctggaccttgctaccggcagcagcgagtctctacgacactgtcgcaaaacaacaacagcaactttgcttggactggtgccaccaaatatcacctgaacggaagagactctttggtaaatcccggtgtcgccatggcaacccacaaggacgacgaggaacgcttcttcccgtcgagtggagtcctgatgttcggaaaacagggtgctggaagagacaatgtggactacagcagcgttatgctaaccagcgaagaagaaattaaaaccactaaccccgtagccacagaacaatacggtgtggtggctgacaacttgcagcaaaccaatacagggcctattgtgggaaatgtcaacagccaaggagccttacctggcatggtctggcagaaccgagacgtgtacctgcagggtcccatctgggccaagattcctcacacggacggcaacttccacccttcaccgctaatgggaggatttggactgaagcacccacctcctcagatcctgatcaagaacacgccggtacctgcggatcctccaacaacgttcagccaggcgaaattggcttccttcattacgcagtacagcaccggacaggtcagcgtggaaatcgagtgggagctgcagaaggagaacagcaaacgctggaacccagagattcagtacacttcaaactactacaaatctacaaatgtggactttgctgtcaatacagagggaacttattctgagcctcgccccattggtactcgttacctcacccgtaatctgtaa

SEQ ID NO: 261 - protein, 738 aa, Artificial Sequence
  source: /note="Description of Artificial Sequence: Synthetic polypeptide"
MAADGYLPDWLEDNLSEGIREWWDLKPGAPKPKANQQKQDDGRGLVLPGYKYLGPFNGLDKGEPVNAADAAALEHDKAYDQQLKAGDNPYLRYNHADAEFQERLQEDTSFGGNLGRAVFQAKKRVLEPLGLVEEAAKTAPGKKRPVEPSPQRSPDSSTGIGKKGQQPAKKRLNFGQTGDSESVPDPQPIGEPPAGPSGLGSGTMAAGGGAPMADNNEGADGVGSSSGNWHCDSTWLGDRVITTSTRTWALPTYNNHLYKQISNGTSGGSTNDNTYFGYSTPWGYFDFNRFHCHFSPRDWQRLINNNWGFRPKRLSFKLFNIQVKEVTQNEGTKTIANNLTSTIQVFTDSEYQLPYVLGSAHQGCLPPFPADVFMIPQYGYLTLNNGSQAVGRSSFYCLEYFPSQMLRTGNNFEFSYTFEDVPFHSSYAHSQSLDRLMNPLIDQYLYYLSRTQSTGGTQGTQQLLFSQAGPANMSAQAKNWLPGPCYRQQRVSTTLSQNNNSNFAWTGATKYHLNGRDSLVNPGVAMATHKDDEERFFPSSGVLMFGKQGAGRDNVDYSSVMLTSEEEIKTTNPVATEQYGVVADNLQQTNTGPIVGNVNSQGALPGMVWQNRDVYLQGPIWAKIPHTDGNCHPSPLMGGFGLKHPPPQILIKNTPVPADPPTTFSQAKLASFITQYSTGQVSVEIEWELQKENSKRWNPEIQYTSNYYKSTNVDFAVNTEGTYSEPRPIGTRYLTRNL

SEQ ID NO: 262 - protein, 738 aa, Artificial Sequence
  source: /note="Description of Artificial Sequence: Synthetic polypeptide"
MAADGYLPDWLEDNLSEGIREWWDLKPGAPKPKANQQKQDDGRGLVLPGYKYLGPFNGLDKGEPVNAADAAALEHDKAYDQQLKAGDNPYLRYNHADAEFQERLQEDTSFGGNLGRAVFQAKKRVLEPLGLVEEGAKTAPGKKRPVEPSPQRSPDSSTGIGKKGQQPARKRLNFGRTGDSESVPDPQPIGEPPAAPSSVGSGTMAAGGGAPMADNNEGADGVGSSSGNWHCDSTWLGDRVITTSTRTWALPTYNNHLYKQISNGTSGGSTNDNTYFGYSTPWGYLDFNRFHCHFSPRDWQRLINNNWGFRPKRLSFKLFNIQVKEVTQNEGTKTIANNLASTIQVFTDSEYQPPYVLGSAHQGCLPPFPADVFMIPQYGYLTLNNGSQAVGRSSFYCLEYFPSQMLRTGNNFSFSYTFEDVPFHSSYAHSQSLDRLMNPLIDQYLYYLSRTQSTGGTAGTQQLLFSRAGPSNMSAQARNWLPGPCYRQQRVSTTLSQNNNSNFAWTGATKYHLNGRDSLVNPGVAMATNKDDEDRFFPSSGILMFGKQGAGKDNVDYSNVMLTSEEEIKTTNPVATEQYGVVADNLQQQNTAPTVGAVNSQGALPGMVWQNRDVYLQGPIWAKIPHTDGNFHPSPLMGGFGLKHPPPQILIKNTPVPADPPTAFNQAKLNSFIAQYSTGQVSVEIEWELQKENSKRWNPEIQYTSNYYKSTNADFAVNTEGVYSEPRPIGTRYLTRNL

SEQ ID NO: 263 - DNA, 2217 bp, Artificial Sequence
  source: /note="Description of Artificial Sequence: Synthetic polynucleotide"
atggctgccgatggttatcttccagattggctcgaggacaacctctctgagggcattcgcgagtggtgggacctgaaacctggagccccgaaacccaaagccaaccagcaaaagcaggacgacggccggggtctggtgcttcctggctacaagtacctcggacccttcaacggactcgacaagggggagcccgtcaacgcggcggacgcagcggccctcgagcacgacaaggcctacgaccagcagctcaaagcgggtgacaatccgtacctgcggtataatcacgccgacgccgagtttcaggagcgtctgcaagaagatacgtcttttgggggcaacctcgggcgagcagtcttccaggccaagaagcgggttctcgaacctctcggtctggttgaggaaggcgctaagacggctcctggaaagaagagaccggtagagccgtcaccacagcgttcccccgactcctccacgggcatcggcaagaaaggccagcagcccgccagaaagagactcaatttcggtcggactggcgactcagagtcagtccccgaccctcaacctatcggagaacctccagcagcgccctctagtgtgggatctggtacaatggctgcaggcggtggcgcaccaatggcagacaataacgaaggtgccgacggagtgggtagttcctcgggaaattggcattgcgattccacatggctgggcgacagagttatcaccaccagcacccgaacctgggccctgcccacctacaacaaccacctctacaagcaaatctccaacgggacctcgggaggcagcaccaacgacaacacctactttggctacagcaccccctgggggtatcttgactttaacagattccactgccacttctcaccacgtgactggcagcgactcatcaacaacaactggggattccggcccaagagactcagcttcaagctcttcaacatccaggtcaaagaggtcacgcagaatgaaggcaccaagaccatcgccaataacctcgccagcaccatccaggtgtttacggactcggaataccagccgccgtacgtcctcggctctgcccaccagggctgcctgcctccgttcccggcggacgtcttcatgattcctcagtacggctacctgactctcaacaacggtagtcaggccgtgggacgttcctccttctactgcctggagtacttcccctctcagatgctgagaacgggcaacaacttttccttcagctacactttcgaggacgtgcctttccacagcagctacgcgcacagccagagtttggacaggctgatgaatcctctcatcgaccagtacctgtactacctgtcaagaacccagtctacgggaggcacagcgggaacccagcagttgctgttttctcgggccgggcctagcaacatgtcggctcaggccagaaactggctgcctggaccctgctacagacagcagcgcgtctccacgacactgtcgcaaaacaacaacagcaactttgcctggactggtgccaccaagtatcatctgaacggcagagactctctggtgaatccgggcgtcgccatggcaaccaacaaggacgacgaggaccgcttcttcccatccagcggcatcctcatgtttggcaagcagggagctggaaaagacaacgtggactatagcaacgtgatgctaaccagcgaggaagaaatcaagaccaccaaccccgtggccacagaacagtatggcgtggtggctgataacctacagcagcaaaacaccgctcctactgtgggggccgtcaacagccagggagccttacctggcatggtctggcagaaccgggacgtgtacctgcagggtcctatttgggccaagattcctcacacagatggcaactttcacccgtctcctttaatgggcggctttggacttaaacatccgcctcctcagatcctcatcaaaaacactcctgttcctgcggatcctccaacagcgttcaaccaggccaagctgaattctttcatcgcgcagtacagcaccggacaagtcagcgtggagatcgagtgggagctgcagaaggagaacagcaagcgctggaacccagagattcagtatacttccaactactacaaatctacaaatgcggactttgctgttaatactgagggtgtttactctgagcctcgccccattggcactcgttacctcacccgtaatctgtaa

SEQ ID NO: 264 - DNA, 2208 bp, Artificial Sequence
  source: /note="Description of Artificial Sequence: Synthetic polynucleotide"
atggctgccgatggttatcttccagattggctcgaggacactctctctgaaggaataagacagtggtggaagctcaaacctggcccaccaccaccaaagcccgcagagcggcataaggacgacagcaggggtcttgtgcttcctgggtacaagtacctcggacccttcaacggactcgacaagggggagccggtcaacgaggcagacgccgcggccctcgagcacgacaaggcctacgaccggcagctcgacagcggagacaacccgtacctcaagtacaaccacgccgacgcagagtttcaggagcgccttaaagaagatacgtcttttgggggcaacctcggacgagcagtcttccaggcgaaaaagagggttcttgaacctctgggcctggttgaggagcctgttaagacggctccgggaaaaaagaggccggtagagcactctcctgtggagccagactcctcctcgggaaccggaaaagcgggccagcagcctgcaagaaaaagattaaattttggtcagactggagacgcagactccgtacctgacccccagcctctcggacagccaccagcagccccctctggtctgggatctactacaatggctacaggcagtggcgcaccaatggcagacaataacgagggtgccgatggagtgggtaattcctcaggaaattggcattgcgattcccaatggctgggcgacagagtcatcaccaccagcacccgaacctgggccctgcccacatacaacaaccacctctacaagcaaatctccagccaatcaggagccagcaacgacaaccactactttggctacagcaccccctgggggtattttgacttcaacagattccactgccacttttcaccacgtgactggcaaagactcgtcaacaacaaccggggattccggcccaaaagactcaacttcaagctctttaatattcaagtcaaagaggtcacgcagaatgacggtacgacgacgattgccaataaccttaccagcacggttcaggtgtttactgactcggagtaccagctcccgtacgtcctgggctcggcgcatcaaggatgcctcccgccgtttccagcggacgtcttcatggtcccacagtatggatacctcaccctgaacaacgggagtcaggcggtaggacgctcttccttttactgcctggagtactttccttctcagatgctgcgtactggaaacaactttcagttcagctacacttttgaagacgtgcctttccacagcagctacgctcacagccagagtctggatcggctgatgaatcctctgatcgaccagtacctgtattatctgaacaagacacaaacaaatagtggaactcttcagcagtctcggctactgtttagccaagctggaccaaccaacatgtctcttcaagctaaaaactggctgcctggaccttgctacagacagcagcgtctgtcaaaacaggcaaacgacaacaacaacagcaactttccctggactgcagctacaaagtatcatctaaatggccgggactcgttggttaatccaggaccagctatggccagtcacaaggatgacgaagaaaagtttttccccatgcatggaaccctgatatttggtaaacaaggaacaaatgccaacgacgcggatttggaaaatgtcatgattacagatgaagaagaaatcagggccaccaatcccgtggctacggagcagtacgggactgtgtcaaataatttgcaaaactcaaacactggtccaactactggaactgtcaatcaccaaggagcgttacctggtatggtgtggcaggatcgagacgtgtacctgcagggacccatttgggccaagattcctcacaccgatggacactttcatccttctccactgatgggaggttttggactcaaacacccgcctcctcagatcatgatcaaaaacactcccgttccagccaatcctcccacaaacttcagttctgccaagtttgcttctttcatcacacagtattccacgggacaggtcagcgtggagatcgagtgggagctgcagaaggagaacagcaaacgctggaatcccgaaattcagtacacttccaactacaacaagtctgttaatgtggactttactgtggacactaatggtgtgtattcagagcctcgccccattggcaccagatacctgactcgtaatctgtaa

SEQ ID NO: 265 - protein, 735 aa, Artificial Sequence
  source: /note="Description of Artificial Sequence: Synthetic polypeptide"
MAADGYLPDWLEDTLSEGIRQWWKLKPGPPPPKPAERHKDDSRGLVLPGYKYLGPFNGLDKGEPVNEADAAALEHDKAYDRQLDSGDNPYLKYNHADAEFQERLKEDTSFGGNLGRAVFQAKKRVLEPLGLVEEPVKTAPGKKRPVEHSPVEPDSSSGTGKAGQQPARKRLNFGQTGDADSVPDPQPLGQPPAAPSGLGSTTMATGSGAPMADNNEGADGVGNSSGNWHCDSQWLGDRVITTSTRTWALPTYNNHLYKQISSQSGASNDNHYFGYSTPWGYFDFNRFHCHFSPRDWQRLVNNNRGFRPKRLNFKLFNIQVKEVTQNDGTTTIANNLTSTVQVFTDSEYQLPYVLGSAHQGCLPPFPADVFMVPQYGYLTLNNGSQAVGRSSFYCLEYFPSQMLRTGNNFQFSYTFEDVPFHSSYAHSQSLDRLMNPLIDQYLYYLNKTQTNSGTLQQSRLLFSQAGPTNMSLQAKNWLPGPCYRQQRLSKQANDNNNSNFPWTAATKYHLNGRDSLVNPGPAMASHKDDEEKFFPMHGTLIFGKQGTNANDADLENVMITDEEEIRATNPVATEQYGTVSNNLQNSNTGPTTGTVNHQGALPGMVWQDRDVYLQGPIWAKIPHTDGHFHPSPLMGGFGLKHPPPQIMIKNTPVPANPPTNFSSAKFASFITQYSTGQVSVEIEWELQKENSKRWNPEIQYTSNYNKSVNVDFTVDTNGVYSEPRPIGTRYLTRNL

SEQ ID NO: 266 - protein, 738 aa, Artificial Sequence
  source: /note="Description of Artificial Sequence: Synthetic polypeptide"
MAADGYLPDWLEDNLSEGIREWWDLKPGAPKPKANQQKQDDGRGLVLPGYKYLGPFNGLDKGEPVNAADAAALEHDKAYDQQLKAGDNPYLRYNHADAEFQERLQEDTSFGGNLGRAVFQAKKRVLEPLGLVEEAAKTAPGKKRPVEPSPQRSPDSSTGIGKKGQQPAKKRLSFGQTGDSESVPDPQPIGEPPAGPSGLGSGTMAAGGGAPMADNNEGADGVGSSSGNWHCDSTWLGDRVITTSTRTWALPTYNNHLYKQISNGTSGGSTNDNTYFGYSTPWGYFDFNRFHCHFSPRDWQRLINNNWGFRPKRLSFKLFNIQVKEVTQNEGTKTIANNLTSTIQVFTDSEYQLPYVLGSAHQGCLPPFPADVFMIPQYGYLTLNNGSQAVGRSSFYCLEYFPSQMLRTGNNSEFSYTFEDVPFHSSYAHSQSLDRLMNPLIDQYLYYLSRTQSTGGTQGTQQLLFSQAGPANMSAQAKNWLPGPCYRQQRVSTTLSQNNNSNFAWTGATKYHLNGRDSLVNPGVAMATHKDDEERFFPSSGVLMFGKQGAGRDNVDYSSVMLTSEEEIKTTNPVATEQYGVVADNLQQTNTGPIVGNVNSQGALPGMVWQNRDVYLQGPIWAKIPHTDGNFHPSPLMGGFGLKHPPPQILIKNTPVPADPPTTFSQAKLASFITQYSTGQVSVEIEWELQKENSKRWNPEIQYTSNYYKSTNVDFAVNTEGTYSEPRPIGTRYLTRNL

SEQ ID NO: 267 - DNA, 2217 bp, Artificial Sequence
  source: /note="Description of Artificial Sequence: Synthetic polynucleotide"
atggctgctgacggttatcttccagattggctcgaggacaacctctctgagggcattcgcgagtggtgggacctgaaacctggagcccccaagcccaaggccaaccagcagaagcaggacgacggccggggtctggtgcttcctggctacaagtacctcggacccttcaacggactcgacaagggggagcccgtcaacgcggcggacgcagcggccctcgagcacgacaaggcctacgaccagcagctcaaagcgggtgacaatccgtacctgcggtataaccacgccgacgccgagtttcaggagcgtctgcaagaagatacgtcttttgggggcaacctcgggcgagcagtcttccaggccaagaagcgggttctcgaacctctcggtctggttgaggaagctgctaagacggctcctggaaagaagagaccggtagaaccgtcacctcagcgttcccccgactcctccacgggcatcggcaagaaaggccagcagcccgctaaaaagagactgagctttggtcagactggcgactcagagtcagtccccgaccctcaaccaatcggagaaccaccagcaggcccctctggtctgggatctggtacaatggctgcaggcggtggcgctccaatggcagacaataacgaaggcgccgacggagtgggtagttcctcaggaaattggcattgcgattccacatggctgggcgacagagtcatcaccaccagcacccgaacctgggccctgcccacctacaacaaccacctctacaagcaaatatccaatgggacatcgggaggaagcaccaacgacaacacctacttcggctacagcaccccctgggggtattttgacttcaacagattccactgccacttctcaccacgtgactggcagcgactcatcaacaacaactggggattccggccaaaaagactcagcttcaagctcttcaacatccaggtcaaggaggtcacgcagaatgaaggcaccaagaccatcgccaataaccttaccagcacgattcaggtatttacggactcggaataccagctgccgtacgtcctcggctccgcgcaccagggctgcctgcctccgttcccggcggacgtcttcatgattccccagtacggctaccttacactgaacaatggaagtcaagccgtaggccgttcctccttctactgcctggaatattttccatctcaaatgctgcgaactggaaacaattctgaattcagctacaccttcgaggacgtgcctttccacagcagctacgcacacagccagagcttggaccgactgatgaatcctctcatcgaccagtacctgtactacttatccagaactcagtccacaggaggaactcaaggtacccagcaattgttattttctcaagctgggcctgcaaacatgtcggctcaggctaagaactggctacctggaccttgctaccggcagcagcgagtctctacgacactgtcgcaaaacaacaacagcaactttgcttggactggtgccaccaaatatcacctgaacggaagagactctttggtaaatcccggtgtcgccatggcaacccacaaggacgacgaggaacgcttcttcccgtcgagtggagtcctgatgtttggaaaacagggtgctggaagagacaatgtggactacagcagcgttatgctaaccagcgaagaagaaattaaaaccactaaccctgtagccacagaacaatacggtgtggtggctgacaacttgcagcaaaccaatacagggcctattgtgggaaatgtcaacagccaaggagccttacctggcatggtctggcagaaccgagacgtgtacctgcagggtcccatctgggccaagattcctcacacggacggcaacttccacccttcaccgctaatgggaggatttggactgaagcacccacctcctcagatcctgatcaagaacacgccggtacctgcggatcctccaacaacgttcagccaggcgaaattggcttccttcattacgcagtacagcaccggacaggtcagcgtggaaatcgagtgggagctgcagaaggagaacagcaaacgctggaacccagagattcagtacacttcaaactactacaaatctacaaatgtggactttgctgtcaatacagagggaacttattctgagcctcgccccattggtactcgttacctcacccgtaatctgtaa

SEQ ID NO: 268 - protein, 738 aa, Artificial Sequence
  source: /note="Description of Artificial Sequence: Synthetic polypeptide"
MAADGYLPDWLEDNLSEGIREWWDLKPGAPKPKANQQKQDDGRGLVLPGYKYLGPFNGLDKGEPVNAADAAALEHDKAYDQQLKAGDNPYLRYNHADAEFQERLQEDTSFGGNLGRAVFQAKKRVLEPLGPVEEAAKTAPGKKRPVEPPPQRSPDSSTGIGKKGQQPAKKRLNFGQTGDSESVPDPQPIGEPPAGPSGLGSGTMAAGGGAPMADNNEGADGVGSSSGNWHCDSTWLGDRVITTSTRTWALPTYNNHLYKQISNGTSGGSTNDNTYFGYSTPWGYFDFNRFHCHFSPRDWQRLINNNWGFRPKRLSFKLFNIQVKEVTQNEGTKTVANNLTSTIQVFTDSEYQLPYVLGSAHQGCLPPFPADVFMIPQYGYLTLNNGSQAVGRSSFYCLEYFPSQMLRTGNNFEFSYTFEDVPFHSSYAHSQSLDRLMNPLIDQYLYYLSRTQSTGGTQGTQQLLFSQAGPANMSAQAKNWLPGPCYRQQRVSTTLSQNNNSNFAWTGATKYHLNGRDSLVNPGVAMATHKDDEERFFPSSGVLMFGKQGAGRDNVDYSSVMLTSEEEIKTTNPVATEQYGVVADNLQQTNTGPIVGNVNSQGALPGMVWQNRDVYLQGPIWAKIPHTDGNFHPSPLMGGFGLKHPPPQILIKNTPVPADPPTTFSQAKLASFITQYSTGQVSVEIEWELQKENSKRWNPEIQYTSNYYKSTNVDFAVNTEGTYSEPRPIGTRYLTRNL

SEQ ID NO: 269 - DNA, 2217 bp, Artificial Sequence
  source: /note="Description of Artificial Sequence: Synthetic polynucleotide"
atggctgctgacggttatcttccagattggctcgaggacaacctctctgagggcattcgcgagtggtgggacctgaaacctggagcccccaagcccaaggccaaccagcagaagcaggacgacggccggggtctggtgcttcctggctacaagtacctcggacccttcaacggactcgacaagggggagcccgtcaacgcggcggacgcagcggccctcgagcacgacaaggcctacgaccagcagctcaaagcgggtgacaatccgtacctgcggtataaccacgccgacgccgagtttcaggagcgtctacaagaagatacgtcttttgggggcaacctcgggcgagcagtcttccaggccaagaagcgggttctcgaacctctcggtccggttgaggaagctgctaagacggctcctggaaagaagagaccggtagaaccgccacctcagcgttcccccgactcctccacgggcatcggcaagaaaggccagcagcccgctaaaaagagactgaactttggtcagactggcgactcagagtcagtccccgaccctcaaccaatcggagaaccaccagcaggcccctctggtctgggatctggtacaatggctgcaggcggtggcgctccaatggcagacaataacgaaggcgccgacggagtgggtagttcctcaggaaattggcattgcgattccacatggctgggcgacagagtcatcaccaccagcacccgaacctgggccctgcccacctacaacaaccacctctacaagcaaatatccaatgggacatcgggaggaagcaccaacgacaacacctacttcggctacagcaccccctgggggtattttgacttcaacagattccactgccacttctcaccacgtgactggcagcgactcatcaacaacaactggggattccggccaaaaagactcagcttcaagctcttcaacatccaggtcaaggaggtcacgcagaatgaaggcaccaagaccgtcgccaataaccttaccagcacgattcaggtatttacggactcggaataccagctgccgtacgtcctcggctccgcgcaccagggctgcctgcctccgttcccggcggacgtcttcatgattccccagtacggctaccttacactgaacaatggaagtcaagccgtaggccgttcctccttctactgcctggaatattttccatctcaaatgctgcgaactggaaacaattttgaattcagctacaccttcgaggacgtgcctttccacagcagctacgcacacagccagagcttggaccgactgatgaatcctctcatcgaccagtacctgtactacttatccagaactcagtccacaggaggaactcaaggtacccagcaattgttattttctcaagctgggcctgcaaacatgtcggctcaggctaagaactggctacctggaccttgctaccggcagcagcgagtctctacgacactgtcgcaaaacaacaacagcaactttgcttggactggtgccaccaaatatcacctgaacggaagagactctttggtaaatcccggtgtcgccatggcaacccacaaggacgacgaggaacgcttcttcccgtcgagtggagtcctgatgtttggaaaacagggtgctggaagagacaatgtggactacagcagcgttatgctaaccagcgaagaagaaattaaaaccactaaccctgtagccacagaacaatacggtgtggtggctgacaacttgcagcaaaccaatacagggcctattgtgggaaatgtcaacagccaaggagccttacctggcatggtctggcagaaccgagacgtgtacctgcagggtcccatctgggccaagattcctcacacggacggcaacttccacccttcaccgctaatgggaggatttggactgaagcacccacctcctcagatcctgatcaagaacacgccggtacctgcggatcctccaacaacgttcagccaggcgaaattggcttccttcattacgcagtacagcaccggacaggtcagcgtggaaatcgagtgggagctgcagaaggagaacagcaaacgttggaacccagagattcagtacacttcaaactactacaaatctacaaatgtggactttgctgtcaatacagagggaacttattctgagcctcgccccattggtactcgttacctcacccgtaatctgtaa

SEQ ID NO: 270 - protein, 738 aa, Artificial Sequence
  source: /note="Description of Artificial Sequence: Synthetic polypeptide"
MAADGYLPDWLEDNLSEGIREWWDLKPGAPKPKANQQKQDDGRGLVLPGYKYLGPFNGLDKGEPVNAADAAALEHDKAYDQQLKAGDNPYLRYNHADAEFQERLQEDTSFGGNLGRAVFQAKKRVLEPLGLVEEAAKTAPGKKRPVEPSPQRSPDSSTGIGKKGQQPAKKRLNFGQTGDSESVPDPQPIGEPPAGPSGLGSGTMAAGGGAPMADNNEGADGVGSSSGNWHCDSTWLGDRVITTSTRTWALPTYNNHLYKQISNGTSGGSTNDNTYFGYSTPWGYFDFNRFHCHFSPRDWQRLINNNWGFRPKRLSFKLFNIQVKEVTQNEGTKTIANNLTSTIQVFTDSEYQLPYVLGSAHQGCLPPFPADVFMIPQYGYLTLNNGSQAVGRSSFYCLEYFPSQMLRTGNNFEFSYTFEDVPFHSSYAHSQSLDRLMNPLIDQYLYYLSRTQSTGGTQGTQQLLFSQAGPANMSAQAKNWLPGPCYRQQRVSTTLSQSNNSNFAWTGATKYHLNGRDSLVNPGVAMATHKDDEERFFPSSGVLMFGKQGAGRDNVDYSSVMLTSEEEIKTTNPVATEQYGVVADNLQQTNTGPIVGNVNSQGALPGMVWQNRDVYLQGPIWAKIPHTDGNFHPSPLMGGLGLKHPPPQILIKNTPVPADPPTTFSQAKLASFITQYSTGQVSVEIEWELQKENSKRWNPEIQYTSNYYKSTNVDFAVNTEGTYSEPRPIGTRYLTRNL

SEQ ID NO: 271 - DNA, 2217 bp, Artificial Sequence
  source: /note="Description of Artificial Sequence: Synthetic polynucleotide"
atggctgctgacggttatcttccagattggctcgaggacaacctctctgagggcattcgcgagtggtgggacctgaaacctggagcccccaagcccaaggccaaccagcagaagcaggacgacggccggggtctggtgcttcctggctacaagtacctcggacccttcaacggactcgacaagggggagcccgtcaacgcggcggacgcagcggccctcgagcacgacaaggcctacgaccagcagctcaaagcgggtgacaatccgtacctgcggtataaccacgccgacgccgagtttcaggagcgtctgcaagaagatacgtcttttgggggcaacctcgggcgagcagtcttccaggccaagaagcgggttctcgaacctctcggtctggttgaggaagcggctaagacggctcctggaaagaagagaccggtagaaccgtcacctcagcgttcccccgactcctccacgggcatcggcaagaaaggccagcagcccgctaaaaagagactgaactttggtcagactggcgactcagagtcagtccccgaccctcaaccaatcggagaaccaccagcaggcccctctggtctgggatctggtacaatggctgcaggcggtggcgctccaatggcagacaataacgaaggcgccgacggagtgggtagttcctcaggaaattggcattgcgattccacatggctgggcgacagagtcatcaccaccagcacccgaacctgggccctgcccacctacaacaaccacctctacaagcaaatatccaatgggacatcgggaggaagcaccaacgacaacacctacttcggctacagcaccccctgggggtattttgacttcaacagattccactgccacttctcaccacgtgactggcagcgactcatcaacaacaactggggattccggccaaaaagactcagcttcaagctcttcaacatccaggtcaaggaggtcacgcagaatgaaggcaccaagaccatcgccaataaccttaccagcacgattcaggtatttacggactcggaataccagctgccgtacgtcctcggctccgcgcaccagggctgcctgcctccgttcccggcggacgtcttcatgattccccagtacggctaccttacactgaacaatggaagtcaagccgtaggccgttcctccttctactgcctggaatattttccatctcaaatgctgcgaactggaaacaattttgaattcagctacaccttcgaggacgtgcctttccacagcagctacgcacacagccagagcttggaccgactgatgaatcctctcatcgaccagtacctgtactacttatccagaactcagtccacaggaggaactcaaggtacccagcaattgttattttctcaagctgggcctgcaaacatgtcggctcaggctaagaactggctacctggaccttgctaccggcagcagcgagtctctacgacactgtcgcaaagcaacaacagcaactttgcttggactggtgccaccaaatatcacctgaacggaagagactctttggtaaatcccggtgtcgccatggcaacccacaaggacgacgaggaacgcttcttcccgtcgagtggagtcctgatgtttggaaaacagggtgctggaagagacaatgtggactacagcagcgttatgctaaccagcgaagaagaaattaaaaccactaaccctgtagccacagaacaatacggtgtggtggctgacaacttgcagcaaaccaatacagggcctattgtgggaaatgtcaacagccaaggagccttacctggcatggtctggcagaaccgagacgtgtacctgcagggtcccatctgggccaagattcctcacacggacggcaacttccacccttcaccgctaatgggaggacttggactgaagcacccacctcctcagatcctgatcaagaacacgccggtacctgcggatcctccaacaacgttcagccaggcgaaattggcttccttcattacgcagtacagcaccggacaggtcagcgtggaaatcgagtgggagctgcagaaggagaacagcaaacgctggaacccagagattcagtacacttcaaactactacaaatctacaaatgtggactttgctgtcaatacagagggaacttattctgagcctcgccccattggtactcgttacctcacccgtaatctgtaa

SEQ ID NO: 272 - protein, 737 aa, Artificial Sequence
  source: /note="Description of Artificial Sequence: Synthetic polypeptide"
MAADGYLPDWLEDNLSEGIREWWDLKPGAPKPKANQQKQDDGRGLVLPGYKYLGPFNGLDKGEPVNAADAAALEHDKAYDQQLKAGDNPYPRYNHADAEFQERLQEDTPFGGNLGRAVFQAKKRVLEPLGLVEEAAKTAPGKKRPVEPSPQRSPDSSTGIGKKGQQPAKKRLNFGQTGDSESVPDPQPIGEPPAGPSGLGSGTMAAGGGAPMADNNEGADGVGNASGNWHCDSTWLGDRVITTSTRTWALPTYNNHLYKQISSASTGASNDNHYFGYSTPWGYFDFNRFHCHFSPRDWQRLINNNWGFRPKRLNFKLFNIQVKEVTTNDGVTTIANNLTSTVQVFSDSEYQLPYVLGSAHQGCLPPFPADVFMIPQYGYLTLNNGSQAVGRSSFYCLEYFPSQMLRTGNNFTFSYTFEEVPLHSSYAHSQSLDRLMNPLIVQYLYYLNRTQNQSGSAQNKDLLFSRGSPAGMSVQPKNWLPGPCYRQQRVSKTKTDNNNSNFTWTGASKYNLNGRESIINPGTAMASHKDDEDKFFPMSGVMIFGKESAGASNTALDNVMITDEEEIKATNPVATERFGTVAVNFQSSSTDPATGDVHAMGALPGMVWQDRDVYLQGPIWAKIPHTDGHFHPSPLMGGFGLKNPPPQILIKNTPVPANPPAEFSATKFASFITQYSTGQVSVEIEWELQKENSKRWNPEVQYTSNYAKSASVDFTVDNNGLYTEPRPIGTRYLTRPL

SEQ ID NO: 273 - protein, 737 aa, Artificial Sequence
  source: /note="Description of Artificial Sequence: Synthetic polypeptide"
MAADGYLPDWLEDNLSEGIREWWDLKPGAPKPKANQQKQDDGRGLVLPGYKYLGPFNGLDKGEPVNAADAAALEHDKAYDQQLKAGDNPYPRYNHADAEFQERLQEDTSFGGNLGRAVFQAKKRVLEPLGLVEEAAKTAPGKKRPVEPSPQRSPDSSTGIGKKGQQPAKKRLNFGQTGDSESVPDPQPIGEPPAGPSGLGSGTMAAGGGAPMADNNEGADGVGNASGNWHCDSTWLGDRVITTSTRTWALPTYNNHLYKQISSASTGASNDNHYFGYSTPWGYFDFNRFHCHFSPRDWQRLINNNWGFRPKRLNFKLFNIQVKEVTTNDGVTTIANNLTSTVQVFSDSEYQLPYVLGSAHQGCLPPFPADVFMIPQYGYLTLNNGSQAVGRSSFYCLEYFPSQMLRTGNNFTFSYTFEEVPLHSSYAHSQSLDRLMNPLIDQYLYYLNRTQNQSGSAQNKDLLFSRGSPAGMSVQPKNWLPGPCYRQQRVSKTKTDNNNSNFTWTGASKYNLNGRESIINPGTAMASHKDDEDKFFPMSGVMIFGKESAGASNTALDNVMITDEEEIKATNPVATERFGTVAVNFQSSSTDPATGDVHAMGALPGMVWQDRDVYLQGPIWAKIPHTDGHFHPSPLMGGFGLKNPPPQILIKNTPVPANPPAEFSATKFASFITQYSTGQVSVEIEWELQKENSKRWNPEVQYTSNYAKSASVDFTVDNNGLYTEPRPIGTRYLTRPL

SEQ ID NO: 274 - DNA, 2214 bp, Artificial Sequence
  source: /note="Description of Artificial Sequence: Synthetic polynucleotide"
atggctgctgacggttatcttccagattggctcgaggacaacctctctgagggcattcgcgagtggtgggacctgaaacctggagcccccaagcccaaggccaaccagcagaagcaggacgacggccggggtctggtgcttcctggctacaagtacctcggacccttcaacggactcgacaagggggagcccgtcaacgcggcggacgcagcggccctcgagcacgacaaggcctacgaccagcagctcaaagcgggtgacaatccgtacccgcggtataaccacgccgacgccgagtttcaggagcgtctgcaagaagatacgccttttgggggcaacctcgggcgagcagtcttccaggccaagaagcgggttctcgaacctctcggtctggttgaggaagctgctaagacggctcctggaaagaagagaccggtagaaccgtcacctcagcgttcccccgactcctccacgggcatcggcaagaaaggccagcagcccgctaaaaagagactgaactttggtcagactggcgactcagagtcagtccccgaccctcaaccaatcggagaaccaccagcaggcccctctggtctgggatctggtacaatggctgcaggcggtggcgctccaatggcagacaataacgaaggcgccgacggagtgggtaatgcctcaggaaattggcattgcgattccacatggctgggcgacagagtcatcaccaccagcacccgcacctgggccttgcccacctacaataaccacctctacaagcaaatctccagtgcttcaacgggggccagcaacgacaaccactacttcggctacagcaccccctgggggtattttgatttcaacagattccactgccacttttcaccacgtgactggcagcgactcatcaacaacaattggggattccggcccaagagactcaacttcaaactcttcaacatccaagtcaaggaggtcacgacgaatgatggcgtcacaaccatcgctaataaccttaccagcacggttcaagtcttctcggactcggagtaccagcttccgtacgtcctcggctctgcgcaccagggctgcctccctccgttcccggcggacgtgttcatgattccgcaatacggctacctgacgctcaacaatggcagccaagccgtgggacgttcatccttttactgcctggaatatttcccttctcagatgctgagaacgggcaacaactttaccttcagctacacctttgaggaagtgcctctccacagcagctacgcgcacagccagagcctggaccggctgatgaatcctctcatcgtccaatacctgtattacctgaacagaactcaaaatcagtccggaagtgcccaaaacaaggacttgctgttcagccgtgggtctccagctggcatgtctgttcagcccaaaaactggctacctggaccctgttatcggcagcagcgcgtttctaaaacaaaaacagacaacaacaacagcaattttacctggactggtgcttcaaaatataacctcaatgggcgtgaatccatcatcaaccctggcactgctatggcctcacacaaagacgacgaagacaagttctttcccatgagcggtgtcatgatttttggaaaagagagcgccggagcttcaaacactgcattggacaatgtcatgattacagacgaagaggaaattaaagccactaaccctgtggccaccgaaagatttgggaccgtggcagtcaatttccagagcagcagcacagaccctgcgaccggagatgtgcatgctatgggagcattacctggcatggtgtggcaagatagagacgtgtacctgcagggtcccatttgggccaaaattcctcacacagatggacactttcacccgtctcctcttatgggcggctttggactcaagaacccgcctcctcagatcctcatcaaaaacacgcctgttcctgcgaatcctccggcggagttttcagctacaaagtttgcttcattcatcacccaatactccacaggacaagtgagtgtggaaattgaatgggagctgcagaaagaaaacagcaagcgctggaatcccgaagtgcagtacacatccaattatgcaaaatctgccagcgttgattttactgtggacaacaatggactttatactgagcctcgccccattggcacccgttaccttacccgtcccctgtaa

SEQ ID NO: 275 - protein, 736 aa, Artificial Sequence
  source: /note="Description of Artificial Sequence: Synthetic polypeptide"
MAADGYLPDWLEDTLSEGIRQWWKLRPGPPPPKPAERHKDDSRGLVLPGYKYLGPFNGLDKGEPVNEADAAALEHDKAYDRQLDSGDNPYLKYNHADAEFQERLKEDTSFGGNLGRAVFQAKKRVLEPLGLVEEGAETAPGKKRPVEQSPQGPDSSSGIGKTGQQPAKKRLNFGQTGDSESVPDPQPLGEPPATPAAVGPTTMASGGGAPMADNNEGADGVGNASGNWHCDSTWLGDRVITTSTRTWALPTYNNHLYKQISSASTGASNDNHYFGYSTPWGYFDFNRFHCHFSPRDWQRLINNNWGFRPKRLNFKLFNIQVKEVTTNDGVTTIANNLTSTVQVFSDSEYQLPYVLGSAHQGCLPPFPADVFMIPQYGYLTLNNGSQAVGRSSFYCLEYFPSQMLRTGNNFTFSYTFEEVPFHSSYAHSQSLDRLMNPLIDQYLYYPNRTQNQSGSAQNKDLLFSRGSPAGMSVQPKNWLPGPCYRQQRVSKTKTDNNNSNFTWTGASKYNLNGRESIINPGTAMASHKDDEDKFFPMSGVMIFGKESAGASNTALDNVMITDEEEIKATNPVATERFGTVAVNFQSSSTDPATGDVHAMGALPGMVWQGRDVYLQGPIWAKIPHTDGHFHPSPLMGGFGLKNPPPQILIKNTPVPANPPAEFSATKFASFITQYSTGQVSVEIEWELQKENSKRWNPEVQYTSNYAKSANVDFTVDNNGLYTEPRPIGTRYLTRPL

SEQ ID NO: 276 - DNA, 2211 bp, Artificial Sequence
  source: /note="Description of Artificial Sequence: Synthetic polynucleotide"
atggctgccgatggttatcttccagattggctcgaggacactctctctgaaggaataagacagtggtggaagctcagacctggcccaccaccaccaaagcccgcagagcggcataaggacgacagcaggggtcttgtgcttcctgggtacaagtacctcggacccttcaacggactcgacaagggagagccggtcaacgaggcagacgccgcggccctcgagcacgacaaagcctacgaccggcagctcgacagcggagacaacccgtacctcaagtacaaccacgccgacgcggagtttcaggagcgccttaaagaagatacgtcttttgggggcaacctcgggcgagcagtcttccaggccaagaagcgggttctcgaacctctcggtctggttgaggaaggcgctgagacggctcctggaaagaaacgtccggtagagcagtcgccacaagggccagactcctcctcgggcatcggcaagacaggccagcagcccgctaaaaagagactcaattttggtcagactggcgactcagagtcagtccccgatccacaacctctcggagaacctccagcaacccccgctgctgtgggacctactacaatggcttcaggcggtggcgcaccaatggcagacaataacgaaggcgccgacggagtgggtaatgcctcaggaaattggcattgcgattccacatggctgggcgacagagtcatcaccaccagcacccgcacctgggccttgcccacctacaataaccacctctacaagcaaatctccagtgcttcaacgggggccagcaacgacaaccactacttcggctacagcaccccctgggggtattttgatttcaacagattccactgccacttttcaccacgtgactggcagcgactcatcaacaacaattggggattccggcccaagagactcaacttcaaactcttcaacatccaagtcaaggaggtcacgacgaatgatggcgtcacaaccatcgctaataaccttaccagcacggttcaagtcttctcggactcggagtaccagcttccgtacgtcctcggctctgcgcaccagggctgcctccctccgttcccggcggacgtgttcatgattccgcaatacggctacctgacgctcaacaatggcagccaagccgtgggacgttcatccttttactgcctggaatatttcccttctcagatgctgagaacgggcaacaactttaccttcagctacacctttgaggaagtgcctttccacagcagctacgcgcacagccagagcctggaccggctgatgaatcctctcatcgaccaatacctgtattacccgaacagaactcaaaatcagtccggaagtgcccaaaacaaggacttgctgtttagccgtgggtctccagctggcatgtctgttcagcccaaaaactggctacctggaccctgttatcggcagcagcgcgtttctaaaacaaaaacagacaacaacaacagcaattttacctggactggtgcttcaaaatataacctcaatgggcgtgaatccatcatcaaccctggcactgctatggcctcacacaaagacgacgaagacaagttctttcccatgagcggtgtcatgatttttggaaaagagagcgccggagcttcaaacactgcattggacaatgtcatgattacagacgaagaggaaattaaagccactaaccctgtggccaccgaaagatttgggaccgtggcagtcaatttccagagcagcagcacagaccctgcgaccggagatgtgcatgctatgggagcattacctggcatggtgtggcaaggtagagacgtgtacctgcagggtcccatttgggccaaaattcctcacacagatggacactttcacccgtctcctcttatgggcggctttggactcaagaacccgcctcctcagatcctcatcaaaaacacgcctgttcctgcgaatcctccggcggagttttcagctacaaagtttgcttcattcatcacccaatactccacaggacaagtgagtgtggaaattgaatgggagctgcagaaagaaaacagcaagcgctggaatcccgaagtgcagtacacatccaattatgcaaaatctgccaacgttgattttactgtggacaacaatggactttatactgagcctcgccccattggcacccgttaccttacccgtcccctgtaa

SEQ ID NO: 277 - protein, 736 aa, Artificial Sequence
  source: /note="Description of Artificial Sequence: Synthetic polypeptide"
MAADGYLPDWLEDTLSEGIRQWWKLRPGPPPPKPAERHKDDSRGLVLPGYKYLGPFNGLDKGEPVNEADAAALEHDKAYDRQLDSGDNPYLKYNHADAEFQERLKEDTSFGGNLGRAVFQAKKRVLEPLGLVEEGAKTAPGKKRPVEQSPQGPDSSSGIGKTGQQPAKKRLNFGQTGDSESVPDPQPLGEPPATPAAVGPTTMASGGGAPMADNNEGADGVGNASGNWHCDSTWLGDRVITTSTRTWALPTYNNHLYKQISSASTGASNDNHYFGYSTPWGYFDFNRFHCHFSPRDWQRLINNNWGFRPKRLNFKLFNIQVKEVTTNDGVTTIANNLTSTVQVFSDSEYQLPYVLGSAHQGCLPPFPADVFMIPQYGYLTLNNGSQAVGRSSFYCLEYFPSQMLRTGNNFTFSYTFEEVPFHSSYAHSQSLDRLMNPLIDQYLYYPNRTQNQSGSAQNKDLLFSRGSPAGMSVQPKNWLPGPCYRQQRVSKTKTDNNNSNFTWTGASKYNLNGRESIINPGTAMASHKDDEDKFFPMSGVMIFGKESAGASNTALDNVMITDEEEIKATNPVATERFGTVAVNFQSSSTDPATGDVHAMGALPGMVWQGRDVYLQGPIWAKIPHTDGHFHPSPLMGGFGLKNPPPQILIKNTPVPANPPAEFSATKFASFITQYSTGQVSVEIEWELQKENSKRWNPEVQYTSNYAKSANVDFTVDNNGLYTEPRPIGTRYLTRPL

SEQ ID NO: 278 - protein, 736 aa, Artificial Sequence
  source: /note="Description of Artificial Sequence: Synthetic polypeptide"
MAADGYLPDWLEDTLSEGIRQWWKLRPGPPPPKPAERHKDDSRGLVLPGYKYLGPFNGLDKGEPVNEADAAALEHDKAYDRQLDSGDNPYLKYNHADAEFQERLKEDTSFGGNLGRAVFQAKKRVLEPLGLVEEGAKTAPGKKRPVEQSPQGPDSSSGIGKTGQQPAKKRLNFGQTGDSESVPDPQPLGEPPATPAAVGPTTMASGGGAPMADNNEGADGVGNASGNWHCDSTWLGDRVITTSTRTWALPTYNNHLYKQISSASTGASNDNHYFGYSTPWGYFDFNRFHCHFSPRDWQRLINNNWGFRPKRLNFKLFNIQVKEVTTNDGVTTIANNLTSTVQVFSDSEYQLPYVLGSAHQGCLPPFPADVFMIPQYGYLTLNNGSQAVGRSSFYCLEYFPSQMLRTGNNFTFSYTFEEVPFHSSYAHSQSLDRLMNPLIDQYLYYLNRTQNQSGSAQNKDLLFSRGSPAGMSVQPKNWLPGPCYRQQRVSKTKTDNNNSNFTWTGASKYNLNGRESIINPGTAMASHKDDEDKFFPMSGVMIFGKESAGASNTALDNVMITDEEEIKATNPVATERFGTVAVNFQSSSTDPATGDVHAMGALPGMVWQGRDVYLQGPIWAKIPHTDGHFHPSPLMGGFGLKNPPPQILIKNTPVPANPPAEFSATKFASFITQYSTGQVSVEIEWELQKENSKRWNPEVQYTSNYAKSANVDFTVDNNGLYTEPRPIGTRYLTRPL

SEQ ID NO: 279 - protein, 736 aa, Artificial Sequence
  source: /note="Description of Artificial Sequence: Synthetic polypeptide"
MAADGYLPDWLEDTLSEGIRQWWKLRPGPPPPKPAERHKDDSRGLVLPGYKYLGPFNGLDKGEPVNEADAAALEHDKAYDRQLDSGDNPYLKYNHADAEFQERLKEDTSFGGNLGRAVFQAKKRVLEPLGLVEEGAKTAPGKKRPVEQSPQGPDSSSGIGKTGQQPAKKRLNFGQTGDSESVPDPQPLGEPPATPAAVGPTTMASGGGAPMADNNEGADGVGNASGNWHCDSTWLGDRVITTSTRTWALPTYNNHLYKQISSASTGASNDNHYFGYSTPWGYFDFNRFHCHFSPRDWQRLINNNWGFRPKRLNFKLFNIQVKEVTTNDGVTTIANNLTSTVQVFSDSEYQLPYVLGSAHQGCLPPFPADVFMIPQYGYLTLNNGSQAVGRSSFYCLEYFPSQMLRTGNNFTFSYTFEEVPFHSSYAHSQSLDRLMNPLIDQYLYYLNRTQNQSGSAQNKDLLFSRGSPAGMSVQPKNWLPGPCYRQQRVSKTKTDNNNSNFTWTGASKYNLNGRESIINPGTAMASHKDDEDKFFPMSGVMIFGKESAGASNTALDNVMITDEEEIKATNPVATERFGTVAVNFQSSSTDPATGDVHAMGALPGMVWQDRDVYLQGPIWAKIPHTDGHFHPSPLMGGFGLKNPPPQILIKNTPVPANPPAEFSATKFASFITQYSTGQVSVEIEWELQKENSKRWNPEVQYTSNYAKSANVDFTVDNNGLYTEPRPIGTRYLTRPL

SEQ ID NO: 280 - DNA, 2208 bp, Artificial Sequence
  source: /note="Description of Artificial Sequence: Synthetic polynucleotide"
atggctgccgatggctatcttccagattggctcgaggacactctctctgaaggaataagacagtggtggaagctcaaacctggcccaccaccaccaaagcccgcagagcggcatagggacgacagcaggggtcttgtgcttcctgggtacaagtacctcggacccttcaacggactcgacaagggagagccggtcaacgaggcagacgccgcggccctcgagcacgacaaagcctacgaccggcagctcgacagcggagacaacccgtacctcaagtacaaccacgccgacgcggagtttcaggagcgccttaaagaagatacgtcttttgggggcaacctcggacgagcagtcttccaggcgaaaaagagggttcttgaacctctgggcctggttgaggaacctgttaagacggctccgggaaaaaagaggccggtagagcactctcctgtggagccagactcctcctcgggaaccggaaaggcgggccagcagcctgcaagaaaaagattgaattttggtcagactggagacgcagactcagtacctgacccccagcctctcggacagccaccagcagccccctctggtctgggaactaatacgatggctacaggcagtggcgcaccaatggcagacaataacgagggcgccgacggagtgggtaattcctcgggaaattggcattgcgattccacatggatgggcgacagagtcatcaccaccagcacccgaacctgggccctgcccacctacaacaaccacctctacaaacaaatttccagccaatcaggagcctcgaacgacaatcactactttggctacagcaccccttgggggtattttgacttcaacagattccactgccacttttcaccacgtgactggcaaagactcatcaacaacaactggggattccgacccaagagactcaacttcaagctctttaacattcaagtcaaagaggtcacgcagaatgacggtacgacgacgattgccaataaccttaccagcacggttcaggtgtttactgactcggggtaccagctcccgtacgtcctcggctcggcgcatcaaggatgcctcccgccgttcccagcagacgtcttcatggtgccacagtatggataccccaccctgaacaacgggagtcaggcagtaggacgctcttcattttactgcctggagtactttccttctcagatgctgcgtaccggaaacaactttaccttcagctacacttttgaggacgttcctttccacagcagctacgctcacagccagagtctggaccgtctcatgaatcctctcatcgaccagtacctgtattacttgagcacaacaaacactccaagtggaaccaccacgcagtcaaggcttcagttttctcaggccggagcgagtgacattcgggaccagtctaggaactggcttcctggaccctgttaccgccagcagcgagtatcaaagacatctgcggataacaacaacagtgaatactcgtggactggagctaccaagtaccacctcaatggcagagactctctggtgaatccgggcccggccgtggcaagccacaaggacgatgaagaaaagttttttcctcagagcggggttctcatctttgggaagcaaggctcagagaaaacaaatgtggacattgaaaaggtcatgattacagacgaagaggaaatcaggacaaccaatcccgtggctacggagcagtatggttctgtatctaccaacctccagagaggcaacagacaagcagctaccgcagatgtcaacacacaaggcgttcttccaggcatggtctggcaggacagagatgtgtaccttcaggggcccatctgggcaaagattccacacacggacggacattttcacccctctcccctcatgggtggattcggacttaaacaccctcctccacagattctcatcaagaacaccccggtacctgcgaatccttcgaccaccttcagtgcggcaaagtttgcttccttcatcacacagtactccacgggacaggtcagcgtggagatcgagtgggagctgcagaaggaaaacagcaaacgctggaatcccgaaattcagtacacttccaactacaacaagtctgttaatgtggactttactgtggacactaatggcgtgtattcagagcctcgccccattggcaccagatacctgactcgtaatctgtaa

SEQ ID NO: 281 - protein, 735 aa, Artificial Sequence
  source: /note="Description of Artificial Sequence: Synthetic polypeptide"
MAADGYLPDWLEDTLSEGIRQWWKLKPGPPPPKPAERHRDDSRGLVLPGYKYLGPFNGLDKGEPVNEADAAALEHDKAYDRQLDSGDNPYLKYNHADAEFQERLKEDTSFGGNLGRAVFQAKKRVLEPLGLVEEPVKTAPGKKRPVEHSPVEPDSSSGTGKAGQQPARKRLNFGQTGDADSVPDPQPLGQPPAAPSGLGTNTMATGSGAPMADNNEGADGVGNSSGNWHCDSTWMGDRVITTSTRTWALPTYNNHLYKQISSQSGASNDNHYFGYSTPWGYFDFNRFHCHFSPRDWQRLINNNWGFRPKRLNFKLFNIQVKEVTQNDGTTTIANNLTSTVQVFTDSGYQLPYVLGSAHQGCLPPFPADVFMVPQYGYPTLNNGSQAVGRSSFYCLEYFPSQMLRTGNNFTFSYTFEDVPFHSSYAHSQSLDRLMNPLIDQYLYYLSTTNTPSGTTTQSRLQFSQAGASDIRDQSRNWLPGPCYRQQRVSKTSADNNNSEYSWTGATKYHLNGRDSLVNPGPAVASHKDDEEKFFPQSGVLIFGKQGSEKTNVDIEKVMITDEEEIRTTNPVATEQYGSVSTNLQRGNRQAATADVNTQGVLPGMVWQDRDVYLQGPIWAKIPHTDGHFHPSPLMGGFGLKHPPPQILIKNTPVPANPSTTFSAAKFASFITQYSTGQVSVEIEWELQKENSKRWNPEIQYTSNYNKSVNVDFTVDTNGVYSEPRPIGTRYLTRNL

SEQ ID NO: 282 - DNA, 2211 bp, Artificial Sequence
  source: /note="Description of Artificial Sequence: Synthetic polynucleotide"
atggctgccgacggttatcttccagattggctcgaggacactctctctgaaggaataagacagtggtggaagctcaaacctggcccaccaccaccaaagcccgcagagcggcataaggacgacagcaggggtcttgtgcttcctgggtacaagtacctcggacccttcaacggactcgacaagggagagccggtcaacgaggcagacgccgcggccctcgagcacgacaaagcctacgaccggcagctcgacagcggagacaacccgtacctcaagtacaaccacgccgacgcggagtttcaggagcgccttaaagaagatacgtcttttgggggcaacctcgggcgggcagtcttccaggccaagaagcgggttctcgaacctctcggtctggttgaggaaggcgctaagacggctcctggaaagaaacgtccggtagagcagtcgccacaagagccagactccccctcgggcatcggcaagacaggccagcagcccgctaaaaagagactcaattttggtcagactggcgactcagagtcagtccccgatccacaacctctcggagaacctccagcaacccccgctgctgtgggacctactacaatggcttcaggcggtggcgcaccaatggcagacaataacgaaggcgccgacggagtgggtaatgcctcaggaaattggcactgcgattccacatggctgggcgacagagtcatcaccaccagcacccgcacctgggccttgcccacctacaataaccacctctacaagcaaatctccagtgcttcaacgggggccagcaacgacaaccactacttcggctacagcaccccctgggggtattttgatttcaacagattccactgccacttttcaccacgtgactggcagcgactcatcaacaacaattggggattccggcccaagagactcaacttcaaactcttcaacatccaagtcaaggaggtcacgacgaatgatggcgtcacaaccatcgctaataaccttaccagcacggttcaagtcttctcggactcggagtaccagcttccgtacgtcctcggctctgcgcaccagggccgcctccctccgttcccggcggacgtgttcatgattccgcaatacggctacctgacgctcaacaatggcagccaagccgtgggacgttcatcctcttactgcctggaatatttcccttctcagatgctgagaacgggcaacaactttaccttcagctacacctttgaggaagtgcctctccacagcagctgcgcgcacagccagagcctggaccggctgatgaatcctctcatcgaccaatacctgtattacctgaacagaactcaaaatcagtccggaagtgcccaaaacagggacttgctgttcagccgtgggtctccagctggcatgtctgttcagcccaaaaactggctacctggaccctgttatcggcagcagcgcgtttctaaaacaaaaacagacaacaacaacagcaattttacctggactggtgcttcaaaatataacctcaatgggcgtgaatccatcatcaaccctggcactgctatggcctcacacaaagacgacgaagacaagttctttcccatgagcggtgtcatgatttttggaaaagagagcgccggagcttcaaacactgcattggacaatgtcatgattacagacgaagaggaaattaaagccactaaccctgtggccaccgaaagatttgggaccgtggcagtcaatttccagagcagcagcacagaccctgcgaccggagatgtgcatgctatgggagcattacctggcatggtgtggcaagatagagacgtgtacctgcagggtcccatttgggccaaaattcctcacacagatggacactttcacccgtctcctcttatgggcggctttggactcaagaacccgcctcctcagatcctcatcaaaaacacgcctgttcctgcgaatcctccggcggagttttcagctacaaagtttgcttcattcatcacccaatactccgcaggacaagtgagtgtggaaattgaatgggagctgcagaaagaaaacagcaagcgctggaatcccgaagtgcagtacacatccaattatgcaaaatctgccaacgttgattttactgtggacaacaatggactttatactgagcctcgccccattggcacccgttaccttacccgtcccctgtaa

SEQ ID NO: 283 - protein, 736 aa, Artificial Sequence
  source: /note="Description of Artificial Sequence: Synthetic polypeptide"
MAADGYLPDWLEDTLSEGIRQWWKLKPGPPPPKPAERHKDDSRGLVLPGYKYLGPFNGLDKGEPVNEADAAALEHDKAYDRQLDSGDNPYLKYNHADAEFQERLKEDTSFGGNLGRAVFQAKKRVLEPLGLVEEGAKTAPGKKRPVEQSPQEPDSPSGIGKTGQQPAKKRLNFGQTGDSESVPDPQPLGEPPATPAAVGPTTMASGGGAPMADNNEGADGVGNASGNWHCDSTWLGDRVITTSTRTWALPTYNNHLYKQISSASTGASNDNHYFGYSTPWGYFDFNRFHCHFSPRDWQRLINNNWGFRPKRLNFKLFNIQVKEVTTNDGVTTIANNLTSTVQVFSDSEYQLPYVLGSAHQGRLPPFPADVFMIPQYGYLTLNNGSQAVGRSSSYCLEYFPSQMLRTGNNFTFSYTFEEVPLHSSCAHSQSLDRLMNPLIDQYLYYLNRTQNQSGSAQNRDLLFSRGSPAGMSVQPKNWLPGPCYRQQRVSKTKTDNNNSNFTWTGASKYNLNGRESIINPGTAMASHKDDEDKFFPMSGVMIFGKESAGASNTALDNVMITDEEEIKATNPVATERFGTVAVNFQSSSTDPATGDVHAMGALPGMVWQDRDVYLQGPIWAKIPHTDGHFHPSPLMGGFGLKNPPPQILIKNTPVPANPPAEFSATKFASFITQYSAGQVSVEIEWELQKENSKRWNPEVQYTSNYAKSANVDFTVDNNGLYTEPRPIGTRYLTRPL

SEQ ID NO: 284 - protein, 736 aa, Artificial Sequence
  source: /note="Description of Artificial Sequence: Synthetic polypeptide"
MAADGYLPDWLEDTLSEGIRQWWKLKPGPPPPKPAERHKDDSRGLVLPGYKYLGPFNGLDKGEPVNEADAAALEHDKAYDRQLDSGDNPYLKYNHADAEFQERLKEDTSFGGNLGRAVFQAKKRVLEPLGLVEEGAKTAPGKKRPVEQSPQEPDSSSGIGKTGQQPAKKRLNFGQTGDSESVPDPQPLGEPPATPAAVGPTTMASGGGAPMADNNEGADGVGNASGNWHCDSTWLGDRVITTSTRTWALPTYNNHLYKQISSASTGASNDNHYFGYSTPWGYFDFNRFHCHFSPRDWQRLINNNWGFRPKRLNFKLFNIQVKEVTTNDGVTTIANNLTSTVQVFSDSEYQLPYVLGSAHQGCLPPFPADVFMIPQYGYLTLNNGSQAVGRSSFYCLEYFPSQMLRTGNNFTFSYTFEEVPLHSSCAHSQSLDRLMNPLIDQYLYYLNRTQNQSGSAQNRDLLFSRGSPAGMSVQPKNWLPGPCYRQQRVSKTKTDNNNSNFTWTGASKYNLNGRESIINPGTAMASHKDDEDKFFPMSGVMIFGKESAGASNTALDNVMITDEEEIKATNPVATERFGTVAVNFQSSSTDPATGDVHAMGALPGMVWQDRDVYLQGPIWAKIPHTDGHFHPSPLMGGFGLKNPPPQILIKNTPVPANPPAEFSATKFASFITQYSTGQVSVEIEWELQKENSKRWNPEVQYTSNYAKSANVDFTVDNNGLYTEPRPIGTRYLTRPL

SEQ ID NO: 285 - DNA, 2208 bp, Artificial Sequence
  source: /note="Description of Artificial Sequence: Synthetic polynucleotide"
atggctgccgatggctatcttccagattggctcgaggacactctctctgaaggaataagacagtggtggaagctcaaacctggcccaccaccaccaaagcccgcagagcggcatagggacgacagcaggggtcttgtgcttcctgggtacaagtacctcggacccttcaacggactcgacaagggagagccggtcaacgaggcagacgccgcggccctcgagcacgacaaagcctacgaccggcagctcgacagcggagacaacccgtacctcaagtacaaccacgccgacgcggagtttcaggagcgccttaaagaagatacgtcttttgggggcaacctcggacgagcagtcttccaggcgaaaaagagggttcttgaacctctgggcctggttggggaacctgttaagacggctccgggaaaaaagaggccggtagagcactctcctgtggagccagactcctcctcgggaaccggaaaggcgggccagcagcctgcaagaaaaagattgaattttggtcagactggagacgcagactcagtacctgacccccagcctctcggacagccaccagcagccccctctggtctgggaactaatacgatggctacaggcagtggcgcaccaatggcagacaataacgagggcgccgacggagtgggtaattcctcgggaaattggcattgcgattccacatggatgggcgacagagtcatcaccaccagcacccgaacctgggccctgcccacctacaacaaccacctctacaaacaaatttccagccaatcaggagcctcgaacgacagtcactactttggctacagcaccccttgggggtattttgacttcaacagattccactgccacttttcaccacgtgactggcaaagactcatcaacaacaactggggattccgacccaagagactcaacttcaagctctttaacattcaagtcaaagaggtcacgcagaatgacggtacgacgacgattgccaataaccttaccagcacggttcaggtgtttactgactcggagtaccagctcccgtacgtcctcggctcggcgcatcaaggatgcctcccgccgttcccagcagacgtcttcatggtgccacagtatggatacctcaccctgaacaacgggagtcaggcagtaggacgctcttcattttactgcctggagtactttccttctcagatgctgcgtaccggaaacaactttaccttcagctacacttttgaggacgttcctttccacagcagctacgctcacagccagagtctggaccgtctcatgaatcctctcatcgaccagtacctgtattacttgagcacaacaaacactccaagtggaaccaccacgcagtcaaggctccagttttctcaggccggagcgagtgacattcgggaccagtctaggaactggcttcctggaccctgttaccgccagcagcgagtatcaaagacatctgcggataacaacaacagtgaatactcgtggactggagctaccaagtaccacctcaatggcagagactctctggtgaatccgggcccggccatggcaagccacaaggacaatgaagaaaagttttttcctcagagcggggttctcatctttgggaagcaaggctcagagaaaacaaatgtggacattgaaaaggtcatgattacagacgaagaggaaatcaggacaaccaatcccgtggctacggagcagtatggttctgtatctaccaacctccagagaggcaacagacaagcagctaccgcagatgtcaacacacaaggcgttcttccaggcatggtctggcaggacagagatgtgtaccttcaggggcccatctgggcaaagattccacacacggacggacattttcacccctctcccctcatgggtggattcggacttaaacaccctcctccacagattctcatcaagaacaccccggtacctgcgaatccttcgaccaccttcagtgcggcaaagtttgcttccttcatcacacagtactccacgggacaggtcagcgtggagatcgagtgggagctgcagaaggaaaacagcaaacgctggaatcccgaaattcagtacacttccaactacaacaagtctgttaatgtggactttactgtggacactaatggcgtgtattcagagcctcgccccattggcaccagatacctgactcgtaatctgtaa

SEQ ID NO: 286 - protein, 735 aa, Artificial Sequence
  source: /note="Description of Artificial Sequence: Synthetic polypeptide"
MAADGYLPDWLEDTLSEGIRQWWKLKPGPPPPKPAERHRDDSRGLVLPGYKYLGPFNGLDKGEPVNEADAAALEHDKAYDRQLDSGDNPYLKYNHADAEFQERLKEDTSFGGNLGRAVFQAKKRVLEPLGLVGEPVKTAPGKKRPVEHSPVEPDSSSGTGKAGQQPARKRLNFGQTGDADSVPDPQPLGQPPAAPSGLGTNTMATGSGAPMADNNEGADGVGNSSGNWHCDSTWMGDRVITTSTRTWALPTYNNHLYKQISSQSGASNDSHYFGYSTPWGYFDFNRFHCHFSPRDWQRLINNNWGFRPKRLNFKLFNIQVKEVTQNDGTTTIANNLTSTVQVFTDSEYQLPYVLGSAHQGCLPPFPADVFMVPQYGYLTLNNGSQAVGRSSFYCLEYFPSQMLRTGNNFTFSYTFEDVPFHSSYAHSQSLDRLMNPLIDQYLYYLSTTNTPSGTTTQSRLQFSQAGASDIRDQSRNWLPGPCYRQQRVSKTSADNNNSEYSWTGATKYHLNGRDSLVNPGPAMASHKDNEEKFFPQSGVLIFGKQGSEKTNVDIEKVMITDEEEIRTTNPVATEQYGSVSTNLQRGNRQAATADVNTQGVLPGMVWQDRDVYLQGPIWAKIPHTDGHFHPSPLMGGFGLKHPPPQILIKNTPVPANPSTTFSAAKFASFITQYSTGQVSVEIEWELQKENSKRWNPEIQYTSNYNKSVNVDFTVDTNGVYSEPRPIGTRYLTRNL

SEQ ID NO: 287 - protein, 737 aa, Artificial Sequence
  source: /note="Description of Artificial Sequence: Synthetic polypeptide"
RMAADGYLPDWLEDNLSEGIREWWDLKPGAPKPKANQQKQDDGRGLVLPGYKYLGPFNGLDKGEPVNAADAAALEHDKAYDQQLKAGDNPYLRYNHADAEFQERLQEDTSFGGNLGRAVFQAKKRVLEPLGLVEEGAKTAPGKKRPVEQSPQEPDSSSGIGKTGQQPAKKRLNFGQTGDSESVPDPQPLGEPPATPAAVGPTTMASGGGAPMADNNEGADGVGNASGNWHCDSTWLGDRVITTSTRTWALPTYNNHLYKQISSTSTGASNDNHYFGYGTPWGYFDFNRFHCHFSPRDWQRLINNNWGFRPKRLNFKLFNIQVEEVTTNDGVTTIANNLTSTVQVFSDSEYQLPYVLGSAHQGCLPPFPADVFMIPQYGYLTLNNGSQAVGRSSFYCLEYFPSQMLRTGNNFTFSYTFEEVPFHSSYAHSQSLDRLMNPLIDQYLYYLNRTQNQSGSAQNKDLLFSRGSPAGMSVQPKNWLPGPCYRQQRVSKTKTDNNNSNFTWTGASKYNLNGRESIINPGTAVASHKDDEDKFFPMSGVMIFGKESAGASSTALDNVMITDEEEIKATNPVATERFGTVAVNFQSSSTDPATGDVHAMGALPGMVWQDRDVYLQGPIWAKIPHTDGHFHPSPLMGGFGLKNPPPQILIKNTPVPANPPAEFSATKFASFITQYSTGQVSVEIEWELQKENSKRWNPEVQYTSNYAKSANVDFTVDNNGLYTEPRPIGTRYLTRPL

SEQ ID NO: 288 - protein, 736 aa, Artificial Sequence
  source: /note="Description of Artificial Sequence: Synthetic polypeptide"
MAADGYLPDWLEDNLSEGIREWWDLKPGAPKPKANQQKQDDGRGLVLPGYKYLGPFNGLDKGEPVNAADAAALEHDKAYDQQLKAGDNPYLRYNHADAEFQERLQEDTSFGGNLGRAVFQAKKRVLEPLGLVEEGAKTAPGKKRPVEQSPQEPDSSSGIGKTGQQPAKKRLNFGQTGDSESVPDPQPLGEPPATPAAVGPTTMASGGGAPMADNNEGADGVGNASGNWHCDSTWLGDRVITTSTRTWALPTYNNHLYKQISSTSTGASNDNHYFGYGTPWGYFDFNRFHCHFSPRDWQRLINNNWGFRPKRLNFKLFNIQVEEVTTNDGVTTIANNLTSTVQVFSDSEYQLPYVLGSAHQGCLPPFPADVFMIPQYGYLTLNNGSQAVGRSSFYCLEYFPSQMLRTGNNFTFSYTFEEVPFHSSYAHSQSLDRLMNPLIDQYLYYLNRTQNQSGSAQNKDLLFSRGSPAGMSVQPKNWLPGPCYRQQRVSKTKTDNNNSNFTWTGASKYNLNGRESIINPGTAVASHKDDEDKFFPMSGVMIFGKESAGASSTALDNVMITDEEEIKATNPVATERFGTVAVNFQSSSTDPATGDVHAMGALPGMVWQDRDVYLQGPIWAKIPHTDGHFHPSPLMGGFGLKNPPPQILIKNTPVPANPPAEFSATKFASFITQYSTGQVSVEIEWELQKENSKRWNPEVQYTSNYAKSANVDFTVDNNGLYTEPRPIGTRYLTRPL

SEQ ID NO: 289 - DNA, 2211 bp, Artificial Sequence
  source: /note="Description of Artificial Sequence: Synthetic polynucleotide"
atggctgccgatggttatcttccagattggctcgaggacaacctctctgagggcattcgcgagtggtgggacttgaaacctggagccccgaagcccaaagccaaccagcaaaagcaggacgacggccggggtctggtgcttcctggctacaagtacctcggacccttcaacggactcgacaagggggagcccgtcaacgcggcggacgcagcggccctcgagcacgacaaggcctacgaccagcagctcaaagcgggtgacaatccgtacctgcggtataaccacgccgacgccgagtttcaggagcgtctgcaagaagatacgtcttttgggggcaacctcgggcgagcagtcttccaggccaagaagcgggttctcgaacctctcggtctggttgaggaaggcgctaagacggctcctggaaagaaacgtccggtagagcagtcgccacaagagccagactcctcctcgggcatcggcaagacaggccagcagcccgctaaaaagagactcaattttggccagactggcgactcagagtcagtccccgatccacaacctctcggagaacctccagcaacccccgctgctgtgggacctactacaatggcttcaggcggtggcgcaccaatggcagacaataacgaaggcgccgacggagtgggtaatgcctcaggaaattggcattgcgattccacatggctgggcgacagagtcatcaccaccagcacccgcacctgggccttgcccacctacaataaccacctctacaagcaaatctccagtacttcaacgggggccagcaacgacaaccactacttcggctacggcaccccctgggggtattttgatttcaacagattccactgccacttttcaccacgtgactggcagcgactcatcaacaacaattggggattccggcccaagagactcaacttcaaactcttcaacatccaagtcgaggaggtcacgacgaatgatggcgtcacaaccatcgctaataaccttaccagcacggttcaagtcttctcggactcggagtaccagcttccgtacgtcctcggctctgcgcaccagggctgcctccctccgttcccggcggacgtgttcatgattccgcaatacggctacctgacgctcaacaatggcagccaagccgtgggacgttcatccttttactgcctggaatatttcccttctcagatgctgagaacgggcaacaactttaccttcagctacacctttgaggaagtgcctttccacagcagctacgcgcacagccagagcctggaccggctgatgaatcctctcatcgaccaatacctgtattacctgaacagaacacaaaatcagtccggaagtgcccaaaacaaggacttgctgtttagccgtgggtctccagctggcatgtctgttcagcccaaaaactggctacctggaccctgttatcggcagcagcgcgtttctaaaacaaaaacagacaacaacaacagcaattttacctggactggtgcttcaaaatataacctcaatgggcgtgaatccatcatcaaccctggcaccgctgtggcctcacacaaagacgacgaagacaagttctttcccatgagcggtgtcatgatttttggaaaagagagcgccggagcttcaagcactgcattggacaatgtcatgattacagacgaagaggaaattaaagccactaaccctgtggccaccgaaagatttgggaccgtggcagtcaatttccagagcagcagcacagaccctgcgaccggagatgtgcatgctatgggagcattacctggcatggtgtggcaagatagagacgtgtacctgcagggtcccatttgggccaaaattcctcacacagatggacactttcacccgtctcctcttatgggcggctttggactcaagaacccgcctcctcagatcctcatcaaaaacacgcctgttcctgcgaatcctccggcggagttttcagctacaaagtttgcttcattcatcacccaatactccacaggacaagtgagtgtggaaattgaatgggagctgcagaaagaaaacagcaagcgctggaatcccgaagtgcagtacacatccaattatgcaaaatctgccaacgttgattttactgtggacaacaatggactttatactgagcctcgccccattggcacccgttaccttacccgtcccctgtaa

SEQ ID NO: 290 - protein, 737 aa, Artificial Sequence
  source: /note="Description of Artificial Sequence: Synthetic polypeptide"
RMAADGYLPDWLEDNLSEGIREWWDLKPGAPKPKANQQKQDDGRGLVLPGYKYLGPFNGLDKGEPVNAADAAALEHDKAYDQQLKAGDNPYLRYNHADAEFQERLQEDTSFGGNLGRAVFQAKKRVLEPLGLVEEGAKTAPGKKRPVEQSPQEPDSSSGIGKTGQQPAKKRLNFGQTGDSESVPDPQPLGEPPATPAAVGPTTMASGGGAPMADNNEGADGVGNASGNWHCDSTWLGDRVITTSTRTWALPTYNNHLYKQISSTSTGASNDNHYFGYSTPWGYFDFNRFHCHFSPRDWQRLINNNWGFRPKRLNFKLFNIQVEEVTTNDGVTTIANNLTSTVQVFSDSEYQLPYVLGSAHQGCLPPFPADVFMIPQYGYLTLNNGSQAVGRSSFYCLEYFPSQMLRTGNNFTFSYTFEEVPFHSSYAHSQSLDRLMNPLIDQYLYYLNRTQNQSGSAQNKDLLFSRGSPAGMSVQPKNWLPGPCYRQQRVSKTKTDNNNSNFTWTGASKYNLNGRESIINPGTAVASHKDDEDKFFPMSGVMIFGKESAGASSTALDNVMITDEEEIKATNPVATERFGTVAVNFQSSSTDPATGDVHAMGALPGMVWQDRDVYLQGPIWAKIPHTDGHFHPSPLMGGFGLKNPPPQILIKNTPVPANPPAEFSATKFASFITQYSTGQVSVEIEWELQKENSKRWNPEVQYTSNYAKSANVDFTVDNNGLYTEPRPIGTRYLTRPL

SEQ ID NO: 291 - protein, 737 aa, Artificial Sequence
  source: /note="Description of Artificial Sequence: Synthetic polypeptide"
RMAADGYLPDWLEDNLSEGIREWWDLKPGAPKPKANQQKQDDGRGLVLPGYKYLGPFNGLDKGEPVNAADAAALEHDKAYDQQLKAGDNPYLRYNHADAEFQERLQEDTSFGGNLGRAVFQAKKRVLEPLGLVEEGAKTAPGKKRPVEQSPQEPDSSSGIGKTGQQPAKKRLNFGQTGDSESVPDPQPLGEPPATPAAVGPTTMASGGGAPMADNNEGADGVGNASGNWHCDSTWLGDRVITTSTRTWALPTYNNHLYKQISSTSTGASNDNHYFGYSTPWGYFDFNRFHCHFSPRDWQRLINNNWGFRPKRLNFKLFNIQVKEVTTNDGVTTIANNLTSTVQVFSDSEYQLPYVLGSAHQGCLPPFPADVFMIPQYGYLTLNNGSQAVGRSSFYCLEYFPSQMLRTGNNFTFSYTFEEVPFHSSYAHSQSLDRLMNPLIDQYLYYLNRTQNQSGSAQNKDLLFSRGSPAGMSVQPKNWLPGPCYRQQRVSKTKTDNNNSNFTWTGASKYNLNGRESIINPGTAVASHKDDEDKFFPMSGVMIFGKESAGASSTALDNVMITDEEEIKATNPVATERFGTVAVNFQSSSTDPATGDVHAMGALPGMVWQDRDVYLQGPIWAKIPHTDGHFHPSPLMGGFGLKNPPPQILIKNTPVPANPPAEFSATKFASFITQYSTGQVSVEIEWELQKENSKRWNPEVQYTSNYAKSANVDFTVDNNGLYTEPRPIGTRYLTRPL

SEQ ID NO: 292 - protein, 737 aa, Artificial Sequence
  source: /note="Description of Artificial Sequence: Synthetic polypeptide"
RMAADGYLPDWLEDNLSEGIREWWDLKPGAPKPKANQQKQDDGRGLVLPGYKYLGPFNGLDKGEPVNAADAAALEHDKAYDQQLKAGDNPYLRYNHADAEFQERLQEDTSFGGNLGRAVFQAKKRVLEPLGLVEEGAKTAPGKKRPVEQSPQEPDSSSGIGKTGQQPAKKRLNFGQTGDSESVPDPQPLGEPPATPAAVGPTTMASGGGAPMADNNEGADGVGNASGNWHCDSTWLGDRVITTSTRTWALPTYNNHLYKQISSTSTGASNDNHYFGYSTPWGYFDFNRFHCHFSPRDWQRLINNNWGFRPKRLNFKLFNIQVKEVTTNDGVTTIANNLTSTVQVFSDSEYQLPYVLGSAHQGCLPPFPADVFMIPQYGYLTLNNGSQAVGRSSFYCLEYFPSQMLRTGNNFTFSYTFEEVPFHSSYAHSQSLDRLMNPLIDQYLYYLNRTQNQSGSAQNKDLLFSRGSPAGMSVQPKNWLPGPCYRQQRVSKTKTDNNNSNFTWTGASKYNLNGRESIINPGTAVASHKDDEDKFFPMSGVMIFGKESAGANSTALDNVMITDEEEIKATNPVATERFGTVAVNFQSSSTDPATGDVHAMGALPGMVWQDRDVYLQGPIWAKIPHTDGHFHPSPLMGGFGLKNPPPQILIKNTPVPANPPAEFSATKFASFITQYSTGQVSVEIEWELQKENSKRWNPEVQYTSNYAKSANVDFTVDNNGLYTEPRPIGTRYLTRPL

SEQ ID NO: 293 - DNA, 2208 bp, Artificial Sequence
  source: /note="Description of Artificial Sequence: Synthetic polynucleotide"
atggctgccgatggttatcttccagattggctcaaggacactctctctgaaggaataagacagtggtggaagctcaaacctggcccaccaccaccaaagcccgcagagcggcataaggacgacagcgggggtcttgtgcttcctgggtacaagtacctcggacccttcaacggactcgacaagggagagccggtcaacgaggcagacgccgcggccctcgagtacgacaaggcctacgaccggcagctcgacagcggagacaacccgtacctcaagtacaaccacgccgacgcggagtttcaggagcgccttaaagaagatacgtcttttgggggcaacctcggacgagcagtcttccaggcgaaaaagagggttcttgaacctctgggcctggttgaggaacctgttaagacggctccgggaaaaaagaggccggtagagcactctcctgtggagccagactcctcctcgggaacaggaaaagcgggccagcagcctgcgagaaagagattgaattttggtcagactggagacgcagactccgtacctgacccccagcctctcggacagccaccagcagccccctctggtctgggaactaatacgatggctacaggcagtggcgcaccaatggcagacaataacgagggcgccgacggagtgggtaattcctcgggaagttggcattgcgattccacatggatgggcgacagagtcatcaccaccagcacccgaacctgggctctgcccacctacaacaaccatctgtacaagcagatctccagccaatcaggagccagcaacgacaaccactactttggctacagcaccccttgggggtattttgacttcaacagattccactgccacttttcaccacgtgactggcaaagactcatcaacaacaactggggattccggcccaagagactcaacttcaagctctttaacattcaagtcaaggaggtcacgcagaatgacggtacgacgacgattgccaataaccttaccagcacggttcaggtgtttactgactcggagtaccagctcccgtacgtccccggctcggcgcatcaaggatgcctcccgccgttcccagcagacgtcttcatggtgccacagtatggatacctcaccctgaacaacgggagtcaggcagtaggacgctcttcattttactgcctggagtactttccttctcagatgcttcgtaccggaaacaactttaccttcagctacacctttgaggatgttcctttccacagcagctacgctcacagccagagtttggaccgtctcatgaatcctctcatcgaccagtacctgtattacttgagcagaacaaacactccaagcggaaccaccacgcagtccaggcttcagttttctcaggccggagcaagtgacattcgggaccagtctaggaactggcttcctggaccctgttaccgccagcagcgagtatcaaagacagctgcggacaacaacaacagtgaatactcgtggactggagctaccaagtaccacctcaatggcagagactctctggtgaatccgggcccggccatggccagccacaaggacgatgaagaaaagttttttcctcaaagcggggttctcatctttgggaagcaaggctcagagaaaacaaatgtggacattgaaaaggtcatgattacagacgaagaggaaatcagaaccaccaatcccgtggccacggagcagtatggttctgtatctaccaacctccagagcggcaacacacaagcagctactgcagatgtcaacacacaaggcgttcttccaggcatggtctggcaggacagagacgtgcacctgcaggggcctatctgggcaaagattccacacacggacggacattttcacccctctcccctcatgggcggatttggacttaaacaccctcctccacagattctcatcaagaacaccccggtacctgcaaatccttcgaccaccttcagtgcggcaaagtttgcttccttcatcacacagtattccacagggcaggtcagcgtggagatcgagtgggagctgcagaaggagaacagcaaacgctggaaccccgagatccagtacacttccaactacaacaaatctgttaatgtggactttactgtggacactaatggtgtgtattcagagcctcgccccattggcaccagatacctgactcgtaatctgtaa

SEQ ID NO: 294 - protein, 735 aa, Artificial Sequence
  source: /note="Description of Artificial Sequence: Synthetic polypeptide"
MAADGYLPDWLKDTLSEGIRQWWKLKPGPPPPKPAERHKDDSGGLVLPGYKYLGPFNGLDKGEPVNEADAAALEYDKAYDRQLDSGDNPYLKYNHADAEFQERLKEDTSFGGNLGRAVFQAKKRVLEPLGLVEEPVKTAPGKKRPVEHSPVEPDSSSGTGKAGQQPARKRLNFGQTGDADSVPDPQPLGQPPAAPSGLGTNTMATGSGAPMADNNEGADGVGNSSGSWHCDSTWMGDRVITTSTRTWALPTYNNHLYKQISSQSGASNDNHYFGYSTPWGYFDFNRFHCHFSPRDWQRLINNNWGFRPKRLNFKLFNIQVKEVTQNDGTTTIANNLTSTVQVFTDSEYQLPYVPGSAHQGCLPPFPADVFMVPQYGYLTLNNGSQAVGRSSFYCLEYFPSQMLRTGNNFTFSYTFEDVPFHSSYAHSQSLDRLMNPLIDQYLYYLSRTNTPSGTTTQSRLQFSQAGASDIRDQSRNWLPGPCYRQQRVSKTAADNNNSEYSWTGATKYHLNGRDSLVNPGPAMASHKDDEEKFFPQSGVLIFGKQGSEKTNVDIEKVMITDEEEIRTTNPVATEQYGSVSTNLQSGNTQAATADVNTQGVLPGMVWQDRDVHLQGPIWAKIPHTDGHFHPSPLMGGFGLKHPPPQILIKNTPVPANPSTTFSAAKFASFITQYSTGQVSVEIEWELQKENSKRWNPEIQYTSNYNKSVNVDFTVDTNGVYSEPRPIGTRYLTRNL

SEQ ID NO: 295 - DNA, 2208 bp, Artificial Sequence
  source: /note="Description of Artificial Sequence: Synthetic polynucleotide"
atggctgccgatggttatcttccagattggctcgaggacactctctctgaaggaataagacagtggtggaagctcaaacctggcccaccaccaccaaagcccgcagagcggcataaggacgacagcaggggtcttgtgcttcctgggtacaagtacctcggacccttcaacggactcgacaagggggagccggtcaacgaggcagacgccgcggccctcgagcacgacaaggcctacgaccggcagctcgacagcggagacaacccgtacctcaagtacaaccacgccgacgcagagtttcaggagcgccttaaagaagatacgtcttttgggggcaacctcggacgagcagtcttccaggcgaaaaagagggttcttgaacctctgggcctggttgaggaacctgttaagacggctccgggaaaaaagaggccggtagagcactctcctgtggagccagactcctcctcgggaaccggaaaagcgggccagcagcctgcaagaaaaagattaaattttggtcagactggagacgcagactccgtacctgacccccagcctctcggacagccaccagcagccccctctggtctgggatctactacaatggctacaggcagtggcgcaccaatggcagacaataacgagggtgccgatggagtgggtaattcctcaggaaattggcattgcgattcccaatggctgggcgacagagtcatcaccaccagcacccgaacctgggccctgcccacatacaacaaccacctctacaagcaaatctccagccaatcaggagccagcaacgacaaccactactttggctacagcaccccctgggggtattttgacttcaacagattccactgccacttttcaccacgtgactggcaaagactcatcaacaacaactggggattccggcccaaaagactcaacttcaagctctttaatattcaagtcaaagaggtcacgcagaatgacggtacgacgacgattgccaataaccttaccagcacggttcaggtgtttactgactcggagtaccagctcccgtacgtcctgggctcggcgcatcaaggatgcctcccgccgtttccagcggacgtcttcatggtcccacagtatggatacctcaccctgaacaacgggagtcaggcggtaggacgctcttccttttactgcctggagtactttccttctcagatgctgcgtactggaaacaactttcagttcagctacacttttgaagacgtgcctttccacagcagctacgctcacagccagagtctggatcggctgatgaatcctctgatcgaccagtacctgtattatctgaacaagacacaaacaaatagtggaactcttcagcagtctcggctactgtttagccaagctggaccaaccaacatgtctcttcaagctaaaaactggctgcctggaccttgctacagacagcagcgtctgtcaaaacaggcaaacgacaacaacaacagcaactttccctggactgcagctacaaagtatcatctaaatggccgggactcgttggttaatccaggaccagctatggccagtcgcaaggatgacgaagaaaagtttttccccatgcatggaaccctgatatttggtaaacaaggaacaaatgccaacgacgcggatttggaaaatgtcatgattacagatgaagaagaaatcagggccaccaatcccgtggctacggagcagtacgggactgtgtcaaataatttgcaaaactcaaacactggtccaactactggaactgtcaatcaccaaggagcgttacctggtatggtgtggcaggatcgagacgtgtacctgcagggacccatttgggccaagattcctcacaccgatggacactttcatccttctccactgatgggaggttttggactcaaacacccgcctcctcagatcatgatcaaaaacactcccgttccagccaatcctcccacaaacttcagttctgccaagtttgcttctttcatcacacagtattccacgggacaggtcagcgtggagatcgagtgggagctgcagaaggagaacagcaaacgctggaatcccgaaattcagtacacttccaactacaacaagtctgttaatgtggactttactgtggacactaatggtgtgtattcagagcctcgccccattggcaccagatacctgactcgtaatctgtaa

SEQ ID NO: 296 - protein, 735 aa, Artificial Sequence
  source: /note="Description of Artificial Sequence: Synthetic polypeptide"
MAADGYLPDWLEDTLSEGIRQWWKLKPGPPPPKPAERHKDDSRGLVLPGYKYLGPFNGLDKGEPVNEADAAALEHDKAYDRQLDSGDNPYLKYNHADAEFQERLKEDTSFGGNLGRAVFQAKKRVLEPLGLVEEPVKTAPGKKRPVEHSPVEPDSSSGTGKAGQQPARKRLNFGQTGDADSVPDPQPLGQPPAAPSGLGSTTMATGSGAPMADNNEGADGVGNSSGNWHCDSQWLGDRVITTSTRTWALPTYNNHLYKQISSQSGASNDNHYFGYSTPWGYFDFNRFHCHFSPRDWQRLINNNWGFRPKRLNFKLFNIQVKEVTQNDGTTTIANNLTSTVQVFTDSEYQLPYVLGSAHQGCLPPFPADVFMVPQYGYLTLNNGSQAVGRSSFYCLEYFPSQMLRTGNNFQFSYTFEDVPFHSSYAHSQSLDRLMNPLIDQYLYYLNKTQTNSGTLQQSRLLFSQAGPTNMSLQAKNWLPGPCYRQQRLSKQANDNNNSNFPWTAATKYHLNGRDSLVNPGPAMASRKDDEEKFFPMHGTLIFGKQGTNANDADLENVMITDEEEIRATNPVATEQYGTVSNNLQNSNTGPTTGTVNHQGALPGMVWQDRDVYLQGPIWAKIPHTDGHFHPSPLMGGFGLKHPPPQIMIKNTPVPANPPTNFSSAKFASFITQYSTGQVSVEIEWELQKENSKRWNPEIQYTSNYNKSVNVDFTVDTNGVYSEPRPIGTRYLTRNL

SEQ ID NO: 297 - DNA, 2208 bp, Artificial Sequence
  source: /note="Description of Artificial Sequence: Synthetic polynucleotide"
atggctgccgatggttatcttccagattggctcgaggacactctctctgaaggaataagacagtggtggaagctcaaacctggcccaccaccaccaaagcccgcagagcggcataaggacgacagcaggggtcttgtgcttcctgggtacaagtacctcggacccttcaacggactcgacaagggagagccggtcaacgaggcagacgccgcggccctcgagcacgacaaagcctacgaccggcagctcgacagcggagacaacccgtacctcaagtacaaccacgccgacgcggagtttcaggagcgccttaaagaagatacgtcttttgggggcaacctcggacgagcagtcttccaggcgaaaaagagggttcttgaacctctgggcctggttggggaacctgtcaagacggctccaggaaaaaagaggccggtagagcactctcctgtggagccagactcctcctcgggaaccggaaaggcgggccagcagcctgcaagaaaaagattgaattttggtcagactggagacgcagactcagtacctgacccccagcctctcggacagccaccagcagccccctctggtctgggaactaatacgatggctacaggcagtggcgcaccaatggcagacaataacgagggcgccgacggagtgggtaattcctcgggaaattggcattgcgattccacatggatgggcgacagagtcatcaccaccagcacccgaacctgggccctgcccacctacaacaaccacctctacaaacaaatttccagccaatcaggagcctcgaacgacaatcactactttggctacagcaccccttgggggtattttgacttcaacagattccactgccacttttcaccacgtgactggcaaagactcatcaacaacaactggggattccgacccaagagactcaacttcaagctctttaacattcaagtcaaagaggtcacgcagaatgacggtacgacgacgattgccaataaccttaccagcacggttcaggtgtttactgactcggagtaccagctcccgtacgtcctcggctcggcgcatcaaggatgcctcccgccgttcccagcagacgtcttcatggtgccacagtatggatacctcaccctgaacaacgggagtcaggcagtaggacgctcttcattttactgcctggagtactttccttctcagatgctgcgtaccggaaacaactttaccttcagctacacttttgaggacgttcctttccacagcggctacgctcacagccagagtctggaccgtctcatgaatcctctcatcgaccagtacctgtattacttgagcacaacaaacactccaagtggaaccaccacgcagtcaaggcttcagttttctcaggccggagcgagtgacattcgggaccagtctaggaactggcttcctggaccctgttaccgccagcagcgagtatcaaagacatctgcggataacaacaacagtgaatactcgtggactggagctaccaagtaccacctcaatggcagagactctctggtgaatccgggcccggccatggcaagccacaaggacaatgaagaaaagttttttcctcagagcggggttctcatctttgggaagcaaggctcagagaaaacaaatgtggacattgaaaaggtcatgattacagacgaagaggaaatcaggacaaccaatcccgtggctacggagcagtacggttctgtatctaccaacctccagagaggcaacagacaagcagctaccgcagatgtcaacacacaaggcgttcttccaggcatggtctggcaggacagagatgtgtaccttcaggggcccatctgggcaaagattccacacacggacggacattttcacccctctcccctcatgggtggattcggacttaaacaccctcctccacagattctcatcaagaacaccccggtacctgcgaatccttcgaccaccttcagtgcggcaaagtttgcttccttcatcacacagtactccacgggacaggtcagcgtggagatcgagtgggagctgcagaaggaaaacagcaaacgctggaatcccgaaattcagtacacttccaactacaacaagtctgttaatgtggactttactgtggacactaatggcgtgtattcagagcctcgccccattggcaccagatacctgactcgtaatctgtaa

SEQ ID NO: 298 - protein, 735 aa, Artificial Sequence
  source: /note="Description of Artificial Sequence: Synthetic polypeptide"
MAADGYLPDWLEDTLSEGIRQWWKLKPGPPPPKPAERHKDDSRGLVLPGYKYLGPFNGLDKGEPVNEADAAALEHDKAYDRQLDSGDNPYLKYNHADAEFQERLKEDTSFGGNLGRAVFQAKKRVLEPLGLVGEPVKTAPGKKRPVEHSPVEPDSSSGTGKAGQQPARKRLNFGQTGDADSVPDPQPLGQPPAAPSGLGTNTMATGSGAPMADNNEGADGVGNSSGNWHCDSTWMGDRVITTSTRTWALPTYNNHLYKQISSQSGASNDNHYFGYSTPWGYFDFNRFHCHFSPRDWQRLINNNWGFRPKRLNFKLFNIQVKEVTQNDGTTTIANNLTSTVQVFTDSEYQLPYVLGSAHQGCLPPFPADVFMVPQYGYLTLNNGSQAVGRSSFYCLEYFPSQMLRTGNNFTFSYTFEDVPFHSGYAHSQSLDRLMNPLIDQYLYYLSTTNTPSGTTTQSRLQFSQAGASDIRDQSRNWLPGPCYRQQRVSKTSADNNNSEYSWTGATKYHLNGRDSLVNPGPAMASHKDNEEKFFPQSGVLIFGKQGSEKTNVDIEKVMITDEEEIRTTNPVATEQYGSVSTNLQRGNRQAATADVNTQGVLPGMVWQDRDVYLQGPIWAKIPHTDGHFHPSPLMGGFGLKHPPPQILIKNTPVPANPSTTFSAAKFASFITQYSTGQVSVEIEWELQKENSKRWNPEIQYTSNYNKSVNVDFTVDTNGVYSEPRPIGTRYLTRNL

SEQ ID NO: 299 - DNA, 2208 bp, Artificial Sequence
  source: /note="Description of Artificial Sequence: Synthetic polynucleotide"
atggctgccgatggttatcttccagattggctcgaggacactctctctgaaggaataagacagtggtggaagctcaaacctggcccaccaccaccaaagcccgcagagcggcataaggacgacagcaggggtcttgtgcttcctgggtacaagtacctcggacccttcaacggactcgacaagggagagccggtcaacgaggcagacgccgcggccctcgagcacgacaaagcctacgaccggcagctcgacagcggagacaacccgtacctcaagtacaaccacgccgacgcggagtttcaggagcgccttaaagaagatacgtcttttgggggcaacctcggacgagcagtcttccaggcgaaaaagagggttcttgaacctctgggcctggttggggaacctgttaagacggctccgggaaaaaagaggccggtagagcactctcctgtggagccagactcctcctcgggaaccggaaaggcgggccagcagcctgcaagaaaaagattgaattttggtcagactggagacgcagactcagtacctgacccccagcctctcggacagccaccagcagccccctctggtctgggaactaatacgatggctacaggcagtggcgcaccaatggcagacaataacgagggcgccgacggagtgggtaattcctcgggaaatcggcattgcgattccacatggatgggcgacagagtcatcaccaccagcacccgaacctgggccctgcccacctacaacaaccacctctacagacaaatttccagccaatcaggagcctcgaacgacaatcactactttggctacagcaccccttgggggtattttgacttcaacagattccactgccacttttcaccacgtgactggcaaagactcatcaacaacaactggggattccgacccaagagactcaacttcaagctctttaacattcaagtcaaagaggtcacgcagaatgacggtacgacgacgattgccaataaccttaccagcacggttcaggtgtttactgactcggagtaccagctcccgtacgtcctcggctcggcgcatcaaggatgcctcccgccgttcccagcagacgtcttcatggtgccacagtatggatacctcaccctgagcaacgggagtcaggcagtaggacgctcttcattttactgcccggagtactttccttctcagatgctgcgtaccggaaacaactttaccttcagctacacttttgaggacgttcctttccacagcagctacgctcacagccagagtctggaccgtctcatgaatcctctcatcgaccagtacctgtattacttgagcacaacaaacactccaagtggaaccaccacgcagtcaaggcttcagttttctcaggccggagcgagtgacattcgggaccagtctaggaactggcttcctggaccctgttaccgccagcagcgagtatcaaagacatctgcggataacaacaacagtgaatactcgtggactggagctaccaagtaccacctcaatggcagagactctctggtgaatccgggcccggccatggcaagccacaaggacaatgaagaaaagttttttcctcagagcggggttctcatctttgggaagcaaggctcagagaaaacaaatgtggacattgaaaaggtcatgattacagacgaagaggaaatcaggacaaccaatcccgtggctacggagcagtatggttctgtatctaccaacctccagagaggcaacagacaagcagctaccgcagatgtcaacacacaaggcgttcttccaggcatggtctggcaggacagagatgtgtaccttcaggggcccatctgggcaaagattccacacacggacggacattttcacccctctcccctcatgggtggattcggacctaaacaccctcctccacagattctcatcaagaacaccccggtacctgcgaatccttcgaccaccttcagtgcggcaaagtttgcttccttcatcacacagtactccacgggacaggtcagcgtggagatcgagtgggagctgcagaaggaaaacagcaaacgctggaatcccgaaattcagtacacttccaactacaacaagtctgttaatgtggactttactgtggacactaatggcgtgtattcagagcctcgccccattggcaccagatacctgactcgtaatttgtaa

SEQ ID NO: 300 - protein, 735 aa, Artificial Sequence
  source: /note="Description of Artificial Sequence: Synthetic polypeptide"
MAADGYLPDWLEDTLSEGIRQWWKLKPGPPPPKPAERHKDDSRGLVLPGYKYLGPFNGLDKGEPVNEADAAALEHDKAYDRQLDSGDNPYLKYNHADAEFQERLKEDTSFGGNLGRAVFQAKKRVLEPLGLVGEPVKTAPGKKRPVEHSPVEPDSSSGTGKAGQQPARKRLNFGQTGDADSVPDPQPLGQPPAAPSGLGTNTMATGSGAPMADNNEGADGVGNSSGNRHCDSTWMGDRVITTSTRTWALPTYNNHLYRQISSQSGASNDNHYFGYSTPWGYFDFNRFHCHFSPRDWQRLINNNWGFRPKRLNFKLFNIQVKEVTQNDGTTTIANNLTSTVQVFTDSEYQLPYVLGSAHQGCLPPFPADVFMVPQYGYLTLSNGSQAVGRSSFYCPEYFPSQMLRTGNNFTFSYTFEDVPFHSSYAHSQSLDRLMNPLIDQYLYYLSTTNTPSGTTTQSRLQFSQAGASDIRDQSRNWLPGPCYRQQRVSKTSADNNNSEYSWTGATKYHLNGRDSLVNPGPAMASHKDNEEKFFPQSGVLIFGKQGSEKTNVDIEKVMITDEEEIRTTNPVATEQYGSVSTNLQRGNRQAATADVNTQGVLPGMVWQDRDVYLQGPIWAKIPHTDGHFHPSPLMGGFGPKHPPPQILIKNTPVPANPSTTFSAAKFASFITQYSTGQVSVEIEWELQKENSKRWNPEIQYTSNYNKSVNVDFTVDTNGVYSEPRPIGTRYLTRNL

SEQ ID NO: 301 - DNA, 2205 bp, Artificial Sequence
  source: /note="Description of Artificial Sequence: Synthetic polynucleotide"
atggctgccgatggttatcttccagattggctcgaggacactctctctgaaggaataagacagtggtggaagctcaaacctggcccaccaccaccaaagcccgcagagcggcataaggacgacagcaggggtcttgtgcttcctgggtacaagtacctcggacccttcaacggactcgacaagggagagccggtcaacgaggcagacgccgcggccctcgagcacgacaaggcctacgaccggcagctcgacagcggagacaacccgtacctcaagtacaaccacgccgacgcggagtttcaggagcgtcttaaagaagatacgtcttttgggggcaacctcggacgagcagtcttccaggcgaaaaagagggttcttgaacctctgggcctggttgaggaacctgttaagacggctccgggaaaaaagaggccggtagagcactctcctgcggagccagactcctcctcgggaaccggaaaagcgggccagcagcctgcaagaaaaagactgaatttcggtcagactggagacgcagactccgtacctgacccccagcctctcagacagccaccagcagcccccacaagtttgggatctactacaatggctacaggcagtggcgcaccaatggcagacaataacgagggtgccgatggagtgggtaattcctcaggaaattggcattgcgattcccaatggctgggcgacagagtcatcaccaccagcacccgaacctgggccctgcccacctacaacaaccacctttacaagcaaatctccagccaatcaggagcctcaaacgacaaccactactttggctacagcaccccctgggggtattttgacttcaacagattccactgccacttttcaccacgtgactggcaaagactcatcaacaacaactggggattccgacccaagagactcaacttcaagctctttaacattcaagtcaaagaggtcacgcagaatgacggtacgacgacgattgccaataaccttaccagcacggttcaggtgtttactgactcggagtaccagctcccgtacgtcctcggctcggcgcatcaaggatgcctcccgccgtttccagcggacgtcttcatggtcccacagtatggatacctcaccctgaacaacgggagtcaggcggtaggacgctcttccttttactgcctggagtactttccttctcagatgctgcgtactggaaacaactttcagttcagctacacttttgaagacgtgcctttccacagcagctacgctcacagccagagtttggatcggctgatgaatcctctgatcgaccagtacctgtattatctaaacagaacacaaacagctagtggaactcagcagtctcggctactgtttagccaagctggacccacaagcatgtctcttcaagctaaaaactggctgcctggaccgtgttatcgccagcagcgtttgtcaaagcaggcaaacgacaacaacaacagcaactttccctggactggagctaccaagtactacctcaatggcagagactctttggtgaacccgggcccggccatggccagccacaaggacgatgaagaaaagtttttccccatgcatggaaccctaatatttggtaaagaaggaacaaatgctaccaacgcggaattggaaaatgtcatgattacagatgaagaggaaatcaggaccaccaatcccgtggctacagagcagtacggatatgtgtcaaataatttgcaaaactcaaatactgctgcaagtactgaaactgtgaatcaccaaggagcattacctggtatggtgtggcaggatcgagacgtgtacctgcagggacccatttgggccaagattcctcacaccgatggacactttcatccttctccactgatgggaggttttggactcaaacacccgcctcctcagattatgatcaaaaacactcccgttccagccaatcctcccacaaacttcagttctgccaagtttgcttccttcatcacacagtattccacgggacaggtcagcgtggagatcgagtgggagctgcagaaggagaacagcaaacgctggaatcccgaaattcagtacacttccaactacaacaaatctgttaatgtggactttactgtggacactaatggtgtgtattcagagcctcgccccattggcaccagatacctgactcgtaatctgtaa

SEQ ID NO: 302 - protein, 734 aa, Artificial Sequence
  source: /note="Description of Artificial Sequence: Synthetic polypeptide"
MAADGYLPDWLEDTLSEGIRQWWKLKPGPPPPKPAERHKDDSRGLVLPGYKYLGPFNGLDKGEPVNEADAAALEHDKAYDRQLDSGDNPYLKYNHADAEFQERLKEDTSFGGNLGRAVFQAKKRVLEPLGLVEEPVKTAPGKKRPVEHSPAEPDSSSGTGKAGQQPARKRLNFGQTGDADSVPDPQPLRQPPAAPTSLGSTTMATGSGAPMADNNEGADGVGNSSGNWHCDSQWLGDRVITTSTRTWALPTYNNHLYKQISSQSGASNDNHYFGYSTPWGYFDFNRFHCHFSPRDWQRLINNNWGFRPKRLNFKLFNIQVKEVTQNDGTTTIANNLTSTVQVFTDSEYQLPYVLGSAHQGCLPPFPADVFMVPQYGYLTLNNGSQAVGRSSFYCLEYFPSQMLRTGNNFQFSYTFEDVPFHSSYAHSQSLDRLMNPLIDQYLYYLNRTQTASGTQQSRLLFSQAGPTSMSLQAKNWLPGPCYRQQRLSKQANDNNNSNFPWTGATKYYLNGRDSLVNPGPAMASHKDDEEKFFPMHGTLIFGKEGTNATNAELENVMITDEEEIRTTNPVATEQYGYVSNNLQNSNTAASTETVNHQGALPGMVWQDRDVYLQGPIWAKIPHTDGHFHPSPLMGGFGLKHPPPQIMIKNTPVPANPPTNFSSAKFASFITQYSTGQVSVEIEWELQKENSKRWNPEIQYTSNYNKSVNVDFTVDTNGVYSEPRPIGTRYLTRNL

SEQ ID NO: 303 - DNA, 3160 bp, Artificial Sequence
  source: /note="Description of Artificial Sequence: Synthetic polynucleotide"
acccttcactaaagggactagtcctgcaggtttaaacgaattcgcccttgctgcgtcaactggaccaatgagaactttcccttcaacgactgtgtcgacaagatggtgatttggtgggaggaggggaagatgaccgccaaggtcgtggagtcggccaaagccattctcggaggaagcaaggtgcgcgtggaccagaaatgcaagtcctcggcccagatagatccgactcccgtgatcgtcacctccaacaccaacatgtgcgccgtgattgacgggaactcaacgaccttcgaacaccagcagccgttgcaagaccggatgttcaaatttgaactcacccgccgtctggatcatgactttgggaaggtcaccaagcgggaagtcaaagactttttccggtgggcaaaggatcacgtggttgaggtggagcatgaattctacgtcaaaaagggtggagccaagaaaagacccgcccctagtgacgcagatataagtgagcccaaacgggtgcgcgagtcagttgcgcagccatcgacgtcagacgcggaagcttcgatcaactacgcggacaggtaccaaaacaaatgttctcgtcacgtgggcatgaatctgatgctgtttccctgcagacaatgcgagagaatgaatcaaaattcaaatatctgcttcactcacggacagaaagactgtttagagtgctttcccgtgtcagaatctcaacctgtttctgtcgtcaaaaaggcgtatcagaaactgtgctacattcatcatatcatgggaaaggtgccagacgcttgcactgcctgcgatctggtcaatgtggatttggatgactgcatctctgaacaataaatgatttaaatcaggtatggctgccgatggttatcttccagattggctcgaggacactctctctgaaggaataagacagtggtggaagctcaaacctggcccaccaccaccaaagcccgcagagcggcataaggacgacagcaggggtcttgtgcttcctgggtacaagtacctcggacccttcaacggactcgacaagggagagccggtcaacgaggcagacgccgcggccctcgagcacgacaaggcctacgaccggcagctcgacagcggagacaacccgtacctcaagtacaaccacgccgacgcggagtttcaggagcgtcttaaagaagatacgtcttttgggggcaacctcggacgagcagtcttccaggcgaaaaagagggttcttgaacctctgggcctggttgaggaacctgttaagacggctccgggaaaaaagaggccggtagagcactctcctgcggagccagactcctcctcgggaaccggaaaagcgggccagcagcctgcaagaaaaagactgaatttcggtcagactggagacgcagactccgtacctgacccccagcctctcagacagccaccagcagcccccacaagtttgggatctactacaatggctacaggcagtggcgcaccaatggcagacaataacgagggtgccgatggagtgggtaattcctcaggaaattggcattgcgattcccaatggctgggcgacagagtcatcaccaccagcacccgaacctgggccctgcccacctacaacaaccacctttacaagcaaatctccagccaatcaggagcctcaaacgacaaccactactttggctacagcaccccctgggggtattttgacttcaacagattccactgccacttttcaccacgtgactggcaaagactcatcaacaacaactggggattccgacccaagagactcaacttcaagctctttaacattcaagtcaaagaggtcacgcagaatgacggtacgacgacgattgccaataaccttaccagcacggttcaggtgtttactgactcggagtaccagctcccgtacgtcctcggctcggcgcatcaaggatgcctcccgccgtttccagcggacgtcttcatggtcccacagtatggatacctcaccctgaacaacgggagtcaggcggtaggacgctcttccttttactgcctggagtactttccttctcagatgctgcgtactggaaacaactttcagttcagctacacttttgaagacgtgcctttccacagcagctacgctcacagccagagtttggatcggctgatgaatcctctgatcgaccagtacctgtattatctaaacagaacacaaacagctagtggaactcagcagtctcggctactgtttagccaagctggacccacaagcatgtctcttcaagctaaaaactggctgcctggaccgtgttatcgccagcagcgtttgtcaaagcaggcaaacgacaacaacaacagcaactttccctggactggagctaccaagtactacctcaatggcagagactctttggtgaacccgggcccggccatggccagccacaaggacgatgaagaaaagtttttccccatgcatggaaccctaatatttggtaaagaaggaacaaatgctaccaacgcggaattggaaaatgtcatgattacagatgaagaggaaatcaggaccaccaatcccgtggctacagagcagtacggatatgtgtcaaataatttgcaaaactcaaatactgctgcaagtactgaaactgtgaatcaccaaggagcattacctggtatggtgtggcaggatcgagacgtgtacctgcagggacccatttgggccaagattcctcacaccgatggacactttcatccttctccactgatgggaggttttggactcaaacacccgcctcctcagattatgatcaaaaacactcccgttccagccaatcctcccacaaacttcagttctgccaagtttgcttccttcatcacacagtattccacgggacaggtcagcgtggagatcgagtgggagctgcagaaggagaacagcaaacgctggaatcccgaaattcagtacacttccaactacaacaaatctgttaatgtggactttactgtggacactaatggtgtgtattcagagcctcgccccattggcaccagatacctgactcgtaatctgtaattgcttgttaatcaataaaccgtttaattcgtttcagttgaactttggtctctgcgaagggcgaattcgcggccgctaaatcaatcg

SEQ ID NO: 304 - protein, 734 aa, Artificial Sequence
  source: /note="Description of Artificial Sequence: Synthetic polypeptide"
MAADGYLPDWLEDTLSEGIRQWWKLKPGPPPPKPAERHKDDSRGLVLPGYKYLGPFNGLDKGEPVNEADAAALEHDKAYDRQLDSGDNPYLKYNHADAEFQERLKEDTSFGGNLGRAVFQAKKRVLEPLGLVEEPVKTAPGKKRPVEHSPAEPDSSSGTGKAGQQPARKRLNFGQTGDADSVPDPQPLGQPPAAPTSLGSTTMATGSGAPMADNNEGADGVGNSSGNWHCDSQWLGDRVITTSTRTWALPTYNNHLYKQISSQSGASNDNHYFGYSTPWGYFDFNRFHCRFSPRDWQRLINNNWGFRPKRLNFKLFNIQVKEVTQNDGTTTIANNLTSTVQVFTDSEYQLPYVLGSAHQGCLPPFPADVFMVPQYGYLTLNNGSQAVGRSSFYCLEYFPSQMLRTGNNFQFSYTFEDVPFHSSYAHSQGLDRLMNPLIDQYLYYLNRTQTASGTQQSRLLFSQAGPTSMSLQAKNWLPGPCYRQQRLSKQANDNNNSNFPWTGATKYHLNGGDSLVNPGPAMASHKDDEEKFFPMHGTLIFGKEGTNATNAELENVMITDEEEIRTTNPVATEQYGYVSNNLQNSNTAASTETVNHQGALPGMVWQDRDVYLRGPIWAKIPHADGHFHPSPLMGGFGLKHPPPQIMIKNTPVPANPPTNFSSAKFASFITQYSTGQVSVEIEWELQKENSKRWNPEIQYTSNYNKSVNVDFTVDTNGVYSEPRPIGTRYLTRNL

SEQ ID NO: 305 - DNA, 3157 bp, Artificial Sequence
  source: /note="Description of Artificial Sequence: Synthetic polynucleotide"
ctcactaagggactagtcctgcaggtttaaacgaattcgcccttgctgcgtcaactggaccaatgagaactttcccttcaacgactgtgtcgacaagatggtgatttggtgggaggaggggaagatgaccgccaaggtcgtggagtcggccaaagccactctcggaggaagcaaggtgcgcgtggaccagaaacgcaagtcctcggcccagatagatccgactcccgtgatcgtcacctccaacaccaacatgtgcgccgtgattgacgggaactcaacgaccttcgaacaccagcagccgttgcaagaccgaatgttcaaatttgaactcacccgccgtctggatcatgacttcgggaaggtcaccaagcaggaagtcaaagactttttccggtgggcaaaggatcacgtggttgaggtggagcatgaattctacgtcaaaaagggtggagccaagaaaagacccgcccctagtgacgcagatataagtgagcccaaacgggtgcgcgagtcagttgcgcagccatcgacgtcagacgcggaagcttcgatcaactacgcggacaggtaccaaaacaaatgttctcgtcacgtgggcatgaatctgatgctgtttccctgcagacaatgcgagagaatgaatcaaaattcaaatatctgcttcactcacggacagaaagactgtttagagtgctttcccgtgtcagaatctcaacctgtttctgtcgtcaaaaaggcgtatcagaaactgtgctacattcatcatatcatgggaaaggtgccagacgcttgcactgcctgcgatctggtcaatgtggatttggatgactgcatctctgaacaataaatgatttaaatcaggtatggctgccgatggttatcttccagattggctcgaggacactctctctgaaggaataagacagtggtggaagctcaaacctggcccaccaccaccaaagcccgcagagcggcataaggacgacagcaggggtcttgtgcttcctgggtacaagtacctcggacccttcaacggactcgacaagggagagccggtcaacgaggcagacgccgcggctctcgagcacgacaaggcctacgaccggcagctcgacagcggagacaacccgtacctcaagtacaaccacgccgacgcggagtttcaggagcgtcttaaagaagatacgtcttttgggggcaacctcggacgagcagtcttccaggcgaaaaagagggttcttgaacctctgggcctggttgaggaacctgttaagacggctccgggaaaaaagaggccggtagagcactctcctgcggagccagactcctcctcgggaaccggaaaagcgggccagcagcctgcaagaaaaagactgaatttcggtcagactggagacgcagactccgtacctgacccccagcctctcggacagccaccagcagcccccacaagtttgggatctactacaatggctacaggcagtggcgcaccaatggcagacaataacgagggtgccgatggagtgggtaattcctcaggaaattggcattgcgattcccaatggctgggcgacagagtcatcaccaccagcacccgaacctgggccctgcccacctacaacaaccacctttacaagcaaatctccagccaatcaggagcctcaaacgacaaccactactttggctacagcaccccctgggggtattttgacttcaacagattccactgccgcttttcaccacgtgactggcaaagactcatcaacaacaactggggattccgacccaagagactcaacttcaagctctttaacattcaagtcaaagaggtcacgcagaatgacggtacgacgacgattgccaataaccttaccagcacggttcaggtgtttactgactcggagtaccagctcccgtacgtcctcggctcggcgcatcaaggatgcctcccgccgtttccagcggacgtcttcatggtcccacagtatggatacctcaccctgaacaacgggagtcaggcggtaggacgctcttccttttactgcctggagtactttccttctcagatgctgcgtactggaaacaactttcagttcagctacacttttgaagacgtgcctttccacagcagctacgctcacagccagggtttggatcggctgatgaatcctctgatcgaccagtacctgtattatctaaacagaacacaaacagctagtggaactcagcagtctcggctactgtttagccaagctggacccacaagcatgtctcttcaagctaaaaactggctgcctggaccgtgttatcgccagcagcgtttgtcaaagcaggcaaacgacaacaacaacagcaactttccctggactggagctaccaagtaccacctcaatggcggagactctttggtgaacccgggcccggccatggccagccacaaggacgatgaagaaaagtttttccccatgcatggaaccctaatatttggtaaagaaggaacaaatgctaccaacgcggaattggaaaatgtcatgattacagatgaagaggaaatcaggaccaccaatcccgtggctacagagcagtacggatatgtgtcaaataatttgcaaaactcaaatactgctgcaagtactgaaactgtgaatcaccaaggagcattacctggtatggtgtggcaggatcgagacgtgtacctgcggggacccatttgggccaagattcctcacgccgatggacactttcatccttctccactgatgggaggttttggactcaaacacccgcctcctcagattatgatcaaaaacactcccgttccagccaatcctcccacaaacttcagttctgccaagtttgcttccttcatcacacagtattccacgggacaggtcagcgtggagatcgagtgggagctgcagaaggagaacagcaaacgctggaatcccgaaattcagtacacttccaactacaacaaatctgttaatgtggactttactgtggacactaatggtgtgtattcagagcctcgccccattggcaccagatacctgactcgtaatctgtaattgcttgttaatcaataaaccgtttaattcgtttcagttgaactttggtctctgcgaagggcgaattcgcggccgctaaattcaattcg

SEQ ID NO: 306 - protein, 734 aa, Artificial Sequence
  source: /note="Description of Artificial Sequence: Synthetic polypeptide"
MAADGYLPDWLEDTLSEGIRQWWKLKPGPPPPKPAERHKDDSRGLVLPGYKYLGPFNGLDKGEPVNEADAAALEHDKAYDRQLDSGDNPYLKYNHADAEFQERLKEDTSFGGNLGRAVFQAKKRVLEPLGLVEEPVKTAPGKKRPVEHSPAEPDSSSGTGKAGQQPARKRLNFGQTGDADSVPDPQPLGQPPAAPTSLGSTTMATGSGAPMADNNEGADGVGNSSGNWHCDSQWLGDRVITTSTRTWALPTYNNHLYKQISSQSGASNDNHYFGYSTPWGYFDFNRFHCHFSPRDWQRLINNNWGFRPKRLNFKLFNIQVKEVTQNDGTTTIANNLTSTVQVFTDSEYQLPYVLGSAHQGCLPPFPADVFMVPQYGYLTLNNGSQAVGRSSFYCLECFPSQMLRTGNNFQFSYTFEDVPFHSSYAHSQSLDRLMNPLIDQYLYYLNRTQTASGTQQSRLLFSQAGPTSMSLQAKNWLPGPCYRQQRLSKQANDNNNSNFPWTGATKYHLNGRDSLVNPGPAMASHKDDEEKFFPMHGTLIFGKEGTNATNAELENVMITDEEEIRTTNPVATEQYGYVSNNLQNSNTAASTETVNHQGALPGMVWQDRDVYLQGPIWAKIPHTDGHFHPSPLMGGFGLKHPPPQIMIKNTPVPANPPTNFSSAKFASFITQYSTGQVSVEIEWELQKENSKRWNPEIQYTSNYNKSVNVDFTVDTNGVYSEPRPIGTRYLTRNL

SEQ ID NO: 307 - DNA, 2208 bp, Artificial Sequence
  source: /note="Description of Artificial Sequence: Synthetic polynucleotide"
atggctgccgatggttatcttccagattggctcgaggacactctctctgaaggaataagacagtggtggaagctcaaacctggcccaccaccaccaaagcccgcagagcggcataaggacgacagcaggggtcttgtgcttcctggatacaagtacctcggacccttcaacggactcgacaagggagagccggtcaacgaggcagacgccgcggccctcgagcacgacaaggcctacgaccggcagctcgacagcggagacaacccgtacctcaagtacaaccacgccgacgcggagtttcaggagcgccttaaagaagatacgtcttttgggggcaacctcggacgagcagtcttccaggcgaaaaagagggttcttgaacctctgggcctggttgaggaacctgttaagacggctccgggaaaaaagaggccggtagagcactctcctgtggagccagactcctcctcgggaaccggaaaagcgggcaaccagcctgcaagaaaaagattgaatttcggtcagactggagacgcagactccgtacctgacccccagcctctcggacagccaccagcatccccctctggtctgggaactaatacgatggctacaggcagtggcgcaccaatggcagacaataacgagggcgccgacggagtgggtaattcctcgggaaattggcattgcgattccacatggatgggcgacagagtcgtcaccaccagcacccgcacctgggccctgcccacctacaacaaccacctctacaagcagatttccagccaatcaggagccagcaacgacaaccactactttggctacagcaccccttgggggtattttgacttcaacagattccactgccacttttcgccacgcgactggcagagactcatcaacaacaactggggattccggcccaaaagactcaacttcaagctgtttaacattcaagtcaaggaggtcacgcagaatgacggtacgacgacgattgccaataaccttaccagcacggttcaggtgtttactgacttggagtaccagctcccgtacgtcctcggctcggcgcatcaaggatgcctcccgccgttcccagcagacgtcttcatggtgccacagtatggatacctcaccctgaacaacgggagtcaggcggtaggacgctcttccttttactgcctggagtactttccttctcagatgcttcgcaccggaaacaactttaccttcagctacacttttgaagacgttcctttccacagcagctacgctcacagtcaaagtctggaccgtctcatgaatcctctcatcgaccagtacctgtattacttgagcagaacaaacactccaagcggaaccactacgcagtccaggcttcagttttctcaggccggagcgagtgacattcgggaccagtctaggaactggcttcctggaccctgttaccgccagcagcgagtatcaaagacagctgcggataacaacaacagtgaatactcgtggactggagctaccaagtaccacctcaatggcagagactctctggtgaatccgggcccggccatggccagccacaaggacgatgaagaaaagttttttcctcaaagcggggttctcatctttgggaagcaaggctcagagaaaacaaatgtggacattgaaaaggtcatgattacagacgaagaggaaatcaggaccaccaatcccgtggctacggagcagtatggttctgtatctaccaacctccagagcggcaacacacaagcagctacctcagatgtcaacacacaaggcgttcttccaggcatggtctggcaggacagagacgtgtacctgcaggggcccatctgggcaaaaattccacacacggacggacattttcacccctctcccctcatgggcggatttggacttaaacaccctcctccacagattctcattaagaataccccggtacctgcgaatccttcgaccaccttcagcgcggcaaagtttgcttccttcatcacacagtattccacggggcaggtcagcgtggagatcgagtgggagctgcagaaggagaacagcaaacgctggaatcccgaaattcagtacacttccaactacaacaaatctgttaatgtggactttactgtggacactaatggggtgtattcagagcctcgccctattggcaccagatacctgactcgtaatctgtaa

SEQ ID NO: 308 - DNA, 3159 bp, Artificial Sequence
  source: /note="Description of Artificial Sequence: Synthetic polynucleotide"
gattgatttagcggccgcgaattcgcccttgctgcgtcaactggaccaatgagaactttcccttcaacgattgcgtcgacaagatggtgatctggtgggaggagggaaagatgaccgccaaggtcgtggagtcggccaaagccattctcggaggaagcaaggtgcgtgtggaccaaaagtgcaagtcttcggcccagatcgacccgactcccgtgatcgtcacctccaacaccaacatgtgcgccgtgattgatggaaactcaacgaccttcgagcaccagcagccgttgcaagaccggatgttcaaatttgaacttacccgccgtctggatcatgactttggaaaggtcaccaagcaggaagtgaaagactttttccggtgggcaaaggatcacgtggttgaggtggagcatgagttctacgtcaaaaagggtggagccaaaaaaagacccgcccccagtgacgcagatataagtgagcccaaacgggcgcgcgagtcagttgcgcagccatcgacgtcagacgcggaagcttcgatcaactacgcggacaggtaccaaaacaaatgttctcgtcacgtgggcatgaatctgatgctgtttccctgcagacaatgcgagagaatgaatcagaattcaaatatctgcttcactcacggacagaaagactgtccatagtgctttcccgtgtcagaatctcaacccgtttctgtcgtcaaaaaggcgtatcagaaactgtgctacattcatcacatcatgggaaaggtgccagacgcttgcactgcttgcgacctggtcaatgtggatttggatgactgcatctctgaacaataaatgatttaaatcaggtatggctgccgatggttatcttccagattggctcgaggacactctctctgaaggaataagacagtggtggaagctcaaacctggcccaccaccaccaaagcccgcagagcggcataaggacgacagcaggggtcttgtgcttcctggatacaagtacctcggacccttcaacggactcgacaagggagagccggtcaacgaggcagacgccgcggccctcgagcacgacaaggcctacgaccggcagctcgacagcggagacaacccgtacctcaagtacaaccacgccgacgcggagtttcaggagcgccttaaagaagatacgtcttttgggggcaacctcggacgagcagtcttccaggcgaaaaagagggttcttgaacctctgggcctggttgaggaacctgttaagacggctccgggaaaaaagaggccggtagagcactctcctgtggagccagactcctcctcgggaaccggaaaagcgggcaaccagcctgcaagaaaaagattgaatttcggtcagactggagacgcagactccgtacctgacccccagcctctcggacagccaccagcatccccctctggtctgggaactaatacgatggctacaggcagtggcgcaccaatggcagacaataacgagggcgccgacggagtgggtaattcctcgggaaattggcattgcgattccacatggatgggcgacagagtcgtcaccaccagcacccgcacctgggccctgcccacctacaacaaccacctctacaagcagatttccagccaatcaggagccagcaacgacaaccactactttggctacagcaccccttgggggtattttgacttcaacagattccactgccacttttcgccacgcgactggcagagactcatcaacaacaactggggattccggcccaaaagactcaacttcaagctgtttaacattcaagtcaaggaggtcacgcagaatgacggtacgacgacgattgccaataaccttaccagcacggttcaggtgtttactgacttggagtaccagctcccgtacgtcctcggctcggcgcatcaaggatgcctcccgccgttcccagcagacgtcttcatggtgccacagtatggatacctcaccctgaacaacgggagtcaggcggtaggacgctcttccttttactgcctggagtactttccttctcagatgcttcgcaccggaaacaactttaccttcagctacacttttgaagacgttcctttccacagcagctacgctcacagtcaaagtctggaccgtctcatgaatcctctcatcgaccagtacctgtattacttgagcagaacaaacactccaagcggaaccactacgcagtccaggcttcagttttctcaggccggagcgagtgacattcgggaccagtctaggaactggcttcctggaccctgttaccgccagcagcgagtatcaaagacagctgcggataacaacaacagtgaatactcgtggactggagctaccaagtaccacctcaatggcagagactctctggtgaatccgggcccggccatggccagccacaaggacgatgaagaaaagttttttcctcaaagcggggttctcatctttgggaagcaaggctcagagaaaacaaatgtggacattgaaaaggtcatgattacagacgaagaggaaatcaggaccaccaatcccgtggctacggagcagtatggttctgtatctaccaacctccagagcggcaacacacaagcagctacctcagatgtcaacacacaaggcgttcttccaggcatggtctggcaggacagagacgtgtacctgcaggggcccatctgggcaaaaattccacacacggacggacattttcacccctctcccctcatgggcggatttggacttaaacaccctcctccacagattctcattaagaataccccggtacctgcgaatccttcgaccaccttcagcgcggcaaagtttgcttccttcatcacacagtattccacggggcaggtcagcgtggagatcgagtgggagctgcagaaggagaacagcaaacgctggaatcccgaaattcagtacacttccaactacaacaaatctgttaatgtggactttactgtggacactaatggggtgtattcagagcctcgccctattggcaccagatacctgactcgtaatctgtaattgcttgttaatcaataaaccgtttaattcgtttcagttgaactttggtctctgcgaagggcgaattcgtttaaacctgcaggactagtccctttagtgagg

SEQ ID NO: 309 - protein, 735 aa, Artificial Sequence
  source: /note="Description of Artificial Sequence: Synthetic polypeptide"
MAADGYLPDWLEDTLSEGIRQWWKLKPGPPPPKPAERHKDDSRGLVLPGYKYLGPFNGLDKGEPVNEADAAALEHDKAYDRQLDSGDNPYLKYNHADAEFQERLKEDTSFGGNLGRAVFQAKKRVLEPLGLVEEPVKTAPGKKRPVEHSPVEPDSSSGTGKAGNQPARKRLNFGQTGDADSVPDPQPLGQPPASPSGLGTNTMATGSGAPMADNNEGADGVGNSSGNWHCDSTWMGDRVVTTSTRTWALPTYNNHLYKQISSQSGASNDNHYFGYSTPWGYFDFNRFHCHFSPRDWQRLINNNWGFRPKRLNFKLFNIQVKEVTQNDGTTTIANNLTSTVQVFTDLEYQLPYVLGSAHQGCLPPFPADVFMVPQYGYLTLNNGSQAVGRSSFYCLEYFPSQMLRTGNNFTFSYTFEDVPFHSSYAHSQSLDRLMNPLIDQYLYYLSRTNTPSGTTTQSRLQFSQAGASDIRDQSRNWLPGPCYRQQRVSKTAADNNNSEYSWTGATKYHLNGRDSLVNPGPAMASHKDDEEKFFPQSGVLIFGKQGSEKTNVDIEKVMITDEEEIRTTNPVATEQYGSVSTNLQSGNTQAATSDVNTQGVLPGMVWQDRDVYLQGPIWAKIPHTDGHFHPSPLMGGFGLKHPPPQILIKNTPVPANPSTTFSAAKFASFITQYSTGQVSVEIEWELQKENSKRWNPEIQYTSNYNKSVNVDFTVDTNGVYSEPRPIGTRYLTRNL

SEQ ID NO: 310 - DNA, 2205 bp, Artificial Sequence
  source: /note="Description of Artificial Sequence: Synthetic polynucleotide"
atggctgccgatggttatcttccagattggctcgaggacactctctctgaaggaataagacagtggtggaagctcaaacctggcccaccaccaaagcccgcagagcggcataaggacgacagcaggggtcttgtgcttcctggatacaagtacctcggacccttcaacggactcgacaagggagagccggtcaacgaggcagacgccgcggccctcgagcacgacaaggcctacgaccggcagctcgacagcggagacaacccgtacctcaagtacaaccacgccgacgcggagtttcaggagcgccttaaagaagatacgtcttttgggggcaacctcggacgagcagtcttccaggcgaaaaagagggttcttgaacctctgggcctggttgaggaacctgttaagacggctccgggaaaaaagaggcccgtagagcactctcctgtggagccagactcctcctcgggaaccggaaaagcgggcaaccagcctgcaagaaaaagattgaatttcggtcagactggagacgcagactccgtacctgacccccagcctctcggacagccaccagcagccccctctggtctgggaactaatacgatggctacaggcagtggcgcaccaatggcagacaataacgagggcgccgacggagtgggtaattcctcgggagattggcattgcgattccacatggatgggcgacagagtcatcaccaccagcacccgcacctgggccctgcccacctacaacaaccacctctacaagcagatttccagccaatcaggagccagcaatgacaaccactactttggctacagcaccccttgggggtattttgacttcaacagattccactgccacttttcgccacgcgactggcagagactcatcaacaacaactggggattccggcccaaaagactcaacctcaagctgtttaacattcaagtcaaggaggtcacgcagaatgacggtacgacgacgattgccaataaccttaccagcacggttcaggtgtttactgacttggagtaccagctcccgtacgtcctcggctcggcgcatcaaggatgcctcccgccgttcccagcagacgtcttcatggtgccacagtatggatacctcaccctgaacaacgggagtcaggcggtaggacgctcttccttttactgcctggagtactttccttctcagatgcttcgtaccggaaacaactttaccttcagctacacttttgaagacgttcctttccacagcagctacgctcacagtcaaagtctggaccgtctcatgaatcctctcatcgaccagtacctgtattacttgagcagaacaaacactccaagcggaaccactacgcagtccaggcttcagttttctcaggccggagcgagtgacattcgggaccagtctaggaactggcttcctggaccctgttaccgccagcagcgagtatcaaagacagctgcggataacaacaacggtgaatactcgtggactggagctaccaagtaccacctcaatggcagagactctctggtgaatccgggcccggccatggccagccacaaggacgatgaagaaaagttttttcctcaaagcggggttctcatctttgggaagcaaggctcagagaaaacaaatgtggacattgaaaaggtcatgattacagacgaagaggaaatcaggaccaccaatcccgtggctacggagcagtatggttctgtatctaccaacctccagagcggcaacacacgagcagctacctcagatgtcaacacacaaggcgttcttccaggcatggtctggcaggacagagacgtgtacctgcaggggcccatctgggcaaaaattccacacacggacggacattttcacccctctcccctcatgggcggatttggacttaaacaccctcctccacagattctcattaagaataccccggtacctgcgaatccttcgaccaccttcagcgcggcaaagtttgcttccttcatcacacagtattccacggggcaggtcagcgtggagatcgagtgggagctgcagaaggagaacagcaaacgctggaatcccgaaattcagtacacttccaactacaacaaatctgttaatgtggactttactgtggacactaatggggtgtattcagagcctcgccctattggcaccagatacctgactcgtaatctgtaa

SEQ ID NO: 311 - DNA, 3156 bp, Artificial Sequence
  source: /note="Description of Artificial Sequence: Synthetic polynucleotide"
cgattgaatttagcggccgcgaattcgcccttgctgcgtcaacggaccaatgagaactttcccttcaacgattgcgtcgacaagatggtgatctggtgggaggagggaaagatgaccgccaaggtcgtggagtcggccaaagccattctcggaggaagcaaggtgcgtgtggaccaaaagtgcaagtcttcggcccagatcgacccgactcccgtgatcgtcacctccaacaccaacatgtgcgccgtgattgatggaaactcaacgaccttcgagcaccagcagccgttgcaagaccggatgttcaaatttgaacttacccgccgtctggatcatgactttggaaaggtcaccaagcaggaagtgaaagactttttccggtgggcaaaggatcacgtggttgaggtggagcatgagttctacgtcaaaaagggtggagccaaaaaaagacccgcccccagtgacgcagatataagtgagcccaaacgggcgcgcgagtcagttgcgcagccatcgacgtcagacgcggaagcttcgatcaactacgcggacaggtaccaaaacaaatgttctcgtcacgtgggcatgaatctgatgctgtttccctgcagacaatgcgagcgaatgaatcagaattcaaatatctgcttcactcacggacagaaagactgtttagagtgctttcccgtgtcagaatctcaacccgtttctgtcgtcaaaaaggcgtatcagaaactgtgctacattcatcacatcatgggaaaggtgccagacgcttgcactgcttgcgacctggtcaatgtggatttggatgactgcatctctgaacaataaatgatttaaatcaggtatggctgccgatggttatcttccagattggctcgaggacactctctctgaaggaataagacagtggtggaagctcaaacctggcccaccaccaaagcccgcagagcggcataaggacgacagcaggggtcttgtgcttcctggatacaagtacctcggacccttcaacggactcgacaagggagagccggtcaacgaggcagacgccgcggccctcgagcacgacaaggcctacgaccggcagctcgacagcggagacaacccgtacctcaagtacaaccacgccgacgcggagtttcaggagcgccttaaagaagatacgtcttttgggggcaacctcggacgagcagtcttccaggcgaaaaagagggttcttgaacctctgggcctggttgaggaacctgttaagacggctccgggaaaaaagaggcccgtagagcactctcctgtggagccagactcctcctcgggaaccggaaaagcgggcaaccagcctgcaagaaaaagattgaatttcggtcagactggagacgcagactccgtacctgacccccagcctctcggacagccaccagcagccccctctggtctgggaactaatacgatggctacaggcagtggcgcaccaatggcagacaataacgagggcgccgacggagtgggtaattcctcgggagattggcattgcgattccacatggatgggcgacagagtcatcaccaccagcacccgcacctgggccctgcccacctacaacaaccacctctacaagcagatttccagccaatcaggagccagcaatgacaaccactactttggctacagcaccccttgggggtattttgacttcaacagattccactgccacttttcgccacgcgactggcagagactcatcaacaacaactggggattccggcccaaaagactcaacctcaagctgtttaacattcaagtcaaggaggtcacgcagaatgacggtacgacgacgattgccaataaccttaccagcacggttcaggtgtttactgacttggagtaccagctcccgtacgtcctcggctcggcgcatcaaggatgcctcccgccgttcccagcagacgtcttcatggtgccacagtatggatacctcaccctgaacaacgggagtcaggcggtaggacgctcttccttttactgcctggagtactttccttctcagatgcttcgtaccggaaacaactttaccttcagctacacttttgaagacgttcctttccacagcagctacgctcacagtcaaagtctggaccgtctcatgaatcctctcatcgaccagtacctgtattacttgagcagaacaaacactccaagcggaaccactacgcagtccaggcttcagttttctcaggccggagcgagtgacattcgggaccagtctaggaactggcttcctggaccctgttaccgccagcagcgagtatcaaagacagctgcggataacaacaacggtgaatactcgtggactggagctaccaagtaccacctcaatggcagagactctctggtgaatccgggcccggccatggccagccacaaggacgatgaagaaaagttttttcctcaaagcggggttctcatctttgggaagcaaggctcagagaaaacaaatgtggacattgaaaaggtcatgattacagacgaagaggaaatcaggaccaccaatcccgtggctacggagcagtatggttctgtatctaccaacctccagagcggcaacacacgagcagctacctcagatgtcaacacacaaggcgttcttccaggcatggtctggcaggacagagacgtgtacctgcaggggcccatctgggcaaaaattccacacacggacggacattttcacccctctcccctcatgggcggatttggacttaaacaccctcctccacagattctcattaagaataccccggtacctgcgaatccttcgaccaccttcagcgcggcaaagtttgcttccttcatcacacagtattccacggggcaggtcagcgtggagatcgagtgggagctgcagaaggagaacagcaaacgctggaatcccgaaattcagtacacttccaactacaacaaatctgttaatgtggactttactgtggacactaatggggtgtattcagagcctcgccctattggcaccagatacctgactcgtaatctgtaattgcttgttaatcaataaaccgtttaattcgtttcagttgaactttggtctctgcgaagggcgaattcgtttaaacctgcaggactagtccctttagtgag

SEQ ID NO: 312 - protein, 734 aa, Artificial Sequence
  source: /note="Description of Artificial Sequence: Synthetic polypeptide"
MAADGYLPDWLEDTLSEGIRQWWKLKPGPPPKPAERHKDDSRGLVLPGYKYLGPFNGLDKGEPVNEADAAALEHDKAYDRQLDSGDNPYLKYNHADAEFQERLKEDTSFGGNLGRAVFQAKKRVLEPLGLVEEPVKTAPGKKRPVEHSPVEPDSSSGTGKAGNQPARKRLNFGQTGDADSVPDPQPLGQPPAAPSGLGTNTMATGSGAPMADNNEGADGVGNSSGDWHCDSTWMGDRVITTSTRTWALPTYNNHLYKQISSQSGASNDNHYFGYSTPWGYFDFNRFHCHFSPRDWQRLINNNWGFRPKRLNLKLFNIQVKEVTQNDGTTTIANNLTSTVQVFTDLEYQLPYVLGSAHQGCLPPFPADVFMVPQYGYLTLNNGSQAVGRSSFYCLEYFPSQMLRTGNNFTFSYTFEDVPFHSSYAHSQSLDRLMNPLIDQYLYYLSRTNTPSGTTTQSRLQFSQAGASDIRDQSRNWLPGPCYRQQRVSKTAADNNNGEYSWTGATKYHLNGRDSLVNPGPAMASHKDDEEKFFPQSGVLIFGKQGSEKTNVDIEKVMITDEEEIRTTNPVATEQYGSVSTNLQSGNTRAATSDVNTQGVLPGMVWQDRDVYLQGPIWAKIPHTDGHFHPSPLMGGFGLKHPPPQILIKNTPVPANPSTTFSAAKFASFITQYSTGQVSVEIEWELQKENSKRWNPEIQYTSNYNKSVNVDFTVDTNGVYSEPRPIGTRYLTRNL

SEQ ID NO: 313 - DNA, 2208 bp, Artificial Sequence
  source: /note="Description of Artificial Sequence: Synthetic polynucleotide"
atggctgccgatggttatcttccagattggctcgaggacactctctctgaaggaataagacagtggtggaagctcaaacctggcccaccaccaccaaagcccgcagagcggcataaggacgacagcaggggtcttgtgcttcctgggtacaagtacctcggacccttcaacggactcgacaagggagagccggtcaacgaggcagacgccgcggccctcgagcacgacaaggcctacgaccggcagctcgacagcggagacaacccgtacctcaagtacgaccacgccgacgcggagtttcaggagcgccttaaagaagatacgtcttttgggggcaacctcggacgagcagtcttccaggcaaaaaagagggttcttgaacctctgggcctggttgaggagcctgttaagacggctccgggaaaaaagaggccggtagagcactctcctgtggagccagactcctcctcgggaaccggaaaagcgggcaaccagcctgcaagaaagagattgaatttcggtcagactggagacgcagactccgtacctgacccccagcctctcggacagccaccagcagccccctctggtctgggaactaatacgatggctacaggcagtggcgcaccaatggcagacaataacgatggcgccgacggagtgggtaattcctcgggaaattggcattgcgattccacatggatgggcgacagagtcatcaccaccagcacccgaacctgggctctgcccacctacaacaaccatctgtacaagcagatttccagccaatcaggagccagcaacgacaaccactactttggctacagcaccccttgggggtattttgacttcaacagattccactgccacttttcaccacgtgactggcaaagactcatcaacaacaactggggattccggcccaagagactcaacttcaagctctttaacattcaagtcagagaggtcacgcagaatgatggtacgacgacgattgccaataaccttaccagcacggttcaggtgtttactgactcggagtaccagctcccgtacgtcctcggctcggcgcatcaaggatgcctcccgccgttcccagcagacgtcttcatggtgccacagtatggatacctcaccctgaacaacgggagtcaggcagtaggacgctcttcattttactgcctggagtacttcccttctcagatgctgcgtaccggaaacaactttaccttcagctacacctttgaggatgttcctttccacagcagctacgctcacagccagagtttggaccgtctcatgaatcctctcatcgaccagtacctgtattacttgagcagaacaaacactccaagcggaaccaccacgcagtccaggcttcagttttctcaggccggagcgagtgacattcgggatcagtctaggaactggcttcctggaccctgttaccgccagcagcgagtatcaaagacatctgcggacaacaacaacagtgaatactcgtggattggagctaccaagtaccacctcaatggcagagactctctggtgaatccgggcccggcaatggccagccacaaggacgatgaagaaaagttttttcctcagagcggggttctcatctttggaaaacaaggatcagagaaaacaaatgtggacattgaaaaggtcatgattacagacgaagaggaaatcagaaccaccaatcccgtggccacggagcagtatggttctgtatctaccaacctccagagcggcaacacacaagcatctactgcagatgtcaacacacaaggcgttcttccaggcatggtctggcaggacagagacgtgtacctgcaggggcctatctgggcaaagattccgcacacggacggacattttcacccctctcccctcatgggcggattcggacttaaacaccctcctccacagattctcatcaaaaacaccccggtacctgcgaatccttcgaccaccttcagtgcggcaaagtttgcttccttcatcacacagtattccacggggcgggtcagcgtggagatcgagtgggagctacagaaggagaacagcaaacgctggaatcccgagatccagtacacttccaactacaacaaatctgttaatgtggactttactgtggacactaatggtgtgtattcagagcctcgccccattggcaccagatacctgactcgtaatctgtaa

SEQ ID NO: 314 - protein, 735 aa, Artificial Sequence
  source: /note="Description of Artificial Sequence: Synthetic polypeptide"
MAADGYLPDWLEDTLSEGIRQWWKLKPGPPPPKPAERHKDDSRGLVLPGYKYLGPFNGLDKGEPVNEADAAALEHDKAYDRQLDSGDNPYLKYDHADAEFQERLKEDTSFGGNLGRAVFQAKKRVLEPLGLVEEPVKTAPGKKRPVEHSPVEPDSSSGTGKAGNQPARKRLNFGQTGDADSVPDPQPLGQPPAAPSGLGTNTMATGSGAPMADNNDGADGVGNSSGNWHCDSTWMGDRVITTSTRTWALPTYNNHLYKQISSQSGASNDNHYFGYSTPWGYFDFNRFHCHFSPRDWQRLINNNWGFRPKRLNFKLFNIQVREVTQNDGTTTIANNLTSTVQVFTDSEYQLPYVLGSAHQGCLPPFPADVFMVPQYGYLTLNNGSQAVGRSSFYCLEYFPSQMLRTGNNFTFSYTFEDVPFHSSYAHSQSLDRLMNPLIDQYLYYLSRTNTPSGTTTQSRLQFSQAGASDIRDQSRNWLPGPCYRQQRVSKTSADNNNSEYSWIGATKYHLNGRDSLVNPGPAMASHKDDEEKFFPQSGVLIFGKQGSEKTNVDIEKVMITDEEEIRTTNPVATEQYGSVSTNLQSGNTQASTADVNTQGVLPGMVWQDRDVYLQGPIWAKIPHTDGHFHPSPLMGGFGLKHPPPQILIKNTPVPANPSTTFSAAKFASFITQYSTGRVSVEIEWELQKENSKRWNPEIQYTSNYNKSVNVDFTVDTNGVYSEPRPIGTRYLTRNL

SEQ ID NO: 315 - DNA, 2217 bp, Artificial Sequence
  source: /note="Description of Artificial Sequence: Synthetic polynucleotide"
atggctgccgatggttatcttccagattggctcgaggacaacctctctgagggcattcgcgagtggtgggacttgaaacctggagccccgaaacccaaagccaaccagcaaaagcaggacgacggccggggtctggtgcttcctggctacaagtacctcggacccttcaacggactcgacaagggggagcccgtcaacgcggcggacgcagcggccctcgagcacgacaaggcctacgaccagcagctcaaagcgggtgacaatccgtacctgcggtataaccacgccgacgccgagtttcaggagcgtctgcaagaagatacgtcttttgggggcaacctcgggcgagcagtcttccaggccaagaagcgggttctcgaacctctcggtctggttgaggaaggcgctaagacggctcctggaaagaagagaccggtagagccatcaccccagcgttctccagactcctctacgggcatcggcaagacaggccagcagcccgcgaaaaagagactcaactttgggcagactggcgactcagagtcagtgcccgaccctcaaccaatcggagaaccccccgcaggcccctctggtctgggatctggtacaatggctgcaggcggtggcgctccaatggcagacaataacgaaggcgccgacggagtgggtagttcctcaggaaattggcattgcgattccgcatggctgggcgacagagtcatcaccaccagcacccgaccctgggccctccccacctacaacaaccacctctacaagcaaatctccaacgggacatcgggaggaagcaccaacgacaacacctacttcggctacagcaccccctgggggtattttgactttaacagattccactgccacttctcaccacgtgactggcagcgactcatcaacaacaactggggattccggcccaagagactcaacttcaagctcttcaacatccaggtcaaggaggtcacgcagaatgaaggcaccaagaccatcgccaataaccttaccagcacgattcaggtctttacggactcggaataccagctcccgtacgtcctcggctctgcgcaccagggctgcccgcctccgttcccggcggacgtcttcatgattcctcagtacgggtacctgactctgaacaacggcagtcaggccgtgggccgttcctccttctactgcctggagtactttccttctcaaatgcggagaacgggcaacaactttgagttcagctaccagtttgaggacgtgccttttcacagcagctacgcgcatagccaaagcctggaccggctgatgaaccccctcatcgaccagtacctgtactacctgtctcggactcagtccacgggaggtaccgcaggaactcagcagttgctattttctcaggccgggcctaataacatgtcggctcaggccaaaaactggctacccgggccctgctaccggcagcaacgcgtctccacgacactgtcgcaaaataacaacagcaactttgcttggaccggtgccaccaagtatcatctgaatggcagagactctctggtaaatcccggtgtcgctatggcaacgcacaaggacgacgaagagcgattttttccatccagcggagtcttgatgtttgggaaacagggagctggaaaagacaacgtggactatagcagcgttatgctaaccagtgaggaagaaatcaaaaccaccaacccagtggccacagaacagtacggcgtggtggccgataacctgcaacagcaaaacgccgctcctattgtaggggccgtcaacagtcaaggagccttacctggcatggtctggcagaaccgggacgtgtacctgcagggtcctatctgggccaagattcctcacacggacggcaactttcatccttcgccgctgatgggaggctttggactgaaacacccgcctcctcagatcctgattaagaatacacctgttcccgcggatcctccaactaccttcagtcaagccaagctggcgtcgttcatcacgcagtacagcaccggacaggtcagcgtggaaattgaatgggagctgcagaaagagaacagcaagcgctggaacccagagattcagtatacttccaactactacaaatctacaaatgtggactttgctgtcaatactgagggtacttattcagagcctcgccccattggcacccgttacctcacccgtaacctgtaa

SEQ ID NO: 316 - protein, 738 aa, Artificial Sequence
  source: /note="Description of Artificial Sequence: Synthetic polypeptide"
MAADGYLPDWLEDNLSEGIREWWDLKPGAPKPKANQQKQDDGRGLVLPGYKYLGPFNGLDKGEPVNAADAAALEHDKAYDQQLKAGDNPYLRYNHADAEFQERLQEDTSFGGNLGRAVFQAKKRVLEPLGLVEEGAKTAPGKKRPVEPSPQRSPDSSTGIGKTGQQPAKKRLNFGQTGDSESVPDPQPIGEPPAGPSGLGSGTMAAGGGAPMADNNEGADGVGSSSGNWHCDSAWLGDRVITTSTRPWALPTYNNHLYKQISNGTSGGSTNDNTYFGYSTPWGYFDFNRFHCHFSPRDWQRLINNNWGFRPKRLNFKLFNIQVKEVTQNEGTKTIANNLTSTIQVFTDSEYQLPYVLGSAHQGCPPPFPADVFMIPQYGYLTLNNGSQAVGRSSFYCLEYFPSQMRRTGNNFEFSYQFEDVPFHSSYAHSQSLDRLMNPLIDQYLYYLSRTQSTGGTAGTQQLLFSQAGPNNMSAQAKNWLPGPCYRQQRVSTTLSQNNNSNFAWTGATKYHLNGRDSLVNPGVAMATHKDDEERFFPSSGVLMFGKQGAGKDNVDYSSVMLTSEEEIKTTNPVATEQYGVVADNLQQQNAAPIVGAVNSQGALPGMVWQNRDVYLQGPIWAKIPHTDGNFHPSPLMGGFGLKHPPPQILIKNTPVPADPPTTFSQAKLASFITQYSTGQVSVEIEWELQKENSKRWNPEIQYTSNYYKSTNVDFAVNTEGTYSEPRPIGTRYLTRNL

SEQ ID NO: 317 - protein, 735 aa, Artificial Sequence
  source: /note="Description of Artificial Sequence: Synthetic polypeptide"
MAADGYLPDWLEDTLSEGIRQWWKLKPGPPPPKPAERHKDDSRGLVLPGYKYLGPFNGLDKGEPVNEADAAALEHDKAYDRQLDSGDNPYLKYNHADAEFQERLKEDTSFGGNLGRAVFQAKKRVLEPLGLVEEPVKTAPGKKRPVEHSPVEPDSSSGTGKAGQQPARKRLNFGQTGDADSVPDPQPLGQPPAAPSGLGSTTMATGSGAPMADNNEGADGVGNSSGNWHCDSQWLGDRVITTSTRTWALPTYNNHLYKQISSQSGASNDNHYFGYSTPWGYFDFNRFHCHFSPRDWQRLINNNWGFRPKRLNFKLFNIQVKEVTQNDGTTTIANNLTSTVQVFTDSEYQLPYVLGSAHQGCLPPFPADVFMVPQYGYLTLNNGSQAVGRSSFYCLEYFPSQMLRTGNNFQFSYTFEDVPFHSSYAHSQSLDRLMNPLVDQYLYYLNKTQTNSGTLQQSRLLFSQAGPTNMSLQAKNWLPGPCYRQQRLSKQANDNNNSNFPWTAATKYHLNGRDSLVNPGPAMASHKDDEEKFFPMHGTLIFGKQGTNANDADLENVMITDEEEIRTTNPVATEQYGTVSNNLQNSNTGPTTGTVNHQGALPGMVWQDRDVYLQGPIWAKIPHTDGHFHPSPLMGGFGLKHPPPQIMIKNTPVPANPPTNFSSAKFASFITQYSTGQVSVEIEWELQKENSKRWNPEIQYTSNYNKSVNVDFTVDTNGVYSEPRPIGTRYLTRNL

SEQ ID NO: 318 - DNA, 3158 bp, Artificial Sequence
  source: /note="Description of Artificial Sequence: Synthetic polynucleotide"
gattgaatttagcggccgcgaattcgcccttgctgcgtcaactggaccaatgagaactttcctttcaatgattgcgtcgacaagatggtgatctggtgggaggagggaaagatgaccgccaaggtcgtggagtcggccaaagccattctcggaggaagcaaggtgcgcgcggaccagaaatgcaagtcctcggcccagatagacccgactcccgtgattgtcacctccaacaccaacatgtgcgccgtgattgacgggaactcaacgaccttcgaacaccagcagccgttgcaagaccggatgttcaaatttgaactcacccgccgtctggatcatgactttgggaaggtcaccaagcaggaagtcaaagactttttccggtgggcaaaggatcacgtggttgaggtggagcatgaattctacgtcaaaaagggtggagctaagaaaagacccgcccccagtgacgcagatataagtgagcccaaacgggcgcgcgagtcagttgcgcagccatcgacgtcagacgcggaagcttcgatcaactacgcgggcaggtaccaaaacaaatgttctcgtcacgtgggcatgaatctgatgctgtttccctgcagacaatgcgagagaatgaatcagaattcaaatatctgcttcactcacggacagaaagactgtttagagtgctttcccgtgtcagaatctcaacccgtttctgtcgtcaaaaaggcgtatcagaaactttgctacattcatcatatcatgggaaaggtgccagacgcttgcactgcctgcgatctggtcaatgtggatttggatgactgcatctctgaacaataaatgatttaaatcaggtatggctgccgatggttatcttccagattggctcgaggacactctctctgaaggaataagacagtggtggaagctcaaacctggcccaccaccaccaaagcccgcagagcggcataaggacgacagcaggggtcttgtgcttcctgggtacaagtacctcggacccttcaacggactcgacaagggggagccggtcaacgaggcagacgccgcggccctcgagcacgacaaggcctacgaccggcagctcgacagcggagacaacccgtacctcaagtacaaccacgccgacgcggagtttcaggagcgccttaaagaagatacgtcttttgggggcaacctcggacgagcagtcttccaggcaaaaaagagggttcttgaacctctgggcctggttgaggaacctgttaaaacggctccgggaaaaaagaggccggtagagcactctcctgtggagccagactcctcctcgggaaccggaaaagcgggccagcagcctgcaagaaaaagattgaatttcggtcagactggagacgcagactccgtacctgacccccagcctctcggacagccaccagcagccccctctggtctgggatctactacaatggctacaggcagtggcgcaccaatggcagacaataacgagggtgccgatggagtgggtaattcctcgggaaattggcattgcgattcccaatggctgggcgacagagtcatcaccaccagcacccgcacctgggccctgcccacctacaacaaccacctctacaagcaaatctccagccaatcaggagcctcaaacgacaaccactactttggctacagcaccccctgggggtattttgacttcaacagattccactgccacttttcaccacgtgactggcaaagactcatcaacaacaactggggattccgacccaagagactcaacttcaagctctttaacattcaagtcaaagaggtcacgcagaatgacggtacgacgacgattgccaataaccttaccagcacggttcaggtgtttactgactcggagtaccagctcccgtacgtcctcggctcggcgcatcaaggatgcctcccgccgtttccagcggacgtcttcatggtcccacagtatggatacctcaccctgaacaacgggagtcaggcagtaggacgctcttcattttactgcctggagtactttccttctcagatgctgcgtaccggaaacaactttcaattcagctacacttttgaagacgtgcctttccacagcagctacgctcacagccagagtctggatcggctgatgaatcctctggtcgaccagtacctgtattatctgaacaagacacaaacaaatagtggaactcttcagcagtctcggctactgtttagccaagctggacccaccaacatgtctcttcaagctaaaaactggctgcctggaccttgctacagacagcagcgtctgtcaaagcaggcaaacgacaacaacaacagcaactttccctggactgcagctacaaagtatcatctaaatggccgggactcgttggttaatccaggaccagctatggccagtcacaaggatgacgaagaaaagtttttccccatgcatggaacccttatatttggtaaacaaggaacaaatgccaacgacgcggatttggaaaatgtcatgattacagatgaagaagaaatcaggaccaccaatcccgtggctacggagcagtacggaactgtatcaaataatttgcaaaactcaaacactggtccaactactggaactgtcaatcaccaaggagcgttacctggtatggtgtggcaggatcgagacgtgtacctgcagggacccatttgggccaagattcctcacaccgatggacactttcatccttctccactgatgggaggttttggactcaaacacccacctcctcaaatcatgatcaaaaacactcccgttccagccaatcctcccacaaacttcagttctgccaagtttgcttctttcatcacacagtattccacggggcaggtcagcgtggagatcgagtgggagctgcagaaggagaacagcaaacgctggaatcccgaaattcagtacacttccaactacaacaaatctgttaatgtggactttactgtggacactaatggtgtgtattcagagcctcgccccattggcaccagatacctgactcgtaatctgtaattgcttgttaatcaataaaccgtttaattcgtttcagttgaactttggtctctgcgaagggcgaattcgtttaaacctgcaggactagtccctttagtga

SEQ ID NO: 319 - protein, 735 aa, Artificial Sequence
  source: /note="Description of Artificial Sequence: Synthetic polypeptide"
MAADGYLPDWLEDTLSEGIRQWWKLKPGPPPPKPAERHKDDSRGLVLPGYKYLGPFNGLDKGEPVNEADAAALEHDKAYDRQLDSGDNPYLKYNHADAEFQERLKEDTSFGGNLGRAVFQAKKRVLEPLGLVEEPVKTAPGKKRPVEHPPVEPDSSSGTGKAGQQPARKRLNFGQTGDADSVPDPQPLGQPPAAPSGLGSTTMATGSGAPMADNNEGADGVGNSSGNWHCDSQWLGDRVITTSTRTWALPTYNNHLYKQISSQSGASNDNHYFGYSTPWGYFDFNRFHCHFSPRDWQRLINNNWGFRPKRLNFKLFNIQVKEVTQNDGTTTIANNLTSTVQVFTDSEYQLPYVLGSAHQGCLPPFPADVFMVPQYGYLTLNNGSQAVGRSSFYCLEYFPSQMLRTGNNFQFSYTFEDVPFHSSYAHSQSLDRLMNPLIDQYLYYLNKTQTNSGTLQQSRLLFSQAGPTNMSLQAKNRLPGPCYRQQRLSKQANDNNNSNFPWTAATKYHLNGRDSLVNPGPAMASHKDDEEKFFPMHGTLIFGKQGTNANDADLENVMITDEEEIRTTNPVATEQYGTVSNNLQNSNTGPTTGTVNHQGALPGMVWQDRDVYLQGPIWAKIPHTDGHFHPSPLVGGFGLKHPPPQIMIKNTPVPANPPTNFSSAKFASFITQYSTGQVSVEIEWELQKENSKRWNPEIQYTSNYNKSVNVDFTVDTNGVYSEPRPIGTRYLTRNL

SEQ ID NO: 320 - DNA, 3159 bp, Artificial Sequence
  source: /note="Description of Artificial Sequence: Synthetic polynucleotide"
gattgaatttagcggccgcgaattcgcccttgctgcgtcaactggaccaatgagaactttcctttcaatgattgcgtcgacaagatggtgatctggtgggaggagggaaagatgaccgccaaggtcgtggagtcggccaaagccattctcggaggaagcaaggtgcgcgtggaccagaaatgcaagtcctcggcccagatagacccgactcccgtgattgtcacctccaacaccgacatgtgcgccgtgattgacgggaactcaacgaccttcgaacaccagcagccgttgcaagaccggatgttcaaatttgaactcacccgccgtctggatcatgactttgggaaggtcaccaagcaggaagtcaaagactttttccggtgggcaaaggatcacgtggttgaggtggagcatgaattctacgtcaaaaagggtggagctaagaaaagacccgcccccagtgacgcagatataagtgagcccaaacgggcgcgcgagtcagttgcgcagccatcgacgtcagacgcggaagcttcgatcaactacgcggacaggtaccaaaacaaatgttctcgtcacgtgggcatgaatctgatgctgtttccctgcagacaatgcgagagaatgaatcagaattcaaatatctgcttcactcacggacagaaagactgtttagagtgctttcccgtgtcagaatctcaacccgtttctgtcgtcaaaaaggcgtatcagaaactttgctacattcatcatatcatgggaaaggtgccagacgcttgcactgcctgcgatctggtcaatgtggatttggatgactgcatctctgaacaataaatgatttaaatcaggtatggctgccgatggttatcttccagattggctcgaggacactctctctgaaggaataagacagtggtggaagctcaaacctggcccaccaccaccaaagcccgcagagcggcataaggacgacagcaggggtcttgtgcttcctgggtacaagtacctcggacccttcaacggactcgacaagggggagccggtcaacgaggcagacgccgcggccctcgagcacgacaaggcctacgaccggcagctcgacagcggagacaacccgtacctcaagtacaaccacgccgacgcggagtttcaggagcgccttaaagaagatacgtcttttgggggcaacctcggacgagcagtcttccaggcaaaaaagagggttcttgaacctctgggcctggttgaggaacctgttaaaacggctccgggaaaaaagaggccggtagagcaccctcctgtggagccagactcctcctcgggaaccggaaaagcgggccagcagcctgcaagaaaaagattgaatttcggtcagactggagacgcagactccgtacctgacccccagcctctcggacagccaccagcagccccctctggtctgggatctactacaatggctacaggcagtggcgcaccaatggcagacaataacgagggtgccgatggagtgggtaattcctcgggaaattggcattgcgattcccaatggctgggcgacagagtcatcaccaccagcacccgcacctgggccctgcccacctacaacaaccacctctacaagcaaatctccagccaatcaggagcctcaaacgacaaccactactttggctacagcaccccctgggggtattttgacttcaacagattccactgccacttttcaccacgtgactggcaaagactcatcaacaacaactggggattccgacccaagagactcaacttcaagctctttaacattcaagtcaaagaggtcacgcagaatgacggtacgacgacgattgccaataaccttaccagcacggttcaggtgtttactgactcggagtaccagctcccgtacgtcctcggctcggcgcatcaaggatgcctcccgccgtttccagcggacgtcttcatggtcccacagtatggatacctcaccctgaacaacgggagtcaggcagtaggacgctcttcattttactgcctggagtactttccttctcagatgctgcgtaccggaaacaactttcagttcagctacacttttgaagacgtgcctttccacagcagctacgctcacagccagagtctggatcggctgatgaatcctctgatcgaccagtacctgtattatctgaacaagacacaaacaaatagtggaactcttcagcagtctcggctactgtttagccaagctggacccaccaacatgtctcttcaagctaaaaaccggctgcctggaccttgctacagacagcagcgtctgtcaaagcaggcaaacgacaacaacaacagcaactttccctggaccgcagctacaaagtatcatctaaatggccgggactcgttggttaatccaggaccagctatggccagtcacaaggatgacgaagaaaagtttttccccatgcatggaacccttatatttggtaaacaaggaacaaatgccaacgacgcggatttggaaaatgtcatgattacagatgaagaagaaatcaggaccaccaatcccgtggctacggagcagtacggaactgtatcaaataatttgcaaaactcaaacactggtccaactactggaactgtcaatcaccaaggagcgttacctggtatggtgtggcaggatcgagacgtgtacctgcagggacccatttgggccaagattcctcacaccgatggacactttcatccttctccactggtgggaggttttggactcaaacacccacctcctcaaatcatgatcaaaaacactcccgttccagccaatcctcccacaaacttcagttctgccaagtttgcttctttcatcacacagtattccacggggcaggtcagcgtggagatcgagtgggagctgcagaaggagaacagcaaacgctggaatcccgaaattcagtacacttccaactacaacaaatctgttaatgtggactttactgtggacactaatggtgtgtattcagagcctcgccccattggcaccagatacctgactcgtaatctgtaattgcttgttaatcaataaaccgtttaattcgtttcagttgaactttggtctctgcgaagggcgaattcgtttaaacctgcaggactagtccctttagtgag

SEQ ID NO: 321 - DNA, 2208 bp, Artificial Sequence
  source: /note="Description of Artificial Sequence: Synthetic polynucleotide"
atggctgccgatggttatcttccagattggctcgaggacactctctctgaaggaataagacagtggtggaagctcaaacctggcccaccaccaccaaagcccgcagagcggcataaggacgacagcaggggtcttgtgcttcctgggtacaagtaccttggacccttcaacggactcgacaagggagagccggtcaacgaggcagacgccgcggccctcgagcacgacaaggcctacgaccggcagctcgacagcggagacaacccgtaccccaagtacaaccacgccgacgcggagttccaggagcgtcttaaagaagatacgtcttttgggggcaacctcggacgagcagtcttccaggcgaaaaagagggttcttgaacctctgggcctggttgaggaacctgttaagacggctccgggaaaaaagaggccggtagagcactctcctgcggagccagactcctcctcgggaaccggaaaagcgggccagcagcctgcaagaaagagattgaatttcggtcagactggagacgcagactccgtacctgacccccagcctctcggacagccaccagcagccccctctggtctgggaactaatacgatggctacaggcagtggcgcaccaatggcagacaataacgagggcgccgacggagtgggtaattcctcgggaaattggcattgcgattccacatggatgggcgacagagtcatcaccaccagcacccgcacctgggctctgcccacctacaacaaccacctctacaagcagatttccagccaatcaggagcctcaaacgacaaccactactttggctacagcaccccttgggggtattttgacttcaacagattccactgccacttttcgccacgtgactggcaaagactcatcaacaacaattggggattccggcccaaaagactcaacttcaagctctttaacattcaagtcaaggaggtcacgcagaatgacggtacgacgacgattgccaataaccttaccagcacggttcaggtgtttactgactcggagtaccagctcccgtacgtcctcggctcggcgcatcaaggatgcctcccgccgttcccagcagacgtcttcatggtgccacagtatggatacctcaccctgaacaacgggagtcaggcagtaggacgctcttcattttactgcctggagtactttccttctcagatgctgcgtaccggaaacaactttaccttcagctacacctttgaggacgttcctttccacagcagctacgcccacagccagagtttggaccgtctcatgaatcctctcatcgaccagtacctgtattacttgagcagaacaaacactccaagcggaaccaccacgcagtcaaggcttcagttttctcaggccggagcaagtgacattcgggaccagtctaggaactggcttcctggaccctgttaccgccagcagcgagtatcaaagacatctgcggataacaacaacagtgaatactcgtggactggagctaccaagtaccaccttaatggaagagactctctggtgaatccgggcccggccatggccagccacaaggacgatgaagaaaagttttttcctcagagcggggttctcatctttggaaaacaagactcgggaaaaactaatgtggacattgaaaaggtcatgattacagacgaagaggaaatcaggaccaccaatcccgtggctacggagcagtatggttctgtatctaccaacctccagagcggcaacacacaagcagctacctcagatgtcaacacacaaggcgttcttccaggcatggtgtggcaggacagagacgtgtacctgcaggggcccatctgggcaaagattccacacacggacggacattttcacccctctcccctcatgggcggattcggacttaaacaccctcccccgcagattctcatcaagaacaccccggtacctgcgaatccttcgactaccttcagtgcggcaaagtttgcttccttcattacacagtactccacggggcaggtcagcgtggagatcgagtgggagctgcagaaggagaacagcaaacgctggaatcccgagattcagtacacttccaactacaacaaatctgttaatgtggactttactgtggacactaatggtgtgtattcagagcctcgccccattggcaccaggtacctgactcgtaatctgtaa

SEQ ID NO: 322 - protein, 735 aa, Artificial Sequence
  source: /note="Description of Artificial Sequence: Synthetic polypeptide"
MAADGYLPDWLEDTLSEGIRQWWKLKPGPPPPKPAERHKDDSRGLVLPGYKYLGPFNGLDKGEPVNEADAAALEHDKAYDRQLDSGDNPYPKYNHADAEFQERLKEDTSFGGNLGRAVFQAKKRVLEPLGLVEEPVKTAPGKKRPVEHSPAEPDSSSGTGKAGQQPARKRLNFGQTGDADSVPDPQPLGQPPAAPSGLGTNTMATGSGAPMADNNEGADGVGNSSGNWHCDSTWMGDRVITTSTRTWALPTYNNHLYKQISSQSGASNDNHYFGYSTPWGYFDFNRFHCHFSPRDWQRLINNNWGFRPKRLNFKLFNIQVKEVTQNDGTTTIANNLTSTVQVFTDSEYQLPYVLGSAHQGCLPPFPADVFMVPQYGYLTLNNGSQAVGRSSFYCLEYFPSQMLRTGNNFTFSYTFEDVPFHSSYAHSQSLDRLMNPLIDQYLYYLSRTNTPSGTTTQSRLQFSQAGASDIRDQSRNWLPGPCYRQQRVSKTSADNNNSEYSWTGATKYHLNGRDSLVNPGPAMASHKDDEEKFFPQSGVLIFGKQDSGKTNVDIEKVMITDEEEIRTTNPVATEQYGSVSTNLQSGNTQAATSDVNTQGVLPGMVWQDRDVYLQGPIWAKIPHTDGHFHPSPLMGGFGLKHPPPQILIKNTPVPANPSTTFSAAKFASFITQYSTGQVSVEIEWELQKENSKRWNPEIQYTSNYNKSVNVDFTVDTNGVYSEPRPIGTRYLTRNL

SEQ ID NO: 323 - DNA, 2208 bp, Artificial Sequence
  source: /note="Description of Artificial Sequence: Synthetic polynucleotide"
atggctgccgatggttatcttccagattggctcgaggacactctctctgaaggaataagacagtggtggaagctcaaacctggcccaccaccaccaaagcccgcagagcggcataaggacgacagcaggggtcttgtgcttcctgggtacaagtaccttggacccttcaacggactcgacaagggagagccggtcaacgaggcagacgccgcggccctcgagcacgacaaggcctacgaccggcagctcgacggcggagacaacccgtacctcaagtacaaccacgccgacgcggagttccaggagcgtcttaaagaagatacgtcttttgggggcaacctcggacgagcagtcttccaggcgaaaaagagggttcttgaacctctgggcctggttgaggaacctgttaagacggctccgggaaaaaagaggccggtagagcactctcttgcggagccagactcctcctcgggaaccggaaaagcgggccagcagcctgcaagaaggagattgaatttcggtcagactggagacgcagactccgtacctgacccccagcctctcggacagccaccagcagccccctctggtctgggaactaatacgatggctacaggcagtggcgcaccaatggcagacaataacgagggcgccgacggagtgggtaattcctcgggaaattggcattgcgattccacatggatgggcgacagagtcatcaccaccagcacccgcacctgggctctgcccacctacaacaaccacctctacaggcagatttccagccaatcaggagcctcaaacgacaaccactactttggctacagcaccccttgggggtattttgacttcaacagattccactgccacttttcgccacgtgactggcaaagactcatcaacaacaattggggatcccggcccaaaagactcaacttcaagctctttaacattcaagtcaaggaggtcacgcagaatgacggtacgacgacgattgccaataaccttaccagcacggttcaggtgtttactgactcggagtaccagctcccgtacgtcctcggctcggcgcatcaaggatgcctcccgccgttcccagcagacgtcttcatggtgccacagtatggatacctcaccctgaacaacgggagtcaggcagtaggacgctcttcattttactgcctggagtactttccttctcagatgctgcgtaccggaaacaactttaccttcagctacacctttgaggacgttcctttccacagcagctacgcccacagccagagtttggaccgtctcatgaatcctctcgtcgaccagtacctgtattacttgagcagaacaaacactccaagcggaaccaccacgcagtcaaggcttcagttttctcaggccggagcaagtgacattcgggaccagtctaggaactggcttcctggaccctgttaccgccagcagcgagtatcaaagacatctgcggataacaacaacagtgaatactcgtggactggagctaccaagtaccaccttaatggaagagactctctggtgaatccgggcccggccatggccagccacaaggacgatgaagaaaagttttttcctcagagcggggttctcatctttggaaaacaagactcgggaaaaactaatgtggacattgaaaaggtcatgattacagacgaagaggaaatcaggaccaccaatcccgtggctacggagcagtatggttctgtatctaccaacctccagagcggcaacacacaagcagctacctcagatgtcaacacacaaggcgttcttccaggcatggtgtggcaggacagagacgtgtacctgcaggggcccatctgggcaaagattccacacacggacggacattttcacccctctcccctcatgggcggattcggacttaaacaccctcccccgcagattctcatcaagaacaccccggtacctgcgaatccttcgactaccttcagtgcggcaaagtttgcttccttcattacacagtactccacggggcaggtcagcgtggagatcgagtgggagctgcagaaggagaacagcaaacgctggaatcccgagattcagtacacttccaactacaacaaatctgttaatgtggactttactgtggacactaatggtgtgtattcagagcctcgccccattggcaccagatacctgactcgtaatctgtaa

SEQ ID NO: 324 - protein, 735 aa, Artificial Sequence
  source: /note="Description of Artificial Sequence: Synthetic polypeptide"
MAADGYLPDWLEDTLSEGIRQWWKLKPGPPPPKPAERHKDDSRGLVLPGYKYLGPFNGLDKGEPVNEADAAALEHDKAYDRQLDGGDNPYLKYNHADAEFQERLKEDTSFGGNLGRAVFQAKKRVLEPLGLVEEPVKTAPGKKRPVEHSLAEPDSSSGTGKAGQQPARRRLNFGQTGDADSVPDPQPLGQPPAAPSGLGTNTMATGSGAPMADNNEGADGVGNSSGNWHCDSTWMGDRVITTSTRTWALPTYNNHLYRQISSQSGASNDNHYFGYSTPWGYFDFNRFHCHFSPRDWQRLINNNWGSRPKRLNFKLFNIQVKEVTQNDGTTTIANNLTSTVQVFTDSEYQLPYVLGSAHQGCLPPFPADVFMVPQYGYLTLNNGSQAVGRSSFYCLEYFPSQMLRTGNNFTFSYTFEDVPFHSSYAHSQSLDRLMNPLVDQYLYYLSRTNTPSGTTTQSRLQFSQAGASDIRDQSRNWLPGPCYRQQRVSKTSADNNNSEYSWTGATKYHLNGRDSLVNPGPAMASHKDDEEKFFPQSGVLIFGKQDSGKTNVDIEKVMITDEEEIRTTNPVATEQYGSVSTNLQSGNTQAATSDVNTQGVLPGMVWQDRDVYLQGPIWAKIPHTDGHFHPSPLMGGFGLKHPPPQILIKNTPVPANPSTTFSAAKFASFITQYSTGQVSVEIEWELQKENSKRWNPEIQYTSNYNKSVNVDFTVDTNGVYSEPRPIGTRYLTRNL

SEQ ID NO: 325 - protein, 738 aa, Artificial Sequence
  source: /note="Description of Artificial Sequence: Synthetic polypeptide"
MAADGYLPDWLEDNLSEGIREWWDLKPGAPKPKANQQKQDDGRGLVLPGYKYLGPFNGLDKGEPVNAADAAALEHDKAYDQQLKAGDNPYLRYNHADAEFQERLQEDTSFGGNLGRAVFQAKKRVLEPLGLVEEAAKTAPGKKRPVEPSPQRSPDSSAGIGKKGQQPAKKRLNFGQTGDSESVPDPQPIGEPPAGPSGLGSGTMAAGGGAPMADNNEGADGVGSSSGNWHCDSTWLGDRVITTSTRTWALPTYNNHLYKQISNGTSGGSTNDNTYFGYSTPWGYFDFNRFHCHFSPRDWQRLINNNWGFRPKRLSFKLFNIQVKEVTQNEGTETIANNLTSTIQVFTDSEYQLPYVLGSAHQGCLPPFPADVFMIPQYGYLTLNNGSQAVGRSSFYCLEYFPSQMLRTGNNFEFSYTFEDVPFHSSCAHSQSSDRLMNPLIDQYLYYLSRTRSTGGTQGTQQLLFSQAGPANMSAQAKNWLPGPCYRQQRVSTTLSQNNNSNFAWTGATKYHLNGRDSLVNPGVAMATHKDDEERFFPSSGVLMFGKQGAGRDNVDYSSVMLTSEEEIKTTNPVATEQYGVVADNLQQTNTGPIVGNVNSQGALPGMVWQNRDVYLQGPIWAKIPHTDGNFHPSPLMGGFGLKHPPPQILIKNTPVPADPPTTFSQAKLASFITQYSTGQVSVEIEWELQKENSKRWNPEIQYTSNYYKSTNVDFAVNTEGTYSEPRPIGTRYLTRNL

SEQ ID NO: 326 - DNA, 2217 bp, Artificial Sequence
  source: /note="Description of Artificial Sequence: Synthetic polynucleotide"
atggctgctgacggttatcttccagattggctcgaggacaacctctctgagggcattcgcgagtggtgggacctgaaacctggagcccccaagcccaaggccaaccagcagaagcaggacgacggccggggtctggtgcttcttggctacaagtacctcggacccttcaacggactcgacaagggggagcccgtcaatgcggcggacgcagcggccctcgagcacgacaaggcctacgaccagcagctcaaagcgggtgacaatccgtacctgcggtataaccacgccgacgccgagtttcaggagcgtctgcaagaagatacgtcttttgggggcaacctcgggcgagcagtcttccaggccaagaagcgggttctcgaacctctcggtctggttgaggaagctgctaagacggctcctggaaagaagagaccggtagaaccgtcacctcagcgttcccccgactcctccacgggcatcggcaagaaaggccagcagcccgctaaaaagagactgaactttggtcagactggcgactcagagtcagtccccgaccctcaaccaatcggagaaccaccagcaggcccctctggtctgggatctggtacaatggctgcaggcggtggcgctccaatggcagacaataacgaaggcgccgacggagtgggtagttcctcaggaaattggcattgcgattccacatggctgggcgacagagtcatcaccaccagcacccgaacctgggccctgcccacctacaacaaccacctctacaagcaaatatccaatgggacatcgggaggaagcaccaacgacaacacctacttcggctacagcaccccctgggggtattttgacttcaacagattccactgccacttctcaccacgtgactggcagcgactcatcaacaacaactggggattccggccaaaaagactcagcttcaagctcttcaacatccaggtcaaggaggtcacgcagaatgaaggcaccaagaccatcgccaataaccttaccagcacgattcaggtatttacggactcggaataccagctgccgtacgtcctcggctccgcgcaccagggctgcctgcctccgttcccggcggacgtcttcatgattccccagtacggctaccttacactgaacaatggaagtcaagccgtaggccgttcctccttctactgcctggaatattttccatctcaaatgctgcgaactggaaacaattttgaattcagctacaccttcgaggacgtgcctttccacagcggctacgcacacagccagagcttggaccgactgatgaatcctctcatcgaccagtacctgtactacttatccagaactcagtccacaggaggaactcaaggtacccagcaattgttattttctcaagctgggcctgcaaacatgtcggctcaggctaagaactggctacctggaccttgctaccggcagcagcgagtctctacgacactgtcgcaaaacaacaacagcaactttgcttggactggtgccaccaaatatcacctgaacggaagagactctttggtaaatcccggtgtcgccatggcaacccacaaggacgacgaggaacgcttcttcccgtcgagtggagtcctgatgtttggaaaacagggtgctggaagagacaatgtggactacagcagcgttatgctaaccagcgaagaagaaattaaaaccactaaccctgtagccacagaacaatacggtgtggtggctgacaacttgcagcaaaccaatacagggcctattgtgggaaatgtcaacagccaaggagccttacctggcatggtctggcagaaccgagacgtgtacctgcagggtcccatctgggccaagattcctcacacggacggcaacttccacccttcaccgctaatgggaggatttggactgaagcacccacctcctcagatcctgatcaagaacacgccggtacctgcggatcctccaacgacgttcagccaggcgaaattggcttccttcattacgcagtacagcaccggacaggtcagcgtggaaatcgagtgggagctgcagaaggagaacagcaaacgctggaacccagagattcagtacacttcaaactactacaaatctacaaatgtggactttgctgtcaatacagagggaacttattctgagcctcgccccattggtactcgttacctcacccgtaatctgtaa

SEQ ID NO: 327 - protein, 738 aa, Artificial Sequence
  source: /note="Description of Artificial Sequence: Synthetic polypeptide"
MAADGYLPDWLEDNLSEGIREWWDLKPGAPKPKANQQKQDDGRGLVLLGYKYLGPFNGLDKGEPVNAADAAALEHDKAYDQQLKAGDNPYLRYNHADAEFQERLQEDTSFGGNLGRAVFQAKKRVLEPLGLVEEAAKTAPGKKRPVEPSPQRSPDSSTGIGKKGQQPAKKRLNFGQTGDSESVPDPQPIGEPPAGPSGLGSGTMAAGGGAPMADNNEGADGVGSSSGNWHCDSTWLGDRVITTSTRTWALPTYNNHLYKQISNGTSGGSTNDNTYFGYSTPWGYFDFNRFHCHFSPRDWQRLINNNWGFRPKRLSFKLFNIQVKEVTQNEGTKTIANNLTSTIQVFTDSEYQLPYVLGSAHQGCLPPFPADVFMIPQYGYLTLNNGSQAVGRSSFYCLEYFPSQMLRTGNNFEFSYTFEDVPFHSGYAHSQSLDRLMNPLIDQYLYYLSRTQSTGGTQGTQQLLFSQAGPANMSAQAKNWLPGPCYRQQRVSTTLSQNNNSNFAWTGATKYHLNGRDSLVNPGVAMATHKDDEERFFPSSGVLMFGKQGAGRDNVDYSSVMLTSEEEIKTTNPVATEQYGVVADNLQQTNTGPIVGNVNSQGALPGMVWQNRDVYLQGPIWAKIPHTDGNFHPSPLMGGFGLKHPPPQILIKNTPVPADPPTTFSQAKLASFITQYSTGQVSVEIEWELQKENSKRWNPEIQYTSNYYKSTNVDFAVNTEGTYSEPRPIGTRYLTRNL

SEQ ID NO: 328 - protein, 735 aa, Artificial Sequence
  source: /note="Description of Artificial Sequence: Synthetic polypeptide"
MAADGYLPDWLEDTLSEGIRQWWKLKPGPPPPKPAERHKDDSRGLVLPGYKYLGPFNGLDKGEPVNEADAAALEHDKAYDRQLDSGDNPYLKYNHADAEFQERLKEDTSFGGNLGRAVFQAKKRVLEPLGLVEPPVKTAPGKKRPVEHSPAEPDSSSGTGKAGQQPARKRLNFGQTGDADSVPDPQPLGQPPAAPSGLGSTTMATGSGAPMADNNEGADGVGNSSGNWHCDSQWLGDRVITTSTRTWALPTYNNHLYKQISSQSGASNDNHYFGYSTPWGYFDFNRFHCHFSPRDWQRLINNNWGFRPKRLNFKLFNIQVKEVTQNDGTTTIANNLTSTVQVFTDSEYQLPYVLGSAHQGCLPPFPADVFMVPQYGYLTLNNGSQAVGRSSFYCLEYFPSQMLRTGNNFQFSYTFEDVPFHSSYAHSQSLDRLMNPLIDQYLYYLNKTQSNSGTLQQSRLLFSQAGPTSMSLQAKNWLPGPCYRQQRLSKQANDNNNSNFPWTAATKYHLNGRDSLVNPGPAMASHKDDEEKFFPMHGTLIFGKQGTNANDADLDNVMITDEEEIRTTNPVATEQYGYVSNNLQNSNTGPTTGTVNHQGALPGMVWQDRDVYLQGPIWAKIPHTDGHFHPSPLMGGFGLKHPPPQIMIKNTPVPANPPTNFSSAKFASFITQYSTGQVSVEIEWELQKENSKRWNPEIQYTSNYNKSVNVDFTVDTNGVYSEPRPIGTRYLTRNL

SEQ ID NO: 329 - protein, 735 aa, Artificial Sequence
  source: /note="Description of Artificial Sequence: Synthetic polypeptide"
MAADGYLPDWLEDTLSEGIRQWWKLKPGPPPPKPAERHKDDSRGLVLPGYKYLGPFNGLDKGEPVNEADAAALEHDKAYDRQLDSGDNPYLKYNHADAEFQERLKEDTSFGGNLGRAVFQAKKRVLEPLGLVEGPVKTAPGKKRPVEHSPAEPDSSSGTGKAGQQPARKRLNFGQTGDADSVPDPQPLGQPPAAPSGLGSTTMATGSGAPMADNNEGADGVGNSSGNWHCDSQWLGDRVITTSTRTWALPTYNNHLYKQISSQSGASNDNHYFGYSTPWGYFDFNRFHCHFSPRDWQRLINNNWGFRPKRLNFKLFNIQVKEVTQNDGTTTIANNLTSTVQVFTDSEYQLPYVLGSAHQGCLPPFPADVFMVPQYGYLTLNNGSQAVGRSSFYCLEYFPSQMLRTGNNFQFSYTFEDVPFHSSYAHSQSLDRLMNPLIDQYLYYLNKTQSNSGTLQQSRLLFSQAGPTSMSLQAKNWLPGPCYRQQRLSKQANDNNNSNFPWTAATKYHLNGRDSLVNPGPAMASHKDDEEKFFPMHGTLIFGKQGTNANDADLDNVMITDEEEIRTTNPVATEQYGYVSNNLQNSNTGPTTGTVNHQGALPGMVWQDRDVYLQGPIWAKIPHTDGHFHPSPLMGGFGLKHPPPQIMIKNTPVPANPPTNFSSAKFASFITQYSTGQVSVEIEWELQKENSKRWNPEIQYTSNYNKSVNVDFTVDTNGVYSEPRPIGTRYLTRNL

SEQ ID NO: 330 - DNA, 2208 bp, Artificial Sequence
  source: /note="Description of Artificial Sequence: Synthetic polynucleotide"
atggctgccgatggttatcttccagattggctcgaggacactctctctgaaggaataagacagtggtggaagctcaaacctggcccaccaccaccaaagcccgcagagcggcataaggacgacagcaggggtcttgtgcttcctgggtacaagtacctcggacccttcaacggactcgacaagggggagccggtcaacgaggcagacgccgcggccctcgagcacgacaaggcctacgaccggcagctcgacagcggagacaacccgtacctcaagtacaaccacgccgacgcggagtttcaggagcgtcttaaagaagatacgtcttttgggggcaacctcggacgagcagtcttccaggcgaaaaagagggttcttgaacctctgggcctggttgagggacctgttaagacggctccgggaaaaaagaggccggtagagcactctcctgcggagccagactcctcctcgggaaccggaaaagcgggccagcagcctgcaagaaaaagattgaattttggtcagactggagacgcagactccgtacctgacccccagcctctcggacagccaccagcagccccctctggtttgggatctactacaatggctacaggcagtggcgcaccaatggcagacaataacgagggtgccgatggagtgggtaattcctcaggaaattggcattgcgattcccaatggctgggcgacagagtcatcaccaccagcacccgaacctgggccctgcccacctacaacaaccacctctacaagcaaatctcaagccaatcaggagcctcaaacgacaaccactactttggctacagcaccccttgggggtattttgacttcaacagattccactgccacttttcaccacgtgactggcaaagactcatcaacaacaactggggattccgacccaagagactcaacttcaagctctttaacattcaagtcaaagaggtcacgcagaatgacggtacgacgacgattgccaataaccttaccagcacggttcaggtgtttactgactcggagtaccagctcccgtacgtcctcgggtcggcgcatcaaggatgcctcccgccgtttccagcggacgtcttcatggtcccacagtatggatacctcaccctgaacaacgggagtcaggcggtaggacgctcttccttttactgcctggagtactttccttctcagatgcttcgtactggaaacaactttcagttcagctacacctttgaagacgttcctttccacagcagctacgctcacagccagagtctggatcggctgatgaatcctctgatcgaccagtacctgtattatctgaacaaaacacaatcaaatagtggaactcttcagcagtctcggctactgtttagtcaagctggacccaccagcatgtctcttcaagctaaaaactggctacctggaccttgctacagacagcagcgtctgtcaaagcaggcaaacgacaacaacaacagcaactttccctggactgcggctacaaagtatcacctaaatggccgggactcgttggttaatccaggaccagctatggccagtcacaaagacgatgaagaaaagtttttccccatgcatggaaccctgatatttggtaaacaaggaacaaatgctaacgacgcggatttggacaatgtcatgattacagatgaagaagaaatccgcaccaccaatcccgtggctacggagcagtacggatatgtgtcaaataatttgcaaaactcaaatactggtccaactactggaactgtcaatcaccaaggagcgttacctggcatggtgtggcaggatcgagacgtgtacctgcagggacccatttgggccaagattcctcacaccgatggacactttcatccttctccactgatgggaggttttgggctcaaacacccgcctcctcagatcatgatcaaaaacactcccgttccagccaatcctcccacaaacttcagttctgccaagtttgcttctttcatcacacagtattccacggggcaggtcagcgtggagatcgagtgggagctgcagaaagagaacagcaaacgctggaatcccgaaattcagtacacttccaactacaacaaatctgttaatgtggactttactgtggacactaatggcgtgtattcagagcctcgccccattggcaccagatacctgactcgtaatctgtaa

SEQ ID NO: 331 - DNA, 2211 bp, Artificial Sequence; identical to SEQ ID NO: 12
  source: /note="Description of Artificial Sequence: Synthetic polynucleotide"

SEQ ID NO: 332 - DNA, 2208 bp, Artificial Sequence
  source: /note="Description of Artificial Sequence: Synthetic polynucleotide"
atggctgccgatggttatcttccagattggctcgaggacactctctctgaaggaacaagacagtggtggaagctcaaacctggcccaccaccaccaaagcccgcagagcggcataaggacgacagcaggggtcttgtgcttcctgggtacaagtacctcggacccttcaacggactcgacaagggggagccggtcaacgaggcagacgccgcggccctcgagcacgacaaggcctacgaccggcagctcgacagcggagacaacccgtacctcaagtacaaccacgccgacgcggagtttcaggagcgtcttaaagaagatacgtcttttgggggcaacctcggacgagcagtcttccaggcgaaaaagagggttcttgaacctctgggcctggttgaggaacctgttaagacggctccgggaaaaaagaggccggtagagcactctcctgcggagccagactcctcctcgggaaccggaaaagcgggccagcagcctgcaagaaaaagattgaattttggtcagactggagacgcagactccgtacctgacccccagcctctcggacagccaccagcagccccctctggtttgggatctactacaatggctacaggcagtggcgcaccaatggcagacaataacgagggtgccgatggagtgggtaattcctcaggaaattggcattgcgattcccaatggctgggcgacagagtcatcaccaccagcacccgaacctgggccctgcccacctacaacaaccacctctacaagcaaatctcaagccaatcaggagcctcaaacgacaaccactactttggctacagcaccccttgggggtattttgacttcaacagattccactgccacttttcaccacgtgactggcaaagactcatcaacaacaactggggattccgacccaagagactcaacttcaagctctttaacattcaagtcaaagaggtcacgcagaatgacggtacgacgacgattgccaataaccttaccagcacggttcaggtgtttactgactcggagtaccagctcccgtacgtcctcgggtcggcgcatcaaggatgcctcccgccgtttccagcggacgtcttcatggtcccacagtatggatacctcaccctgaacaacgggagtcaggcggtaggacgctcttccttttactgcctggagtactttccttctcagatgcttcgtactggaaacaactttcagttcagctacacctttgaagacgttcctttccacagcagctacgctcacagccagagtctggatcggctgatgaatcctctgatcgaccagtacctgtattatctgaacaaaacacaatcaaatagtggaactcttcagcagtctcggctactgtttagtcaagctggacccaccagcatgtctcttcaagctaaaaactggctacctggaccttgctacagacagcagcgtctgtcaaagcaggcaaacgacaacaacaacagcaactttccctggactgcggctacaaagtaccacctaaatggccgggactcgttggttaatccaggaccagctatggccagtcacaaagacgatgaagaaaagtttttccccatgcatggaaccctgatatttggtaaacaaggaacaaatgctaacgacgcggatttggacaatgtcatgattacagatgaagaagaaatccgcaccaccaatcccgtggctacggagcagtacggatatgtgtcaaataatttgcaaaactcaaatactggtccaactactggaactgtcaatcaccaaggagcgttacctggcatggtgtggcaggatcgagacgtgtacctgcagggacccatttgggccaagattcctcacaccgatggacactttcatccttctccactgatgggaggttttgggctcaaacacccgcctcctcagatcatgatcaaaaacactcccgttccagccaatcctcccacaaacttcagttctgccaagtttgcttctttcatcacacagtattccacggggcaggtcagcgtggagatcgagtgggagctgcagaaagagaacagcaaacgctggaatcccgaaattcagtacacttccaactacaacaaatctgttaatgtggactttactgtggacactaatggcgtgtattcagagcctcgccccattggcaccagatacctgactcgtaatctgtaa

SEQ ID NO: 333 - DNA, 2217 bp, Artificial Sequence
  source: /note="Description of Artificial Sequence: Synthetic polynucleotide"
atggctgctgacggttatcttccagattggctcgaggacaacctctctgagggcattcgcgagtggtgggacctgaaacctggagcccccaagcccaaggccaaccagcagaagcaggacgacggccggggtctggtgcttcctggctacaagtacctcggacccttcaacggactcgacaagggggagcccgtcaacgcggcggacgcagcggccctcgagcacgacaaggcctacgaccagcagctcaaagcgggtgacaatccgtacctgcggtataaccacgccgacgccgagtttcaggagcgtctgcaagaagatacgtcttttgggggcaacctcgggcgagcagtcttccaggccaagaagcgggttctcgaacctctcggtctggttgaggaagctgctaagacggctcctggaaagaagagaccggtagaaccgtcacctcagcgttcccccgactcctccacgggcatcggcaagaaaggccagcagcccgctaaaaagagactgaactttggtcagactggcgactcagagtcagtccccgaccctcaaccaatcggagaaccacctgcaggcccctctggtctgggatctggtacaatggctgcaggcggtggcgctccaatggcagacaataacgaaggcgccgacggagtgggtagttcctcaggaaattggcattgcgattccacatggctgggcgacagagtcatcaccaccagcacccgaacctgggccctgcccacctacaacaaccacctctacaagcaaatatccaatgggacatcgggagggagcaccaacgacaacacctacttcggctacagcaccccctgggggtattttgacttcaacagattccactgccacttctcaccacgtgactggcagcgactcatcaacaacaactggggattccggccaaaaagactcagcttcaagctcttcaacatccaggtcaaggaggtcacgcagaatgaaggcaccaagaccatcgccaataaccttaccagcacgattcaggtatttacggactcggaataccagctgccgtacgtcctcggctccgcgcaccagggctgcctgcctccgttcccggcggacgtcttcatgattccccagtacggctaccttacactgaacaatggaagtcaagccgtaggccgttcctccttctactgcctggaatattttccatctcaaatgctgcgaactggaaacaattttgaattcagctacaccttcgaggacgtgcctttccacagcagctacgcacacagccagagcttggaccgactgatgaatcctctcatcgaccagtacctgtactacttatccagaactcagtccacaggaggaactcaaggtacccagcaattgttattttctcaagctgggcctgcaaacatgtcggctcaggctaagaactggctacctggaccttgctaccggcagcagcgagtctctacgacactgtcgcaaaacaacaacagcaactttgcttggactggtgccaccaaatatcacctgaacggaagagactctttggtaaatcccggtgtcgccatggcaacccacaaggacgacgaggaacgcttcttcccgtcgagtggagtcctgatgtttggaaaacagggtgctggaagagacaatgtggactacagcagcgttatgctaaccagcgaagaagaaattaaaaccactaaccctgtagccacagaacaatacggtgtggtggctgacaacttgcagcaaaccaatacagggcctattgtgggaaatgtcaacagccaaggagccttacctggcatggtctggcagaaccgagacgtgtacctgcagggtcccatctgggccaagattcctcacacggacggcaactgccacccttcaccgctaatgggaggatttggactgaagcacccacctcctcagatcctgatcaagaacacgccggtacctgcggatcctccaacaacgttcagccaggcgaaattggcttccttcattacgcagtacagcaccggacaggtcagcgtggaaatcgagtgggagctgcagaaggagaacagcaaacgctggaacccagagattcagtacacttcaaactactacaaatctacaaatgtggactttgctgtcaatacagagggaacttattctgagcctcgccccattggtactcgttacctcacccgtaatctgtaa

SEQ ID NO: 334 - protein, 735 aa, Artificial Sequence
  source: /note="Description of Artificial Sequence: Synthetic polypeptide"
MAADGYLPDWLEDTLSEGTRQWWKLKPGPPPPKPAERHKDDSRGLVLPGYKYLGPFNGLDKGEPVNEADAAALEHDKAYDRQLDSGDNPYLKYNHADAEFQERLKEDTSFGGNLGRAVFQAKKRVLEPLGLVEEPVKTAPGKKRPVEHSPAEPDSSSGTGKAGQQPARKRLNFGQTGDADSVPDPQPLGQPPAAPSGLGSTTMATGSGAPMADNNEGADGVGNSSGNWHCDSQWLGDRVITTSTRTWALPTYNNHLYKQISSQSGASNDNHYFGYSTPWGYFDFNRFHCHFSPRDWQRLINNNWGFRPKRLNFKLFNIQVKEVTQNDGTTTIANNLTSTVQVFTDSEYQLPYVLGSAHQGCLPPFPADVFMVPQYGYLTLNNGSQAVGRSSFYCLEYFPSQMLRTGNNFQFSYTFEDVPFHSSYAHSQSLDRLMNPLIDQYLYYLNKTQSNSGTLQQSRLLFSQAGPTSMSLQAKNWLPGPCYRQQRLSKQANDNNNSNFPWTAATKYHLNGRDSLVNPGPAMASHKDDEEKFFPMHGTLIFGKQGTNANDADLDNVMITDEEEIRTTNPVATEQYGYVSNNLQNSNTGPTTGTVNHQGALPGMVWQDRDVYLQGPIWAKIPHTDGHFHPSPLMGGFGLKHPPPQIMIKNTPVPANPPTNFSSAKFASFITQYSTGQVSVEIEWELQKENSKRWNPEIQYTSNYNKSVNVDFTVDTNGVYSEPRPIGTRYLTRNL

SEQ ID NO: 335 - DNA, 2208 bp, Artificial Sequence
  source: /note="Description of Artificial Sequence: Synthetic polynucleotide"
atggctgccgatggttatcttccagattggctcgaggacactctctctgaaggaataagacagtggtggaagctcaaacctggcccaccaccaccaaagcccgcagagcggcatcaggacaacagcaggggtcttgtgcttcctgggtacaagtacctcggaccctccaacggactcgacaaaggagagccggtcaacgaggcagacgccgcggccctcgagcacgacaaggcctacgaccggcagctcgacagcggagacaacccgtacctcaagtacaaccacgccgacgcggagtttcaggagcgtcttaaagaagatacgtcttttgggggcaacctcggacgagcagtcttccaggcgaaaaagagggttcttgaacctctgggcctggttgaggaacctgttaagacggctccgggaaaaaagaggccggtagagcactctcctgtggagccagactcctcctcgggaaccggaaaagcgggccatcagcctgcgagaaagagattgaattttggtcagactggagacgcagactccgtacctgacccccagcctctcggacagccaccagcagcccccacaagtttgggatctactacaatggctacaggcagtggcgcaccaatggcagacaataacgagggtgccgatggagtgggtaattcctcaggaaattggcattgcgattcccaatggctgggcgacagagtcatcaccaccagcacccgaacctgggccctgcccacctacaacaaccacctctacaagcaaatctccagccaatcaggagcctcgaacgacaaccactactttggctgcagcaccccctgggggtattttgacttcaacagattccactgtcacttctccccacgtgattggcaaagactcatcaacaacaactggggattccgacccaagagactcaacttcaagctctttaacattcaagtcaaagaggtcacgcagaatgacggtacgacgacgattgccaataaccttaccagcacggttcaggtgtttactgactcggagtacccgctcccgtacgtcctcggctcggcgcatcaaggatgcctcccgccgtttccagcggacgtcttcatggtcccacagtatggatacctcaccctgaacaacgggagtcaggcggtaggacgctcttccttttactgcctggagtactttccttctcagatgctgcgtaccggaaacaactttaccttcagctacacctttgaggacgttcctttccacagcagctacgctcacagccagagtttggaccggctgatgaatcctctgatcgaccagtatctatattatctgaacaggacacaatcaaatagtggaactcttcagcagtctaggctactgtttagccaagctggacccaccagcatgtctcttcaagctaaaaactggctgcctggaccttgctacagacagcagcgtctttcaaagcaggcaaacgacaacaacaacagcaactttccctggactgcggctacaaagtatcatctaaatggccgggactcgttggttaatccaggaccagctatggccagccacaaagacgatgaagaaaagtttttccccatgcatggaaccctgatatttggtaaacaaggaacaaatgctaacgacgcggatttggagcatgttatgattacagatgaagaagaaatcaggaccaccaatcctgtggctacagagcagtacggaaacgtgtcaaataatttgcaaaactcaaatactggtccaactacagaaaatgtcaatcaccagggagcgttacctggtatggtgtggcaggatcgagacgtgtacctgcagggacccatttgggccaagattcctcacaccgacggacactttcacccttctccactgatgggaggttttggactcaaacacccgcctcctcaaatcatgatcaaaaacactcccgttccagccaatcctcccacaaacttcagttctgccaagtttgcttctttcatcacacagtattccacgggccaggtcagcgtggagattgagtgggagctgcagaaggagaacagcaaacgctggaaccccgagatccagtatacttccaactacaacaaatctgttaatgtggactttactgtggacactaatggtgtgtattcagagccttgccccattggcaccagatacctgactcgtaatctgtaa

SEQ ID NO: 336 - protein, 735 aa, Artificial Sequence
  source: /note="Description of Artificial Sequence: Synthetic polypeptide"
MAADGYLPDWLEDTLSEGIRQWWKLKPGPPPPKPAERHQDNSRGLVLPGYKYLGPSNGLDKGEPVNEADAAALEHDKAYDRQLDSGDNPYLKYNHADAEFQERLKEDTSFGGNLGRAVFQAKKRVLEPLGLVEEPVKTAPGKKRPVEHSPVEPDSSSGTGKAGHQPARKRLNFGQTGDADSVPDPQPLGQPPAAPTSLGSTTMATGSGAPMADNNEGADGVGNSSGNWHCDSQWLGDRVITTSTRTWALPTYNNHLYKQISSQSGASNDNHYFGCSTPWGYFDFNRFHCHFSPRDWQRLINNNWGFRPKRLNFKLFNIQVKEVTQNDGTTTIANNLTSTVQVFTDSEYPLPYVLGSAHQGCLPPFPADVFMVPQYGYLTLNNGSQAVGRSSFYCLEYFPSQMLRTGNNFTFSYTFEDVPFHSSYAHSQSLDRLMNPLIDQYLYYLNRTQSNSGTLQQSRLLFSQAGPTSMSLQAKNWLPGPCYRQQRLSKQANDNNNSNFPWTAATKYHLNGRDSLVNPGPAMASHKDDEEKFFPMHGTLIFGKQGTNANDADLEHVMITDEEEIRTTNPVATEQYGNVSNNLQNSNTGPTTENVNHQGALPGMVWQDRDVYLQGPIWAKIPHTDGHFHPSPLMGGFGLKHPPPQIMIKNTPVPANPPTNFSSAKFASFITQYSTGQVSVEIEWELQKENSKRWNPEIQYTSNYNKSVNVDFTVDTNGVYSEPCPIGTRYLTRNL

SEQ ID NO: 337 - DNA, 2214 bp, Artificial Sequence
  source: /note="Description of Artificial Sequence: Synthetic polynucleotide"
atggctgccgatggttatcttccagattggctcgaggacaaccttagtgaaggaattcgcgagtggtgggctttgaaacctggagcccctcaacccaaggcaaatcaacaacatcaagacaacgctcgaggtcttgtgcttccgggttacaaataccttggacccggcaacggactcgacaagggggagccggtcaacgcagcagacgcggcggccctcgagcacgacaaggcctacgaccagcagctgcaggcgggtgacaatccgtacctgcggtataaccacgccgacgccgagtttcaggagcgtctgcaagaagatacgtcttttgggggcaaccttggcagagcagtcttccaggccaaaaagaggatccttgagcctcttggtctggttgaggaagcagctaaaacggctcctggaaagaagaggcctgtagatcagtctcctcaggaaccggactcatcatctggtgttggcaaatcgggcaaacagcctgccagaaaaagactaaatttcggtcagactggcgactcagagtcagtcccagaccctcaacctctcggagaaccaccagcagcccccacaagtttgggatctaatacaatggcttcaggcggtggcgcaccaatggcagacaataacgagggtgccgatggggtgggtagttcctcgggaaattggcattgcgattcccaatggctgggggacagagtcatcaccaccagcacccgaacctgggccctgcccacctacaacaatcacctctacaagcaaatctccaacgggacatcgggaggagccaccaacgacaacacctacttcggctacagcaccccctgggggtattttgactttaacagattccactgccacttttcaccacgtgactggcagcgactcatcaacaacaactggggattccggcccaagagactcagcttcaagctcttcaacatccaggtcaaggaggtcacgcagaatgaaggcaccaagaccatcgccaataacctcaccagcaccatccaggtgtttacggactcggagtaccagctgccgtacgttctcggctctgcgcaccagggctgcctccctccgttcccggcggacgtgttcatgattccgcaatacggctacctgacgctcaacaatggcagccaagccgtgggacgttcatccttttactgcctggaatatttcccttctcagatgctgagaacgggcaacaactttaccttcagctacacctttgaggaagtgcctttccacagcagctacgcgcacagccagagcttggaccggctgatgaatcctctgattgaccagtacctgtactacttgtctcggactcaaacaacaggaggcacggcaaatacgcagactctgggcttcagccaaggtgggcctaatacaatggccaatcaggcaaagaactggctgccaggaccctgttaccgccaacaacgcgtctcaacgacaaccgggcaaaacaacaatagcaactttgcctggactgctgggaccaaataccatctgaatggaagaaattcattggctaatcctggcatcgctatggcaacacacaaagacgacgaggagcgtttttttcccagtaacgggatcctgatttttggcaaacaaaatgctgccagagacaatgcggattacagcgatgtcatgctcaccagcgaggaagaaatcaaaaccactaaccctgtggctacagaggaatacggtatcgtggcagataacttgcagcagcaaaacacggctcctcaaattggaactgtcaacagccagggggccttacccggtatggtctggcagaaccgggacgtgtacctgcagggtcccatctgggccaagattcctcacacggacggcaacttccacccgtctccgctgatgggcggctttggcctgaaacatcctccgcctcagatcctgatcaagaacacgcctgtacctgcggatcctccgaccaccttcaaccagtcaaagctgaactctttcatcacgcaatacagcaccggacaggtcagcgtggagatcgagtgggagctgcagaaggaaaacagcaagcgctggaacccggagatccagtacacttccaactattacaagtctaataatgttgaatttgctgttaatactgaaggtgtatatagtgaaccccgccccattggcaccagatacctgactcgtaatctgtaa

SEQ ID NO: 338 - protein, 737 aa, Artificial Sequence
  source: /note="Description of Artificial Sequence: Synthetic polypeptide"
MAADGYLPDWLEDNLSEGIREWWALKPGAPQPKANQQHQDNARGLVLPGYKYLGPGNGLDKGEPVNAADAAALEHDKAYDQQLQAGDNPYLRYNHADAEFQERLQEDTSFGGNLGRAVFQAKKRILEPLGLVEEAAKTAPGKKRPVDQSPQEPDSSSGVGKSGKQPARKRLNFGQTGDSESVPDPQPLGEPPAAPTSLGSNTMASGGGAPMADNNEGADGVGSSSGNWHCDSQWLGDRVITTSTRTWALPTYNNHLYKQISNGTSGGATNDNTYFGYSTPWGYFDFNRFHCHFSPRDWQRLINNNWGFRPKRLSFKLFNIQVKEVTQNEGTKTIANNLTSTIQVFTDSEYQLPYVLGSAHQGCLPPFPADVFMIPQYGYLTLNNGSQAVGRSSFYCLEYFPSQMLRTGNNFTFSYTFEEVPFHSSYAHSQSLDRLMNPLIDQYLYYLSRTQTTGGTANTQTLGFSQGGPNTMANQAKNWLPGPCYRQQRVSTTTGQNNNSNFAWTAGTKYHLNGRNSLANPGIAMATHKDDEERFFPSNGILIFGKQNAARDNADYSDVMLTSEEEIKTTNPVATEEYGIVADNLQQQNTAPQIGTVNSQGALPGMVWQNRDVYLQGPIWAKIPHTDGNFHPSPLMGGFGLKHPPPQILIKNTPVPADPPTTFNQSKLNSFITQYSTGQVSVEIEWELQKENSKRWNPEIQYTSNYYKSNNVEFAVNTEGVYSEPRPIGTRYLTRNL

SEQ ID NO: 339 - DNA, 2211 bp, Artificial Sequence
  source: /note="Description of Artificial Sequence: Synthetic polynucleotide"
atggctgccgatggttatcttccagattggctcgaggacaacctctctgagggcattcgcgagtggtgggacttgaaacctggagccccgaagcccaaagccaaccagcaaaagcaggacgacggccggggtctggtgcttcctggctacaagtacctcggacccttcaacggactcgacaagggggagcccgtcaacgcggcggacgcagcggccctcgagcacgacaaggcctacgaccagcagctcaaagcgggtgacaatccgtacctgcggtataaccacgccgacgccgagtttcaggagcgtctgcaagaagatacgtcttttgggggcaacctcgggcgagcagtcttccaggccaagaagcgggttctcgaacctctcggtctggttgaggaaggcgctaagacggctcctggaaagaaacgtccggtagagcagtcgccacaagagccagactcctcctcgggcatcggcaagacaggccagcagcccgctaaaaagagactcaattttggtcagactggcgactcagagtcagtccccgacccacaacctctcggagaacctccagcaacccccgctgctgtgggacctactacaatggcttcaggcggtggcgcaccaatggcagacaataacgaaggcgccgacggagtgggtaatgcctcaggaaattggcattgcgattccacatggctgggcgacagagtcatcaccaccagcacccgaacatgggccttgcccacctataacaaccacctctacaagcaaatctccagtgcttcaacgggggccagcaacgacaaccactacttcggctacagcaccccctgggggtattttgatttcaacagattccactgccatttctcaccacgtgactggcagcgactcatcaacaacaattggggattccggcccaagagactcaacttcaagctcttcaacatccaagtcaaggaggtcacgacgaatgatggcgtcacgaccatcgctaataaccttaccagcacggttcaagtcttctcggactcggagtaccagctgccgtacgttctcggctctgcccaccagggctgcctgcctccgttcccggcggacgtgttcatgattccccagtacggctacctaacactcaacaacggtagtcaggccgtgggacgctcctccttctactgcctggaatactttccttcgcagatgctgagaaccggcaacaacttccagtttacttacaccttcgaggacgtgcctttccacagcagctacgcccacagccagagcttggaccggctgatgaatcctctgattgaccagtacctgtactacttgtctcggactcaaacaacaggaggcacggcaaatacgcagactctgggcttcagccaaggtgggcctaatacaatggccaatcaggcaaagaactggctgccaggaccctgttaccgccaacaacgcgtctcaacgacaaccgggcaaaacaacaatagcaattttacctggactggtgcttcaaaatataacctcaatgggcgtgaatccatcatcaaccctggcactgctatggcctcacacaaagacgacgaagacaagttctttcccatgagcggtgtcatgatttttggaaaagagagcgccggagcttcaaacactgcattggacaatgtcatgattacagacgaagaggaaattaaagccactaaccctgtggccaccgaaagatttgggaccgtggcagtcaatttccagagcagcagcacagaccctgcgaccggagatgtgcatgctatgggagcattacctggcatggtgtggcaagatagagacgtgtacctgcagggtcccatttgggccaaaattcctcacacagatggacactttcacccgtctcctcttatgggcggctttggactcaagaacccgcctcctcagatcctcatcaaaaacacgcctgttcctgcgaatcctccggcggagttttcagctacaaagtttgcttcattcatcacccaatactccacaggacaagtgagtgtggaaattgaatgggagctgcagaaagaaaacagcaagcgctggaatcccgaagtgcagtacacatccaattatgcaaaatctgccaacgttgattttactgtggacaacaatggactttatactgagcctcgccccattggcacccgttacctcacccgtcccctgtaa

SEQ ID NO: 340 - protein, 736 aa, Artificial Sequence
  source: /note="Description of Artificial Sequence: Synthetic polypeptide"
MAADGYLPDWLEDNLSEGIREWWDLKPGAPKPKANQQKQDDGRGLVLPGYKYLGPFNGLDKGEPVNAADAAALEHDKAYDQQLKAGDNPYLRYNHADAEFQERLQEDTSFGGNLGRAVFQAKKRVLEPLGLVEEGAKTAPGKKRPVEQSPQEPDSSSGIGKTGQQPAKKRLNFGQTGDSESVPDPQPLGEPPATPAAVGPTTMASGGGAPMADNNEGADGVGNASGNWHCDSTWLGDRVITTSTRTWALPTYNNHLYKQISSASTGASNDNHYFGYSTPWGYFDFNRFHCHFSPRDWQRLINNNWGFRPKRLNFKLFNIQVKEVTTNDGVTTIANNLTSTVQVFSDSEYQLPYVLGSAHQGCLPPFPADVFMIPQYGYLTLNNGSQAVGRSSFYCLEYFPSQMLRTGNNFQFTYTFEDVPFHSSYAHSQSLDRLMNPLIDQYLYYLSRTQTTGGTANTQTLGFSQGGPNTMANQAKNWLPGPCYRQQRVSTTTGQNNNSNFTWTGASKYNLNGRESIINPGTAMASHKDDEDKFFPMSGVMIFGKESAGASNTALDNVMITDEEEIKATNPVATERFGTVAVNFQSSSTDPATGDVHAMGALPGMVWQDRDVYLQGPIWAKIPHTDGHFHPSPLMGGFGLKNPPPQILIKNTPVPANPPAEFSATKFASFITQYSTGQVSVEIEWELQKENSKRWNPEVQYTSNYAKSANVDFTVDNNGLYTEPRPIGTRYLTRPL

SEQ ID NO: 341 - DNA, 2211 bp, Artificial Sequence
  source: /note="Description of Artificial Sequence: Synthetic polynucleotide"
atggctgctgacggttatcttccagattggctcgaggacaacctttctgaaggcattcgagagtggtgggcgctgcaacctggagcccctaaacccaaggcaaatcaacaacatcaggacaacgctcggggtcttgtgcttccgggttacaaatacctcggacccggcaacggactcgacaagggggaacccgtcaacgcagcggacgcggcagccctcgagcacgacaaggcctacgaccagcagctcaaggccggtgacaacccctacctcaagtacaaccacgccgacgccgagttccaggagcggctcaaagaagatacgtcttttgggggcaacctcgggcgagcagtcttccaggccaaaaagaggcttcttgaacctcttggtctggttgaggaagcggctaagacggctcctggaaagaagaggcctgtagatcagtctcctcaggaaccggactcatcatctggtgttggcaaatcgggcaaacagcctgccagaaaaagactaaatttcggtcagactggcgactcagagtcagtcccagaccctcaacctctcggagaaccaccagcagcccccacaagtttgggatctaatacaatggcttcaggcggtggcgcaccaatggcagacaataacgagggtgccgatggagtgggtaattcctcaggaaattggcattgcgattcccaatggctgggcgacagagtcatcaccaccagcaccagaacctgggccctgcccacttacaacaaccatctctacaagcaaatctccagccaatcaggagcttcaaacgacaaccactactttggctacagcaccccttgggggtattttgactttaacagattccactgccacttctcaccacgtgactggcagcgactcattaacaacaactggggattccggcccaagaaactcagcttcaagctcttcaacatccaagttaaagaggtcacgcagaacgatggcacgacgactattgccaataaccttaccagcacggttcaagtgtttacggactcggagtatcagctcccgtacgtgctcgggtcggcgcaccaaggctgtctcccgccgtttccagcggacgtcttcatggtccctcagtatggatacctcaccctgaacaacggaagtcaagcggtgggacgctcatccttttactgcctggagtacttcccttcgcagatgctaaggactggaaataacttccaattcagctataccttcgaggatgtaccttttcacagcagctacgctcacagccagagtttggatcgcttgatgaatcctcttattgatcagtatctgtactacctgaacagaacgcaaggaacaacctctggaacaaccaaccaatcacggctgctttttagccaggctgggcctcagtctatgtctttgcaggccagaaattggctacctgggccctgctaccggcaacagagactttcaaagactgctaacgacaacaacaacagtaactttccttggacagcggccagcaaatatcatctcaatggccgcgactcgctggtgaatccaggaccagctatggccagtcacaaggacgatgaagaaaaatttttccctatgcacggcaatctaatatttggcaaagaagggacaacggcaagtaacgcagaattagataatgtaatgattacggatgaagaagagattcgtaccaccaatcctgtggcaacagagcagtatggaactgtggcaaataacttgcagagctcaaatacagctcccacgactagaactgtcaatgatcagggggccttacctggcatggtgtggcaagatcgtgacgtgtaccttcaaggacctatctgggcaaagattcctcacacggatggacactttcatccttctcctctgatgggaggctttggactgaaacatccgcctcctcaaatcatgatcaaaaatactccggtaccggcaaatcctccgacgactttcagcccggccaagtttgcttcatttatcactcagtactccactggacaggtcagcgtggaaattgagtgggagctacagaaagaaaacagcaaacgttggaatccagagattcagtacacttccaactacaacaagtctgttaatgtggactttactgtagacactaatggtgtttatagtgaacctcgccccattggcacccgttaccttacccgtcccctgtaa

SEQ ID NO: 342 - protein, 736 aa, Artificial Sequence
  source: /note="Description of Artificial Sequence: Synthetic polypeptide"
MAADGYLPDWLEDNLSEGIREWWALQPGAPKPKANQQHQDNARGLVLPGYKYLGPGNGLDKGEPVNAADAAALEHDKAYDQQLKAGDNPYLKYNHADAEFQERLKEDTSFGGNLGRAVFQAKKRLLEPLGLVEEAAKTAPGKKRPVDQSPQEPDSSSGVGKSGKQPARKRLNFGQTGDSESVPDPQPLGEPPAAPTSLGSNTMASGGGAPMADNNEGADGVGNSSGNWHCDSQWLGDRVITTSTRTWALPTYNNHLYKQISSQSGASNDNHYFGYSTPWGYFDFNRFHCHFSPRDWQRLINNNWGFRPKKLSFKLFNIQVKEVTQNDGTTTIANNLTSTVQVFTDSEYQLPYVLGSAHQGCLPPFPADVFMVPQYGYLTLNNGSQAVGRSSFYCLEYFPSQMLRTGNNFQFSYTFEDVPFHSSYAHSQSLDRLMNPLIDQYLYYLNRTQGTTSGTTNQSRLLFSQAGPQSMSLQARNWLPGPCYRQQRLSKTANDNNNSNFPWTAASKYHLNGRDSLVNPGPAMASHKDDEEKFFPMHGNLIFGKEGTTASNAELDNVMITDEEEIRTTNPVATEQYGTVANNLQSSNTAPTTRTVNDQGALPGMVWQDRDVYLQGPIWAKIPHTDGHFHPSPLMGGFGLKHPPPQIMIKNTPVPANPPTTFSPAKFASFITQYSTGQVSVEIEWELQKENSKRWNPEIQYTSNYNKSVNVDFTVDTNGVYSEPRPIGTRYLTRPL

SEQ ID NO: 343 - DNA, 2211 bp, Artificial Sequence
  source: /note="Description of Artificial Sequence: Synthetic polynucleotide"
atggctgccgatggttatcttccagattggctcgaggacaaccttagtgaaggaattcgcgagtggtgggctttgaaacctggagcccctcaacccaaggcaaatcaacaacatcaagacaacgctcgaggtcttgtgcttccgggttacaaataccttggacccggcaacggactcgacaagggggagccggtcaacgcagcagacgcggcggccctcgagcacgacaaggcctacgaccagcagctcaaggccggagacaacccgtacctcaagtacaaccacgccgacgccgagttccaggagcggctcaaagaagatacgtcttttgggggcaacctcgggcgagcagtcttccaggccaaaaagaggcttcttgaacctcttggtctggttgaggaagcggctaagacggctcctggaaagaagagaccggtagagccatcaccccagcgttctccagactcctctacgggcatcggcaagaaaggccaacagcccgctaaaaagagactcaattttggtcagactggcgactcagagtcagtccccgacccacaacctctcggagaacctccagcaacccccgctgctgtgggacctactacaatggcttcaggcggtggcgcaccaatggcagacaataacgagggtgccgatggagtgggtaattcctcaggaaattggcattgcgattcccaatggctgggcgacagagtcatcaccaccagcaccagaacctgggccctgcccacttacaacaaccatctctacaagcaaatctccagccaatcaggagcttcaaacgacaaccactactttggctacagcaccccttgggggtattttgactttaacagattccactgccacttttcaccacgtgactggcaaagactcatcaacaacaactggggattccgacccaagagactcaacttcaagctcttcaacatccaagtcaaggaggtcacgacgaatgatggcgtcacgaccatcgctaataaccttaccagcacggttcaagtcttctcggactcggagtaccagttgccgtacgtcctcggctctgcgcaccagggctgcctccctccgttcccggcggacgtgttcatgattccgcagtacggctacctaacgctcaacaatggcagccaagccgtgggacgttcatccttttactgcctggaatatttcccttctcagatgctgagaacgggcaacaactttaccttcagctacacttttgaggacgttcctttccacagcagctacgctcacagccagagtctggaccgtctcatgaatcctctcatcgaccagtacctgtattacttgagcagaacaaacactccaagtggaaccaccacgcagtcaaggcttcagttttctcaggccggagcgagtgacattcgggaccagtctaggaactggcttcctggaccctgttaccgccagcagcgcgtttctaaaacaaaaacagacaacaacaacagcaattttacctggactggtgcttcaaaatataaccttaatgggcgtgaatctataatcaaccctggcactgctatggcctcacacaaagacgacgaagacaagttctttcccatgagcggtgtcatgatttttggaaaagagagcgccggagcttcaaacactgcattggacaatgtcatgattacagacgaagaggaaattaaagccactaaccctgtggccaccgaaagatttgggaccgtggcagtcaatttccagagcagcagcacagaccctgcgaccggagatgtgcatgttatgggagccttacctggaatggtgtggcaagacagagacgtatacctgcagggtcctatttgggccaaaattcctcacacggatggacactttcacccgtctcctcttatgggcggctttggactcaagaacccgcctcctcagatcctcatcaaaaacacgcctgttcctgcgaatcctccggcggagttttcagctacaaagtttgcttcattcatcacccaatactccacaggacaagtgagtgtggaaattgaatgggagctgcagaaagaaaacagcaagcgctggaatcccgaagtgcagtacacatccaattatgcaaaatctgccaacgttgattttactgtggacaacaatggactttatactgagcctcgccccattggcacccgttaccttacccgtcccctgtaa

SEQ ID NO: 344 - protein, 736 aa, Artificial Sequence
  source: /note="Description of Artificial Sequence: Synthetic polypeptide"
MAADGYLPDWLEDNLSEGIREWWALKPGAPQPKANQQHQDNARGLVLPGYKYLGPGNGLDKGEPVNAADAAALEHDKAYDQQLKAGDNPYLKYNHADAEFQERLKEDTSFGGNLGRAVFQAKKRLLEPLGLVEEAAKTAPGKKRPVEPSPQRSPDSSTGIGKKGQQPAKKRLNFGQTGDSESVPDPQPLGEPPATPAAVGPTTMASGGGAPMADNNEGADGVGNSSGNWHCDSQWLGDRVITTSTRTWALPTYNNHLYKQISSQSGASNDNHYFGYSTPWGYFDFNRFHCHFSPRDWQRLINNNWGFRPKRLNFKLFNIQVKEVTTNDGVTTIANNLTSTVQVFSDSEYQLPYVLGSAHQGCLPPFPADVFMIPQYGYLTLNNGSQAVGRSSFYCLEYFPSQMLRTGNNFTFSYTFEDVPFHSSYAHSQSLDRLMNPLIDQYLYYLSRTNTPSGTTTQSRLQFSQAGASDIRDQSRNWLPGPCYRQQRVSKTKTDNNNSNFTWTGASKYNLNGRESIINPGTAMASHKDDEDKFFPMSGVMIFGKESAGASNTALDNVMITDEEEIKATNPVATERFGTVAVNFQSSSTDPATGDVHVMGALPGMVWQDRDVYLQGPIWAKIPHTDGHFHPSPLMGGFGLKNPPPQILIKNTPVPANPPAEFSATKFASFITQYSTGQVSVEIEWELQKENSKRWNPEVQYTSNYAKSANVDFTVDNNGLYTEPRPIGTRYLTRPL

SEQ ID NO: 345 - DNA, 2211 bp, Artificial Sequence
  source: /note="Description of Artificial Sequence: Synthetic polynucleotide"
atggctgccgatggttatcttccagattggctcgaggacaacctctctgagggcattcgcgagtggtgggacttgaaacctggagcccctaaacccaaggcaaatcaacaacatcaggacaacgctcgaggtcttgtgcttccgggttacaaataccttggacccggcaacggactcgacaagggggagccggtcaacgcagcagacgcggcggccctcgagcacgacaaggcctacgaccagcagctcaaggccggagacaacccgtacctcaagtacaaccacgccgacgccgagttccaggagcggctcaaagaagatacgtcttttgggggcaacctcgggcgagcagtcttccaggccaaaaagaggcttcttgaacctcttggtctggttgaggaagcggctaagacggctcctggaaagaagagaccggtagagccatcaccccagcgttctccagactcctctacgggcatcggcaagaaaggccaacagcccgctaaaaagagactcaattttggtcagactggcgactcagagtcagtccccgacccacaacctctcggagaacctccagcaacccccgctgctgtgggacctactacaatggcttcaggcggtggcgcaccaatggcagacaataacgagggtgccgatggagtgggtaattcctcaggaaattggcattgcgattcccaatggctgggcgacagagtcatcaccaccagcaccagaacctgggccctgcccacttacaacaaccatctctacaagcaaatctccagccaatcaggagcttcaaacgacaaccactactttggctacagcaccccttgggggtattttgactttaacagattccactgccacttttcaccacgtgactggcaaagactcatcaacaacaactggggattccgacccaagagactcaacttcaagctcttcaacatccaagtcaaggaggtcacgacgaatgatggcgtcacgaccatcgctaataaccttaccagcacggttcaagtcttctcggactcggagtaccagttgccgtacgtcctcggctctgcgcaccagggctgcctccctccgttcccggcggacgtgttcatgattccgcagtacggctacctaacgctcaacaatggcagccaagccgtgggacgttcatccttttactgcctggaatatttcccttctcagatgctgagaacgggcaacaactttaccttcagctacacttttgaggacgttcctttccacagcagctacgctcacagccagagtctggaccgtctcatgaatcccctcatcgaccagtacctgtattacttgagcagaacaaacactccaagtggaaccaccacgcagtcaaggcttcagttttctcaggccggagcgagtgacattcgggaccagtctaggaactggcttcctggaccctgttaccggcagcagcgcgtttctaaaacaaaaacagacaacaacaacagcaactttacctggactggtgcttcaaaatataaccttaatgggcgtgaatctataatcaaccctggcactgctatggcctcacacaaagacgacgaagacaagttctttcccatgagcggtgtcatgatttttggaaaggagagcgccggagcttcaaacactgcattggacaatgtcatgatcacagacgaagaggaaatcaaagccactaaccccgtggccaccgaaagatttgggactgtggcagtcaatctccagagcagcagcacagaccctgcgaccggagatgtgcatgttatgggagccttacctggaatggtgtggcaagacagagacgtgtacctgcagggtcctatttgggccaaaattcctcacacggatggacactttcacccgtctcctctcatgggcggctttggacttaagcacccgcctcctcagatcctcatcaaaaacacgcctgttcctgcgaatcctccggcagagttttcggctacaaagtttgcttcattcatcacccagtattccacaggacaagtgagtgtggaaattgaatgggagctgcagaaagaaaacagcaagcgctggaatcccgaagtgcagtacacatccaattatgcaaaatctgccaacgttgattttactgtggacaacaatggactttatactgagcctcgccccattggcacccgttacctcacccgtcccctgtaa

SEQ ID NO: 346 - protein, 736 aa, Artificial Sequence
  source: /note="Description of Artificial Sequence: Synthetic polypeptide"
MAADGYLPDWLEDNLSEGIREWWDLKPGAPKPKANQQHQDNARGLVLPGYKYLGPGNGLDKGEPVNAADAAALEHDKAYDQQLKAGDNPYLKYNHADAEFQERLKEDTSFGGNLGRAVFQAKKRLLEPLGLVEEAAKTAPGKKRPVEPSPQRSPDSSTGIGKKGQQPAKKRLNFGQTGDSESVPDPQPLGEPPATPAAVGPTTMASGGGAPMADNNEGADGVGNSSGNWHCDSQWLGDRVITTSTRTWALPTYNNHLYKQISSQSGASNDNHYFGYSTPWGYFDFNRFHCHFSPRDWQRLINNNWGFRPKRLNFKLFNIQVKEVTTNDGVTTIANNLTSTVQVFSDSEYQLPYVLGSAHQGCLPPFPADVFMIPQYGYLTLNNGSQAVGRSSFYCLEYFPSQMLRTGNNFTFSYTFEDVPFHSSYAHSQSLDRLMNPLIDQYLYYLSRTNTPSGTTTQSRLQFSQAGASDIRDQSRNWLPGPCYRQQRVSKTKTDNNNSNFTWTGASKYNLNGRESIINPGTAMASHKDDEDKFFPMSGVMIFGKESAGASNTALDNVMITDEEEIKATNPVATERFGTVAVNLQSSSTDPATGDVHVMGALPGMVWQDRDVYLQGPIWAKIPHTDGHFHPSPLMGGFGLKHPPPQILIKNTPVPANPPAEFSATKFASFITQYSTGQVSVEIEWELQKENSKRWNPEVQYTSNYAKSANVDFTVDNNGLYTEPRPIGTRYLTRPL

SEQ ID NO: 347 - DNA, 2214 bp, Artificial Sequence
  source: /note="Description of Artificial Sequence: Synthetic polynucleotide"
atggctgccgatggttatcttccagattggctcgaggacaaccttagtgaaggaattcgcgagtggtgggctttgaaacctggagcccctcaacccaaggcaaatcaacaacatcaagacaacgctcgaggtcttgtgcttccgggttacaaataccttggacccggcaacggactcgacaagggggagccggtcaacgcagcagacgcggcggccctcgagcacgacaaggcctacgaccagcagctgcaggcgggtgacaatccgtacctgcggtataaccacgccgacgccgagtttcaggagcgtctgcaagaagatacgtcttttgggggcaaccttggcagagcagtcttccaggccaaaaagaggatccttgagcctcttggtctggttgaggaagcagctaaaacggctcctggaaagaagaggcctgtagatcagtctcctcaggaaccggactcatcatctggtgttggcaaatcgggcaaacagcctgccagaaaaagactaaatttcggtcagactggcgactcagagtcagtcccagaccctcaacctctcggagaaccaccagcagcccccacaagtttgggatctaatacaatggcttcaggcggtggcgcaccaatggcagacaataacgagggtgccgatggggtgggtagttcctcgggaaattggcattgcgattcccaatgactgggggacagagtcatcaccaccagcacccgaacctgggccctgcccacctacaacaatcacctctacaagcaaatctccaacgggacatcgggaggagccaccaacgacaacacctacttcggctacagcaccccctgggggtattttgactttaacagattccactgccacttttcaccacgtgactggcagcgactcatcaacaacaactggggattccggcccaagagactcagcttcaagctcttcaacatccaggtcaaggaggtcacgcagaatgaaggcaccaagaccatcgccaataacctcaccagcaccatccaggtgtttacggactcggagtaccagctgccgtacgttctcggctctgcgcaccagggctgcctccctccgttcccggcggacgtgttcatgattccgcaatacggctacctgacgctcaacaatggcagccaagccgtgggacgttcatccttttactgcctggaatatttcccttctcagatgctgagaacgggcaacaactttaccttcagctacacctttgaggaagtgcctttccacagcagctacgcgcacagccagagcttggaccggctgatgaatcctctgattgaccagtacctgtactacttgtctcggactcaaacaacaggaggcacggcaaatacgcagactctgggcttcagccaaggtgggcctaatacaatggccaatcaggcaaagaactggctgccaggaccctgttaccgccaacaacgcgtctcaacgacaaccgggcaaaacaacaatagcaactttgcctggactgctgggaccaaataccatctgaatggaagaaattcattggctaatcctggcatcgctatggcaacacacaaagacgacgaggagcgtttttttcccagtaacgggatcctgatttttggcaaacaaaatgctgccagagacaatgcggattacagcgatgtcatgctcaccagcgaggaagaaatcaaaaccactaaccctgtggctacagaggaatacggtatcgtggcagataacttgcagcagcaaaacacggctcctcaaattggaactgtcaacagccagggggccttacccggtatggtctggcagaaccgggacgtgtacctgcagggtcccatctgggccaagattcctcacacggacggcaacttccacccgtctccgctgatgggcggctttggcctgaaacatcctccgcctcagatcctgatcaagaacacgcctgtacctgcggatcctccgaccaccttcaaccagtcaaagctgaactctttcatcacgcaatacagcaccggacaggtcagcgtggagatcgagtgggagctgcagaaggaaaacagcaagcgctggaacccggagatccagtacacttccaactattacaagtctaataatgttgaatttgctgttaatactgaaggtgtatatagtgaaccccgccccattggcaccagatacctgactcgtaatctgtaa

SEQ ID NO: 348 - protein, 736 aa, Artificial Sequence
  source: /note="Description of Artificial Sequence: Synthetic polypeptide"
MAADGYLPDWLEDNLSEGIREWWALKPGAPQPKANQQHQDNARGLVLPGYKYLGPGNGLDKGEPVNAADAAALEHDKAYDQQLQAGDNPYLRYNHADAEFQERLQEDTSFGGNLGRAVFQAKKRILEPLGLVEEAAKTAPGKKRPVDQSPQEPDSSSGVGKSGKQPARKRLNFGQTGDSESVPDPQPLGEPPAAPTSLGSNTMASGGGAPMADNNEGADGVGSSSGNWHCDSQLGDRVITTSTRTWALPTYNNHLYKQISNGTSGGATNDNTYFGYSTPWGYFDFNRFHCHFSPRDWQRLINNNWGFRPKRLSFKLFNIQVKEVTQNEGTKTIANNLTSTIQVFTDSEYQLPYVLGSAHQGCLPPFPADVFMIPQYGYLTLNNGSQAVGRSSFYCLEYFPSQMLRTGNNFTFSYTFEEVPFHSSYAHSQSLDRLMNPLIDQYLYYLSRTQTTGGTANTQTLGFSQGGPNTMANQAKNWLPGPCYRQQRVSTTTGQNNNSNFAWTAGTKYHLNGRNSLANPGIAMATHKDDEERFFPSNGILIFGKQNAARDNADYSDVMLTSEEEIKTTNPVATEEYGIVADNLQQQNTAPQIGTVNSQGALPGMVWQNRDVYLQGPIWAKIPHTDGNFHPSPLMGGFGLKHPPPQILIKNTPVPADPPTTFNQSKLNSFITQYSTGQVSVEIEWELQKENSKRWNPEIQYTSNYYKSNNVEFAVNTEGVYSEPRPIGTRYLTRNL

SEQ ID NO: 349 - DNA, 2214 bp, Artificial Sequence
  source: /note="Description of Artificial Sequence: Synthetic polynucleotide"
atggctgccgatggttatcttccagattggctcgaggacaaccttagtgaaggaattcgcgagtggtgggctttgaaacctggagcccctcaacccaaggcaaatcaacaacatcaagacaacgctcgaggtcttgtgcttccgggttacaaataccttggacccggcaacggactcgacaagggggagccggtcaacgcagcagacgcggcggccctcgagcacgacaaggcctacgaccagcagctgcaggcgggtgacaatccgtacctgcggtataaccacgccgacgccgagtttcaggagcgtctgcaagaagatacgtcttttgggggcaaccttggcagagcagtcttccaggccaaaaagaggatccttgagcctcttggtctggttgaggaagcagctaaaacggctcctggaaagaagaggcctgtagatcagtctcctcaggaaccggactcatcatctggtgttggcaaatcgggcaaacagcctgccagaaaaagactaaatttcggtcagactggcgactcagagtcagtcccagaccctcaacctctcggagaaccaccagcagcccccacaagtttgggatctaatacaatggcttcaggcggtggcgcaccaatggcagacaataacgagggtgccgatggggtgggtagttcctcgggaaattggcattgcgattcccaatggctgggggacagagtcatcaccaccagcacccgaacctgggccctgcccacctacaacaatcacctctacaagcaaatctccaacgggacatcgggaggagccaccaacgacaacacctacttcggctacagcaccccctgggggtattttgactttaacagattccactgccacttttcaccacgtgactggcagcgactcatcaacaacaactggggattccggcccaagagactcagcttcaagctcttcaacatccaggtcaaggaggtcacgcagaatgaaggcaccaagaccatcgccaataacctcaccagcaccatccaggtgtttacggactcggagtaccagctgccgtacgttctcggctctgcgcaccagggctgcctccctccgttcccggcggacgtgttcatgattccgcaatacggctacctgacgctcaacaatggcagccaagccgtgggacgttcatccttttactgcctggaatatttcccttctcagatgctgagaacgggcaacaactttaccttcagctacacctttgaggaagtgccttttcacagcagctacgcgcacagccagagcttggaccggctgatgaatcctctgattgaccagtacctgtactacttgtctcggactcaaacaacaggaggcacggcaaatacgcagactctgggcttcagccaaggtgggcctaatacaatggccaatcaggcaaagaactggctgccaggaccctgttaccgccaacaacgcgtctcaacgacaaccgggcaaaacaacaatagcaactttgcctggactgctgggaccaaataccatctgaatggaagaaattcattggctaatcctggcatcgctatggcaacacacaaagacgacgaggagcgtttttttcccagtaacgggatcctgatttttggcaaacaaaatgctgccagagacaatgcggattacagcgatgtcatgctcaccagcgaggaagaaatcaaaaccactaaccctgtggctacagaggaatacggtatcgtggcagataacttgcagcagcaaaacacggctcctcaaattggaactgtcaacagccagggggccttacccggtatggtctggcagaaccgggacgtgtacctgcagggtcccatctgggccaagattcctcacacggacggcaacttccacccgtctccgctgatgggcggctttggcctgaaacatcctccgcctcagatcctgatcaagaacacgcctgtacctgcggatcctccgaccaccttcaaccagtcaaagctgaactctttcatcacgcaatacagcaccggacaggtcagcgtggagatcgagtgggagctgcagaaggaaaacagcaagcgctggaacccggagatccagtacacttccaactattacaagtctaataatgttgaatttgctgttaatactgaaggtgtatatagtgaaccccgccccattggcaccagatacctgactcgtaatctgtaa

SEQ ID NO: 350 - protein, 737 aa, Artificial Sequence; identical to SEQ ID NO: 338
  source: /note="Description of Artificial Sequence: Synthetic polypeptide"

SEQ ID NO: 351 - DNA, 2211 bp, Artificial Sequence
  source: /note="Description of Artificial Sequence: Synthetic polynucleotide"
atggctgccgatggttatcttccagattggctcgaggacaacctctctgagggcattcgcgagtggtgggacttgaaacctggagcccctaaacccaaggcaaatcaacaacatcaggacaacgctcgaggtcttgtgcttccgggttacaaataccttggacccggcaacggactcgacaagggggagccggtcaacgcagcagacgcggcggccctcgagcacgacaaggcctacgaccagcagctcaaggccggagacaacccgtacctcaagtacaaccacgccgacgccgagttccaggagcggctcaaagaagatacgtcttttgggggcaacctcgggcgagcagtcttccaggccaaaaagaggcttcttgaacctcttggtctggttgaggaagcggctaagacggctcctggaaagaagagaccggtagagccatcaccccagcgttctccagactcctctacgggcatcggcaagaaaggccaacagcccgctaaaaagagactcaattttggtcagactggcgactcagagtcagtccccgacccacaacctctcggagaacctccagcaacccccgctgctgtgggacctactacaatggcttcaggcggtggcgcaccaatggcagacaataacgagggtgccgatggagtgggtaattcctcaggaaattggcattgcgattcccaatggctgggcgacagagtcatcaccaccagcaccagaacctgggccctgcccacttacaacaaccatctctacaagcaaatctccagccaatcaggagcttcaaacgacaaccactactttggctacagcaccccttgggggtattttgactttaacagattccactgccacttttcaccacgtgactggcaaagactcatcaacaacaactggggattccgacccaagagactcaacttcaagctcttcaacatccaagtcaaggaggtcacgacgaatgatggcgtcacgaccatcgctaataaccttaccagcacggttcaagtcttctcggactcggagtaccagttgccgtacgtcctcggctctgcgcaccagggctgcctccctccgttcccggcggacgtgttcatgattccgcagtacggctacctaacgctcaacaatggcagccaagccgtgggacgttcatccttttactgcctggaatatttcccttctcagatgctgagaacgggcaacaactttaccttcagctacacttttgaggacgttcctttccacagcagctacgctcacagccagagtctggaccgtctcatgaatcctctcatcgaccagtacctgtattacttgagcagaacaaacactccaagtggaaccaccacgcagtcaaggcttcagttttctcaggccggagcgagtgacattcgggaccagtctaggaactggcttcctggaccctgttaccgccagcagcgcgtttctaaaacaaaaacagacaacaacaacagcaattttacctggactggtgcttcaaaatataaccttaatgggcgtgaatctataatcaaccctggcactgctatggcctcacacaaagacgacgaagacaagttctttcccatgagcggtgtcatgatttttggaaaagagagcgccggagcttcaaacactgcattggacaatgtcatgattacagacgaagaggaaattaaagccactaaccctgtggccaccgaaagatttgggaccgtggcagtcaatttccagagcagcagcacagaccctgcgaccggagatgtgcatgctatgggagcattacctggcatggtgtggcaagatagagacgtgtacctgcagggtcccatttgggccaaaattcctcacacagatggacactttcacccgtctcctcttatgggcggctttggactcaagaacccgcctcctcagatcctcatcaaaaacacgcctgttcctgcgaatcctccggcggagttttcagctacaaagtttgcttcattcatcacccaatactccacaggacaagtgagtgtggaaattgaatgggagctgcagaaagaaaacagcaagcgctggaatcccgaagtgcagtacacatccaattatgcaaaatctgccaacgttgattttactgtggacaacaatggactttatactgagcctcgccccattggcacccgttaccttacccgtcccctgtaa

SEQ ID NO: 352 - protein, 736 aa, Artificial Sequence
  source: /note="Description of Artificial Sequence: Synthetic polypeptide"
MAADGYLPDWLEDNLSEGIREWWDLKPGAPKPKANQQHQDNARGLVLPGYKYLGPGNGLDKGEPVNAADAAALEHDKAYDQQLKAGDNPYLKYNHADAEFQERLKEDTSFGGNLGRAVFQAKKRLLEPLGLVEEAAKTAPGKKRPVEPSPQRSPDSSTGIGKKGQQPAKKRLNFGQTGDSESVPDPQPLGEPPATPAAVGPTTMASGGGAPMADNNEGADGVGNSSGNWHCDSQWLGDRVITTSTRTWALPTYNNHLYKQISSQSGASNDNHYFGYSTPWGYFDFNRFHCHFSPRDWQRLINNNWGFRPKRLNFKLFNIQVKEVTTNDGVTTIANNLTSTVQVFSDSEYQLPYVLGSAHQGCLPPFPADVFMIPQYGYLTLNNGSQAVGRSSFYCLEYFPSQMLRTGNNFTFSYTFEDVPFHSSYAHSQSLDRLMNPLIDQYLYYLSRTNTPSGTTTQSRLQFSQAGASDIRDQSRNWLPGPCYRQQRVSKTKTDNNNSNFTWTGASKYNLNGRESIINPGTAMASHKDDEDKFFPMSGVMIFGKESAGASNTALDNVMITDEEEIKATNPVATERFGTVAVNFQSSSTDPATGDVHAMGALPGMVWQDRDVYLQGPIWAKIPHTDGHFHPSPLMGGFGLKNPPPQILIKNTPVPANPPAEFSATKFASFITQYSTGQVSVEIEWELQKENSKRWNPEVQYTSNYAKSANVDFTVDNNGLYTEPRPIGTRYLTRPL

SEQ ID NO: 353 - DNA, 2211 bp, Artificial Sequence
  source: /note="Description of Artificial Sequence: Synthetic polynucleotide"
atggctgccgatggttatcttccagattggctcgaggacaaccttagtgaaggaattcgcgagtggtgggcgctgaaacctggagccccgaagcccaaagccaaccagcaaaagcaggacgacggccggggtctggtgcttccgggttacaaatacctcggacccggtaacggactcgacaaaggagagccggtcaacgaggcggacgcggcagccctcgagcacgacaaggcctacgaccagcagctcaaagcgggtgacaatccgtacctgcggtataaccacgccgacgccgagtttcaggagcgtctgcaagaagatacgtcttttgggggcaacctcgggcgagcagtcttccaggccaagaagcgggttctcgaacctctcggtctggttgaggaaggcgctaagacggctcccggaaagaaacgtccggtagagcagtcgccacaagagccagactcctctacgggcatcggcaagaaaggccaacagcccgccagaaaaagactcaatttcggtcagactggcgactcagagtcagttccagaccctcaacctctcggagaacctccagcagcgccctctggtgtgggacctactacaatggcttcaggcggtggcgcaccaatggcagacaataacgaaggcgccgacggagtgggtaatgcctcaggaaattggcattgcgattccacatggctgggcgacagagtcatcaccaccagcacccgaacatgggccttgcccacctataacaaccacctctacaagcaaatctccagtgcttcaacgggggccagcaacgacaacacctacttcggctacagcaccccctgggggtattttgatttcaacagattccactgccatttctcaccacgtgactggcagcgactcatcaacaacaattggggattccggcccaagagactcaacttcaaactcttcaacatccaagtcaaggaggtcacgacgaatgatggcgtcacgaccatcgctaataaccttaccagcacggttcaagtcttctcggactcggagtaccagttgccgtacgtcctcggctctgcgcaccagggctgcctccctccgttcccggcggacgtgttcatgattccgcagtacggctacctaacgctcaacaatggcagccaggcagtgggacggtcatccttttactgcctggaatatttcccatcgcagatgctgagaacgggcaataactttaccttcagctacaccttcgaggacgtgcctttccacagcagctacgcgcacagccagagcctggaccggctgatgaatcctctcatcgaccagtacctgtattacctgaacagaactcagaatcagtccggaagtgcccaaaacaaggacttgctgtttagccgggggtctccagctggcatgtctgttcagcccaaaaactggctacctggaccctgttatcggcagcagcgcgtttctaaaacaaaaacagacaacaacaacagcaattttacctggactggtgcttcaaaatataacctcaatgggcgtgaatccatcatcaaccctggcactgctatggcctcacacaaagacgacgaagacaagttctttcccatgagcggtgtcatgatttttggaaaagagagcgccggagcttcaaacactgcattggacaatgtcatgattacagacgaagaggaaattaaagccactaaccctgtggccaccgaaagatttgggaccgtggcagtcaatttccagagcagcagcacagaccctgcgaccggagatgtgcatgttatgggagccttacctggaatggtgtggcaagacagagacgtatacctgcagggtcctatttgggccaaaattcctcacacagatggacactttcacccgtctcctcttatgggcggctttggactcaagaacccgcctcctcagatcctcatcaaaaacacgcctgttcctgcgaatcctccggcagagttttcggctacaaagtttgcttcattcatcacccagtattccacaggacaagtgagcgtggagattgaatgggagctgcagaaagaaaacagcaaacgctggaatcccgaagtgcagtatacatctaactatgcaaaatctgccaacgttgatttcactgtggacaacaatggactttatactgagcctcgccccattggcacccgttacctcacccgtcccctgtaa

SEQ ID NO: 354 - protein, 736 aa, Artificial Sequence
  source: /note="Description of Artificial Sequence: Synthetic polypeptide"
MAADGYLPDWLEDNLSEGIREWWALKPGAPKPKANQQKQDDGRGLVLPGYKYLGPGNGLDKGEPVNEADAAALEHDKAYDQQLKAGDNPYLRYNHADAEFQERLQEDTSFGGNLGRAVFQAKKRVLEPLGLVEEGAKTAPGKKRPVEQSPQEPDSSTGIGKKGQQPARKRLNFGQTGDSESVPDPQPLGEPPAAPSGVGPTTMASGGGAPMADNNEGADGVGNASGNWHCDSTWLGDRVITTSTRTWALPTYNNHLYKQISSASTGASNDNTYFGYSTPWGYFDFNRFHCHFSPRDWQRLINNNWGFRPKRLNFKLFNIQVKEVTTNDGVTTIANNLTSTVQVFSDSEYQLPYVLGSAHQGCLPPFPADVFMIPQYGYLTLNNGSQAVGRSSFYCLEYFPSQMLRTGNNFTFSYTFEDVPFHSSYAHSQSLDRLMNPLIDQYLYYLNRTQNQSGSAQNKDLLFSRGSPAGMSVQPKNWLPGPCYRQQRVSKTKTDNNNSNFTWTGASKYNLNGRESIINPGTAMASHKDDEDKFFPMSGVMIFGKESAGASNTALDNVMITDEEEIKATNPVATERFGTVAVNFQSSSTDPATGDVHVMGALPGMVWQDRDVYLQGPIWAKIPHTDGHFHPSPLMGGFGLKNPPPQILIKNTPVPANPPAEFSATKFASFITQYSTGQVSVEIEWELQKENSKRWNPEVQYTSNYAKSANVDFTVDNNGLYTEPRPIGTRYLTRPL

SEQ ID NO: 355 - DNA, 2205 bp, Artificial Sequence
  source: /note="Description of Artificial Sequence: Synthetic polynucleotide"
atggctgctgacggttatcttccagattggctcgaggacaacctttctgaaggcattcgtgagtggtgggctctgaaacctggagtccctcaacccaaagcgaaccaacaacaccaggacaaccgtcggggtcttgtgcttccgggttacaaatacctcggacccggtaacggactcgacaaaggagagccggtcaacgaggcggacgcggcagccctcgaacacgacaaggcctacgaccagcagctcaaggccggagacaacccgtacctcaagtacaaccacgccgacgccgagttccaggagcggctcaaagaagatacgtcttttgggggcaacctcgggcgagcagtcttccaggccaaaaagaggcttcttgaacctcttggtctggttgaggaagcggctaagacggctcctggaaagaagaggcctgtagagcagtctcctcaggaaccggactcctccgcgggtattggcaaatcgggtgcacagcccgctaaaaagagactcaatttcggtcagactggcgacacagagtcagtcccagaccctcaaccaatcggagaacctcccgcagccccctcaggtgtgggatctcttacaatggcttcaggtggtggcgcaccagtggcagacaataacgaaggtgccgatggagtgggtagttcctcgggaaattggcattgcgattcccaatggctgggggacagagtcatcaccaccagcacccgaacctgggccctgcccacctacaacaaccacctctacaaacaaatttccagccaatcaggagcctcgaacgacaatcactactttggctacagcaccccttgggggtattttgacttcaacagattccactgccacttttcaccacgtgactggcagcgactcatcaacaacaactggggattccggcccaagagactcagcttcaagctcttcaacatccaggtcaaagaggttacggacaacaatggagtcaagaccatcgccaataaccttaccagcacggtccaggtcttcacggactcagactatcagctcccgtacgtgctcgggtcggctcacgagggctgcctcccgccgttcccagcggacgttttcatgattcctcagtacgggtatctgacgcttaatgatggaagccaggccgtgggtcgttcgtccttttactgcctggaatatttcccgtcgcaaatgctaagaacgggtaacaacttccagttcagctacgagtttgagaacgtacctttccatagcagctacgctcacagccaaagcctggaccgactaatgaatccactcatcgaccaatacttgtactatctctcaaagactattaacggttctggacagaatcaacaaacgctaaaattcagtgtggccggacccagcaacatggctgtccagggaagaaactacatacctggacccagctaccgacaacaacgtgtctcaaccactgtgactcaaaacaacaacagcgaatttgcttggcctggagcttcttcttgggctctcaatggacgtaatagcttgatgaatcctggacctgctatggccagccacaaagaaggagaggaccgtttctttcctttgtctggatctttaatttttggcaaacaaggaactggaagagacaacgtggatgcggacaaagtcatgataaccaacgaagaagaaattaaaactactaacccggtagcaacggagtcctatggacaagtggccacaaaccaccagagtgcccaagcacaggcgcagaccggctgggttcaaaaccaaggaatacttccgggtatggtttggcaggacagagatgtgtacctgcaaggacccatctgggccaagattcctcacacggacggcaacttccacccgtctccgctgatgggcggctttggcctgaaacatcctccgcctcagatcctgatcaagaacacgcctgtacctgcggatcctccgaccaccttcaaccagtcaaagctgaactctttcatcacgcaatacagcaccggacaggtcagcgtggaaattgaatgggagctgcagaaggaaaacagcaagcgctggaatcccgaagtgcagtatacatctaactatgcaaaatctgccaacgttgatttcactgtggacaacaatggactttatactgagcctcgccccattggcacccgttacctcacccgtcccctgtaa

SEQ ID NO: 356 - protein, 734 aa, Artificial Sequence
  source: /note="Description of Artificial Sequence: Synthetic polypeptide"
MAADGYLPDWLEDNLSEGIREWWALKPGVPQPKANQQHQDNRRGLVLPGYKYLGPGNGLDKGEPVNEADAAALEHDKAYDQQLKAGDNPYLKYNHADAEFQERLKEDTSFGGNLGRAVFQAKKRLLEPLGLVEEAAKTAPGKKRPVEQSPQEPDSSAGIGKSGAQPAKKRLNFGQTGDTESVPDPQPIGEPPAAPSGVGSLTMASGGGAPVADNNEGADGVGSSSGNWHCDSQWLGDRVITTSTRTWALPTYNNHLYKQISSQSGASNDNHYFGYSTPWGYFDFNRFHCHFSPRDWQRLINNNWGFRPKRLSFKLFNIQVKEVTDNNGVKTIANNLTSTVQVFTDSDYQLPYVLGSAHEGCLPPFPADVFMIPQYGYLTLNDGSQAVGRSSFYCLEYFPSQMLRTGNNFQFSYEFENVPFHSSYAHSQSLDRLMNPLIDQYLYYLSKTINGSGQNQQTLKFSVAGPSNMAVQGRNYIPGPSYRQQRVSTTVTQNNNSEFAWPGASSWALNGRNSLMNPGPAMASHKEGEDRFFPLSGSLIFGKQGTGRDNVDADKVMITNEEEIKTTNPVATESYGQVATNHQSAQAQAQTGWVQNQGILPGMVWQDRDVYLQGPIWAKIPHTDGNFHPSPLMGGFGLKHPPPQILIKNTPVPADPPTTFNQSKLNSFITQYSTGQVSVEIEWELQKENSKRWNPEVQYTSNYAKSANVDFTVDNNGLYTEPRPIGTRYLTRPL

SEQ ID NO: 357 - DNA, 2211 bp, Artificial Sequence
  source: /note="Description of Artificial Sequence: Synthetic polynucleotide"
atggctgccgatggttatcttccagattggctcgaggacaacctctctgagggcattcgcgagtggtgggcgctgaaacctggagccccgaagcccaaagccaaccagcaaaagcaggacgacggccggggtctggtgcttcctggctacaagtacctcggacccttcaacggactcgacaagggggagcccgtcaacgcggcggacgcagcggccctcgagcacgacaaggcctacgaccagcagctgcaggcgggtgacaatccgtacctgcggtataaccacgccgacgccgagtttcaggagcgtctgcaagaagatacgtcttttgggggcaacctcgggcgagcagtcttccaggccaagaagtgggttctcgaacctctcggtctggttgaggaaggcgctaagacggctcctggaaagaaacgtccggtagagcagtcgccacaagagccagactcctcctcgggcatcggcaagacaggccagcagcccgctaaaaagagactcaattttggtcagactggcgactcagagtcagtccccgacccacaacctctcggagaacctccagcaacccccgctgctgtgggacctactacaatggcttcaggcggtggcgcaccaatggcagacaataacgaaggcgccgacggagtgggtaatgcctcaggaaattggcattgcgattccacatggctgggcgacagagtcatcaccaccagcacccgcacctgggccttgcccacctacaataaccacctctacaagcaaatctccagtgcttcaacgggggccagcaacgacaaccactacttcggctacagcaccccctgggggtattttgatttcaacagattccactgccatttctcaccacgtgactggcagcgactcatcaacaacaattggggattccggcccaagagactcaacttcaagctcttcaacatccaagtcaaggaggtcacgacgaatgatggcgtcacaaccatcgctaataaccttaccagcacggttcaagtcttctcggactcggagtaccagcttccgtacgtcctcggctctgcgcaccagggctgcctccctccgttcccggcggacgtgttcatgattccgcaatacggctacctgacgctcaacaatggcagccaagccgtgggacgttcatccttttactgcctggaatatttcccttctcagatgctgagaacgggcaacaactttaccttcagctacacctttgaggaagtgcctttccacagcagctacgcgcacagccagagcctggaccggctgatgaatcctctcatcgaccaatacctgtattacctgaacagaactcaaaatcagtccggaagtgcccaaaacaaggacttgctgtttagccgtgggtctccagctggcatgtctgttcagcccaaaaactggctacctggaccctgttatcggcagcagcgcgtttctaaaacaaaaacagacaacaacaacagcaattttacctggactggtgcttcaaaatataacctcaatgggcgtgaatccatcatcaaccctggcactgctatggcctcacacaaagacgacgaagacaagttctttcccatgagcggtgtcatgatttttggaaaggagagcgccggagcttcaaacactgcattggacaatgtcatgatcaccgacgaagaggaaatcaaagccactaaccccgtggccaccgaaagatttgggactgtggcagtcaatctccagagcagcagcacagaccctgcgaccggagatgtgcatgttatgggagccttacctggcatggtgtggcaagatagagacgtgtacctgcagggtcccatttgggccaaaattcctcacacagatggacactttcacccgtctcctcttatgggcggctttggactcaagaacccgcctcctcagatcctcatcaaaaacacgcctgttcctgcgaatcctccggcggagttttcagctacaaagtttgcttcattcatcacccaatactccacaggacaagtgagtgtggaaattgaatgggagctgcagaaagaaaacagcaagcgctggaatcccgaagtgcagtacacatccaattatgcaaaatctgccaacgttgattttactgtggacaacaatggactttatactgagcctcgccccattggcacccgttacctcacccgtcccctgtaa

SEQ ID NO: 358 - protein, 736 aa, Artificial Sequence
  source: /note="Description of Artificial Sequence: Synthetic polypeptide"
MAADGYLPDWLEDNLSEGIREWWALKPGAPKPKANQQKQDDGRGLVLPGYKYLGPFNGLDKGEPVNAADAAALEHDKAYDQQLQAGDNPYLRYNHADAEFQERLQEDTSFGGNLGRAVFQAKKWVLEPLGLVEEGAKTAPGKKRPVEQSPQEPDSSSGIGKTGQQPAKKRLNFGQTGDSESVPDPQPLGEPPATPAAVGPTTMASGGGAPMADNNEGADGVGNASGNWHCDSTWLGDRVITTSTRTWALPTYNNHLYKQISSASTGASNDNHYFGYSTPWGYFDFNRFHCHFSPRDWQRLINNNWGFRPKRLNFKLFNIQVKEVTTNDGVTTIANNLTSTVQVFSDSEYQLPYVLGSAHQGCLPPFPADVFMIPQYGYLTLNNGSQAVGRSSFYCLEYFPSQMLRTGNNFTFSYTFEEVPFHSSYAHSQSLDRLMNPLIDQYLYYLNRTQNQSGSAQNKDLLFSRGSPAGMSVQPKNWLPGPCYRQQRVSKTKTDNNNSNFTWTGASKYNLNGRESIINPGTAMASHKDDEDKFFPMSGVMIFGKESAGASNTALDNVMITDEEEIKATNPVATERFGTVAVNLQSSSTDPATGDVHVMGALPGMVWQDRDVYLQGPIWAKIPHTDGHFHPSPLMGGFGLKNPPPQILIKNTPVPANPPAEFSATKFASFITQYSTGQVSVEIEWELQKENSKRWNPEVQYTSNYAKSANVDFTVDNNGLYTEPRPIGTRYLTRPL

SEQ ID NO: 359 - DNA, 2214 bp, Artificial Sequence
  source: /note="Description of Artificial Sequence: Synthetic polynucleotide"
atggctgccgatggttatcttccagattggctcgaggacaaccttagtgaaggaattcgcgagtggtgggctttgaaacctggagcccctcaacccaaggcaaatcaacaacatcaagacaacgctcgaggtcttgtgcttccgggttacaaataccttggacccggcaacggactcgacaagggggagccggtcaacgcagcagacgcggcggccctcgagcacgacaaggcctacgaccagcagctgcaggcgggtgacaatccgtacctgcggtataaccacgccgacgccgagtttcaggagcgtctgcaagaagatacgtcttttgggggcaaccttggcagagcagtcttccaggccaaaaagaggatccttgagcctcttggtctggttgaggaagcagctaaaacggctcctggaaagaagaggcctgtagatcagtctcctcaggaaccggactcatcatctggtgttggcaaatcgggcaaacagcctgccagaaaaagactaaatttcggtcagactggcgactcagagtcagtcccagaccctcaacctctcggagaaccaccagcagcccccacaagtttgggatctaatacaatggcttcaggcggtggcgcaccaatggcagacaataacgagggtgccgatggggtgggtagttcctcgggaaattggcattgcgattcccaatggctgggggacagagtcatcaccaccagcacccgaacctgggccctgcccacctacaacaatcacctctacaagcaaatctccaacgggacatcgggaggagccaccaacgacaacacctacttcggctacagcaccccctgggggtattttgactttaacagattccactgccacttttcaccacgtgactggcagcgactcatcaacaacaactggggattccggcccaagagactcagcttcaagctcttcaacatccaggtcaaggaggtcacgcagaatgaaggcaccaagaccatcgccaataacctcaccagcaccatccaggtgtttacggactcggagtaccagctgccgtacgttctcggctcggcgcaccagggctgcctccctccgttcccggcggacgtcttcatggtgccacagtatggatacctgacgctcaacaatggcagccaagccgtgggacgttcatccttttactgcctggaatatttcccttctcagatgctgagaacgggcaacaactttaccttcagctacacctttgaggaagtgcctttccacagcagctacgcgcacagccagagcttggaccggctgatgaatcctctgattgaccagtacctgtactacttgtctcggactcaaacaacaggaggcacggcaaatacgcagactctgggcttcagccaaggtgggcctaatacaatggccaatcaggcaaagaactggctgccaggaccctgttaccgccaacaacgcgtctcaacgacaaccgggcaaaacaacaatagcaactttgcctggactgctgggaccaaataccatctgaatggaagaaattcattggctaatcctggcatcgctatggcaacacacaaagacgacgaggagcgtttttttcccagtaacgggatcctgatttttggcaaacaaaatgctgccagagacaatgcggattacagcgatgtcatgctcaccagcgaggaagaaatcaaaaccactaaccctgtggctacagaggaatacggtatcgtggcagataacttgcagcagcaaaacacggctcctcaaattggaactgtcaacagccagggggacttacccggtatggtctggcagaaccgggacgtgtacctgcagggtcccatctgggccaagattcctcacacggacggcaacttccacccgtctccgctgatgggcggctttggcctgaaacatcctccgcctcagatcctgatcaagaacacgcctgtacctgcggatcctccgaccaccttcaaccagtcaaagctgaactctttcatcacgcaatacagcaccggacaggtcagcgtggagatcgagtgggagctgcagaaggaaaacagcaagcgctggaacccggagatccagtacacttccaactattacaagtctaataatgttgaatttgctgttaatactgaaggtgtatatagtgaaccccgccccattggcaccagatacctgactcgtaatctgtaa

SEQ ID NO: 360 - protein, 737 aa, Artificial Sequence
  source: /note="Description of Artificial Sequence: Synthetic polypeptide"
MAADGYLPDWLEDNLSEGIREWWALKPGAPQPKANQQHQDNARGLVLPGYKYLGPGNGLDKGEPVNAADAAALEHDKAYDQQLQAGDNPYLRYNHADAEFQERLQEDTSFGGNLGRAVFQAKKRILEPLGLVEEAAKTAPGKKRPVDQSPQEPDSSSGVGKSGKQPARKRLNFGQTGDSESVPDPQPLGEPPAAPTSLGSNTMASGGGAPMADNNEGADGVGSSSGNWHCDSQWLGDRVITTSTRTWALPTYNNHLYKQISNGTSGGATNDNTYFGYSTPWGYFDFNRFHCHFSPRDWQRLINNNWGFRPKRLSFKLFNIQVKEVTQNEGTKTIANNLTSTIQVFTDSEYQLPYVLGSAHQGCLPPFPADVFMVPQYGYLTLNNGSQAVGRSSFYCLEYFPSQMLRTGNNFTFSYTFEEVPFHSSYAHSQSLDRLMNPLIDQYLYYLSRTQTTGGTANTQTLGFSQGGPNTMANQAKNWLPGPCYRQQRVSTTTGQNNNSNFAWTAGTKYHLNGRNSLANPGIAMATHKDDEERFFPSNGILIFGKQNAARDNADYSDVMLTSEEEIKTTNPVATEEYGIVADNLQQQNTAPQIGTVNSQGDLPGMVWQNRDVYLQGPIWAKIPHTDGNFHPSPLMGGFGLKHPPPQILIKNTPVPADPPTTFNQSKLNSFITQYSTGQVSVEIEWELQKENSKRWNPEIQYTSNYYKSNNVEFAVNTEGVYSEPRPIGTRYLTRNL

SEQ ID NO: 361 - DNA, 2205 bp, Artificial Sequence
  source: /note="Description of Artificial Sequence: Synthetic polynucleotide"
atggctgctgacggttatcttccagattggctcgaggacaacctttctgaaggcattcgtgagtggtgggctctgaaacctggagtccctcaacccaaagcgaaccaacaacaccaggacaactgtcggggtcttgtgcttccgggttacaaatacctcggacccggtaacggactcgacaaaggagagccggtcaacgaggcggacgcggcagccctcgaacacgacaaggcctacgaccagcagctcaaggccggagacaacccgtacctcaagtacaaccacgccgacgccgagttccaggagcggctcaaagaagatacgtcttttgggggcaacctcgggcgagcagtcttccagaccaaaaagaggcttcttgaacctcttggtctggttgaggaagcggctaagacggctcctggaaagaagaggcctgtagagcagtctcctcaggaaccggactcctccgcgggtattggcaaatcgggtgcacagcccgctaaaaagagactcaatttcggtcagactggcgacacagagtcagtcccagaccctcaaccaatcggagaacctcccgcagccccctcaggtgtgggatctcttacaatggcttcaggtggtggcgcaccagtggcagacaataacgaaggtgccgatggagtgggtagttcctcgggaaattggcattgcgattcccaatggctgggggacagagtcatcaccaccagcacccgaacctgggccctgcccacctacaacaaccacctctacaaacaaatttccagccaatcaggagcctcgaacgacaatcactactttggctacagcaccccttgggggtattttgacttcaacagattccactgccacttttcaccacgtgactggcagcgactcatcaacaacaactggggattccggcccaagagactcagcttcaagctcttcaacatccaggtcaaagaggttacggacaacaatggagtcaagaccatcgccaataaccttaccagcacggtccaggtcttcacggactcagactatcagctcccgtacgtgctcgggtcggctcacgagggctgcctcccgccgttcccagcggacgttttcatgattcctcagtacgggtatctgacgcttaatgatggaagccaggccgtgggtcgttcgtccttttactgcctggaatatttcccgtcgcaaatgctaagaacgggtaacaacttccagttcagctacgagtttgagaacgtacctttccatagcagctacgctcacagccaaagcctggaccgactaatgaatccactcatcgaccaatacttgtactatctctcaaagactattaacggttctggacagaatcaacaaacgctaaaattcagtgtggccggacccagcaacatggctgtccagggaagaaactacatacctggacccagctaccgacaacaacgtgtctcaaccactgtgactcaaaacaacaacagcgaatttgcttggcctggagcttcttcttgggctctcaatggacgtaatagcttgatgaatcctggacctgctatggccagccacaaagaaggagaggaccgtttctttcctttgtctggatctttaatttttggcaaacaaggaactggaagagacaacgtggatgcggacaaagtcatgataaccaacgaagaagaaattaaaactactaacccggtagcaacggagtcctatggacaagtggccacaaaccaccagagtgcccaagcacaggcgcagaccggctgggttcaaaaccaaggaatacttccgggtatggtttggcaggacagagatgtgtacctgcaaggacccatctgggccaagattcctcacacggacggcaacttccacccgtctccgctgatgggcggctttggcctgaaacatcctccgcctcagatcctgatcaagaacacgcctgttcctgcgaatcctccggcggagttttcagctacaaagtttgcttcattcatcacccagtactccacaggacaagtgagtgtggaaattgaatgggagctgcagaaagaaaacagcaagcgctggaatcccgaagtgcagtacacatccaattatgcaaaatctgccaacgttgattttactgtggacaacaatggactttatactgagcctcgccccattggcacccgttaccttaccaaacctctgtaa

SEQ ID NO: 362 - protein, 734 aa, Artificial Sequence
  source: /note="Description of Artificial Sequence: Synthetic polypeptide"
MAADGYLPDWLEDNLSEGIREWWALKPGVPQPKANQQHQDNCRGLVLPGYKYLGPGNGLDKGEPVNEADAAALEHDKAYDQQLKAGDNPYLKYNHADAEFQERLKEDTSFGGNLGRAVFQTKKRLLEPLGLVEEAAKTAPGKKRPVEQSPQEPDSSAGIGKSGAQPAKKRLNFGQTGDTESVPDPQPIGEPPAAPSGVGSLTMASGGGAPVADNNEGADGVGSSSGNWHCDSQWLGDRVITTSTRTWALPTYNNHLYKQISSQSGASNDNHYFGYSTPWGYFDFNRFHCHFSPRDWQRLINNNWGFRPKRLSFKLFNIQVKEVTDNNGVKTIANNLTSTVQVFTDSDYQLPYVLGSAHEGCLPPFPADVFMIPQYGYLTLNDGSQAVGRSSFYCLEYFPSQMLRTGNNFQFSYEFENVPFHSSYAHSQSLDRLMNPLIDQYLYYLSKTINGSGQNQQTLKFSVAGPSNMAVQGRNYIPGPSYRQQRVSTTVTQNNNSEFAWPGASSWALNGRNSLMNPGPAMASHKEGEDRFFPLSGSLIFGKQGTGRDNVDADKVMITNEEEIKTTNPVATESYGQVATNHQSAQAQAQTGWVQNQGILPGMVWQDRDVYLQGPIWAKIPHTDGNFHPSPLMGGFGLKHPPPQILIKNTPVPANPPAEFSATKFASFITQYSTGQVSVEIEWELQKENSKRWNPEVQYTSNYAKSANVDFTVDNNGLYTEPRPIGTRYLTKPL

SEQ ID NO: 363 - DNA, 2211 bp, Artificial Sequence
  source: /note="Description of Artificial Sequence: Synthetic polynucleotide"
atggctgccgatggttatcttccagattggctcgaggacaacctctctgagggcattcgcgagtggtgggacttgaaacctggagcccctaaacccaaggcaaatcaacaacatcaggacaacgctcgaggtcttgtgcttccgggttacaaataccttggacccggcaacggactcgacaagggggagccggtcaacgcagcagacgcggcggccctcgagcacgacaaggcctacgaccagcagctcaaggccggagacaacccgtacctcaagtacaaccacgccgacgccgagttccaggagcggctcaaagaagatacgtcttttgggggcaacctcgggcgagcagtcttccaggccaaaaagaggcttcttgaacctcttggtctggttgaggaagcggctaagacggctcctggaaagaagagaccggtagagccatcaccccagcgttctccagactcctctacgggcatcggcaagaaaggccaacagcccgctaaaaagagactcaattttggtcagactggcgactcagagtcagtccccgacccacaacctctcggagaacctccagcaacccccgctgctgtgggacctactacaatggcttcaggcggtggcgcaccaatggcagacaataacgagggtgccgatggagtgggtaattcctcaggaaattggcattgcgattcccaatggctgggcgacagagtcatcaccaccagcaccagaacctgggccctgcccacttacaacaaccatctctacaagcaaatctccagccaatcaggagcttcaaacgacaaccactactttggctacagcaccccttgggggtattttgactttaacagattccactgccacttttcaccacgtgactggcaaagactcatcaacaacaactggggattccgacccaagagactcaacttcaagctcttcaacatccaagtcaaggaggtcacgacgaatgatggcgtcacgaccatcgctaataaccttaccagcacggttcaagtcttctcggactcggagtaccagttgccgtacgtcctcggctctgcgcaccagggctgcctccctccgttcccggcggacgtgttcatgattccgcagtacggctacctaacgctcaacaatggcagccaagccgtgggacgttcatccttttactgcctggaatatttcccttctcagatgctgagaacgggcaacaactttaccttcagctacacttttgaggacgttcctttccacagcagctacgctcacagccagagtctggaccgtctcatgaatcctctcatcgaccagtacctgtattacttgagcagaacaaacactccaagtggaaccaccacgcagtcaaggcttcagttttctcaggccggagcgagtgacattcgggaccagtctaggaactggcttcctggaccctgttaccgccagcagcgcgtttctaaaacaaaaacagacaacaacaacagcaattttacctggactggtgcttcaaaatataaccttaatgggcgtgaatctataatcaaccctggcactgctatggcctcacacaaagacgacgaagacaagttctttcccatgagcggtgtcatgatttttggaaaagagagcgccggagcttcaaacactgcattggacaatgtcatgatcacagacgaagaggaaatcaaagccactaaccccgtggccaccgaaagatttgggactgtggcagtcaatctccagagcagcagcacagaccctgcgaccggagatgtgcatgttatgggagcattacctggcatggtgtggcaagatagagacgtgtacctgcagggtcccatttgggccaaaattcctcacacagatggacactttcacccgtctcctcttatgggcggctttggactcaagaacccgcctcctcagatcctcatcaaaaacacgcctgttcctgcgaatcctccggcggagttttcagctacaaagtttgcttcattcatcacccaatactccacaggacaagtgagtgtggaaattgaatgggagctgcagaaagaaaacagcaagcgctggaatcccgaagtgcagtacacatccaattatgcaaaatctgccaacgttgattttactgtggacaacaatggactttatactgagcctcgccccattggcacccgttaccttacccgtcccctgtaa

SEQ ID NO: 364 - protein, 736 aa, Artificial Sequence
  source: /note="Description of Artificial Sequence: Synthetic polypeptide"
MAADGYLPDWLEDNLSEGIREWWDLKPGAPKPKANQQHQDNARGLVLPGYKYLGPGNGLDKGEPVNAADAAALEHDKAYDQQLKAGDNPYLKYNHADAEFQERLKEDTSFGGNLGRAVFQAKKRLLEPLGLVEEAAKTAPGKKRPVEPSPQRSPDSSTGIGKKGQQPAKKRLNFGQTGDSESVPDPQPLGEPPATPAAVGPTTMASGGGAPMADNNEGADGVGNSSGNWHCDSQWLGDRVITTSTRTWALPTYNNHLYKQISSQSGASNDNHYFGYSTPWGYFDFNRFHCHFSPRDWQRLINNNWGFRPKRLNFKLFNIQVKEVTTNDGVTTIANNLTSTVQVFSDSEYQLPYVLGSAHQGCLPPFPADVFMIPQYGYLTLNNGSQAVGRSSFYCLEYFPSQMLRTGNNFTFSYTFEDVPFHSSYAHSQSLDRLMNPLIDQYLYYLSRTNTPSGTTTQSRLQFSQAGASDIRDQSRNWLPGPCYRQQRVSKTKTDNNNSNFTWTGASKYNLNGRESIINPGTAMASHKDDEDKFFPMSGVMIFGKESAGASNTALDNVMITDEEEIKATNPVATERFGTVAVNLQSSSTDPATGDVHVMGALPGMVWQDRDVYLQGPIWAKIPHTDGHFHPSPLMGGFGLKNPPPQILIKNTPVPANPPAEFSATKFASFITQYSTGQVSVEIEWELQKENSKRWNPEVQYTSNYAKSANVDFTVDNNGLYTEPRPIGTRYLTRPL

SEQ ID NO: 365 - DNA, 2214 bp, Artificial Sequence; identical to SEQ ID NO: 337
  source: /note="Description of Artificial Sequence: Synthetic polynucleotide"

SEQ ID NO: 366 - protein, 737 aa, Artificial Sequence; identical to SEQ ID NO: 338
  source: /note="Description of Artificial Sequence: Synthetic polypeptide"

SEQ ID NO: 367 - DNA, 2205 bp, Artificial Sequence
  source: /note="Description of Artificial Sequence: Synthetic polynucleotide"
atggctgctgacggttatcttccagattggctcgaggacaacctttctgaaggcattcgtgagtggtgggctctgaaacctggagtccctcaacccaaagcgaaccaacaacaccaggacaaccgtcggggtcttgtgcttccgggttacaaatacctcggacccggtaacggactcgacaaaggagagccggtcaacgaggcggacgcggcagccctcgaacacgacaaggcctacgaccagcagctcaaggccggagacaacccgtacctcaagtacaaccacgccgacgccgagttccaggagcggctcaaagaagatacgtcttttgggggcaacctcgggcgagcagtcttccaggccaaaaagaggcttcttgaacctcttggtctggttgaggaagcggctaagacggctcctggaaagaagaggcctgtagagcagtctcctcaggaaccggactcctccgcgggtattggcaaatcgggtgcacagcccgctaaaaagagactcaatttcggtcagactggcgacacagagtcagtcccagaccctcaaccaatcggagaacctcccgcagccccctcaggtgtgggatctcttacaatggcttcaggtggtggcgcaccagtggcagacaataacgaaggtgccgatggagtgggtagttcctcgggaaattggcattgcgattcccaatggctgggggacagagtcatcaccaccagcacccgaacctgggccctgcccacctacaacaaccacctctacaaacaaatttccagccaatcaggagcctcgaacgacaatcactactttggctacagcaccccttgggggtattttgacttcaacagattccactgccacttttcaccacgtgactggcagcgactcatcaacaacaactggggattccggcccaagagactcagcttcaagctcttcaacatccaggtcaaagaggttacggacaacaatggagtcaagaccatcgccaataaccttaccagcacggtccaggtcttcacggactcagactatcagctcccgtacgtgctcgggtcggctcacgagggctgcctcccgccgttcccagcggacgttttcatgattcctcagtacgggtatctgacgcttaatgatggaagccaggccgtgggtcgttcgtccttttactgcctggaatatttcccgtcgcaaatgctaagaacgggtaacaacttccagttcagctacgagtttgagaacgtacctttccatagcagctacgctcacagccaaagcctggaccgactaatgaatccactcatcgaccaatacttgtactatctctcaaagactattaacggttctggacagaatcaacaaacgctaaaattcagtgtggccggacccagcaacatggctgtccagggaagaaactacatacctggacccagctaccgacaacaacgtgtctcaaccactgtgactcaaaacaacaacagcgaatttgcttggcctggagcttcttcttgggctctcaatggacgtaatagcttgatgaatcctggacctgctatggccagccacaaagaaggagaggaccgtttctttcctttgtctggatctttaatttttggcaaacaaggaactggaagagacaacgtggatgcggacaaagtcatgataaccaacgaagaagaaattaaaactactaacccggtagcaacggagtcctatggacaagtggccacaaaccaccagagtgcccaagcacaggcgcagaccggctgggttcaaaaccaaggaatacttccgggtatggtttggcaggacagagatgtgtacctgcaaggacccatttgggccaaaattcctcacacggacggcaactttcacccttctccgctgatgggagggtttggaatgaaacacccgcctcctcagatcctcatcaaaaacacacctgtacctgcggatcctccaacggccttcaacaaggacaagctgaactctttcatcacccagtattctactggccaagtcagcgtggagatcgagtgggagctgcagaaggaaaacagcaagcgctggaaccccgagatccagtacacctccaactactacaaatctacaagtgtggactttgctgttaatacagaaggcgtgtactctgaaccccgccccattggcacccgttacctcacccgtaatctgtaa

SEQ ID NO: 368 - protein, 734 aa, Artificial Sequence
  source: /note="Description of Artificial Sequence: Synthetic polypeptide"
MAADGYLPDWLEDNLSEGIREWWALKPGVPQPKANQQHQDNRRGLVLPGYKYLGPGNGLDKGEPVNEADAAALEHDKAYDQQLKAGDNPYLKYNHADAEFQERLKEDTSFGGNLGRAVFQAKKRLLEPLGLVEEAAKTAPGKKRPVEQSPQEPDSSAGIGKSGAQPAKKRLNFGQTGDTESVPDPQPIGEPPAAPSGVGSLTMASGGGAPVADNNEGADGVGSSSGNWHCDSQWLGDRVITTSTRTWALPTYNNHLYKQISSQSGASNDNHYFGYSTPWGYFDFNRFHCHFSPRDWQRLINNNWGFRPKRLSFKLFNIQVKEVTDNNGVKTIANNLTSTVQVFTDSDYQLPYVLGSAHEGCLPPFPADVFMIPQYGYLTLNDGSQAVGRSSFYCLEYFPSQMLRTGNNFQFSYEFENVPFHSSYAHSQSLDRLMNPLIDQYLYYLSKTINGSGQNQQTLKFSVAGPSNMAVQGRNYIPGPSYRQQRVSTTVTQNNNSEFAWPGASSWALNGRNSLMNPGPAMASHKEGEDRFFPLSGSLIFGKQGTGRDNVDADKVMITNEEEIKTTNPVATESYGQVATNHQSAQAQAQTGWVQNQGILPGMVWQDRDVYLQGPIWAKIPHTDGNFHPSPLMGGFGMKHPPPQILIKNTPVPADPPTAFNKDKLNSFITQYSTGQVSVEIEWELQKENSKRWNPEIQYTSNYYKSTSVDFAVNTEGVYSEPRPIGTRYLTRNL

SEQ ID NO: 369 - DNA, 2217 bp, Artificial Sequence
  source: /note="Description of Artificial Sequence: Synthetic polynucleotide"
atggctgccgatggttatcttccagattggctcgaggacaacctctctgagggcattcgcgagtggtgggcgctgaaacctggagccccgaagcccaaagccaaccagcaaaagcaggacgacggccggggtctggtgcttcctggctacaagtacctcggacccttcaacggactcgacaagggggagcccgtcaacgcggcggacgcagcggccctcgagcacgacaaggcctacgaccagcagctgcaggcgggtgacaatccgtacctgcggtataaccacgccgacgccgagtttcaggagcgtctgcaagaagatacgtcttttgggggcaacctcgggcgagcagtcttccaggccaagaagcgggttctcgaacctctcggtctggttgaggaaggcgctaagacggctcctggaaagaagagaccggtagagccatcaccccagcgttctccagactcctctacgggcatcggcaagaaaggccaacagcccgccagaaaaagactcaattttggtcagactggcgactcagagtcagttccagaccctcaacctctcggagaacctccagcagcgccctctggtgtgggacctaatacaatggctgcaggcggtggcgcaccaatggcagacaataacgaaggcgccgacggagtgggtagttcctcgggaaattggcattgcgattccacatggctgggcgacagagtcatcaccaccagcacccgaacctgggccctgcccacctacaacaaccacctctacaagcaaatctccaacgggacatcgggaggagccaccaacgacaacacctacttcggctacagcaccccctgggggtattttgactttaacagattccactgccacttttcaccacgtgactggcagcgactcatcaacaacaactggggattccggcccaagagactcagcttcaagctcttcaacatccaggtcaaggaggtcacgcagaatgaaggcaccaagaccatcgccaataacctcaccagcaccatccaggtgtttacggactcggagtaccagctgccgtacgttctcggctctgcccaccagggctgcctgcctccgttcccggcggacgtgttcatgattccccagtacggctacctaacactcaacaacggtagtcaggccgtgggacgctcctccttctactgcctggaatactttccttcgcagatgctgagaaccggcaacaacttccagtttacttacaccttcgaggacgtgcctttccacagcagctacgcccacagccagagcttggaccggctgatgaatcctctgattgaccagtacctgtactacttgtctcggactcaaacaacaggaggcacggcaaatacgcagactctgggcttcagccaaggtgggcctaatacaatggccaatcaggcaaagaactggctgccaggaccctgttaccgccaacaacgcgtctcaacgacaaccgggcaaaacaacaatagcaactttgcctggactgctgggaccaaataccatctgaatggaagaaattcattggctaatcctggcatcgctatggcaacacacaaagacgacgaggagcgtttttttcccagtaacgggatcctgatttttggcaaacaaaatgctgccagagacaatgcggattacagcgatgtcatgctcaccagcgaggaagaaatcaaaaccactaaccctgtggctacagaggaatacggtatcgtggcagataacttgcagcagcaaaacacggctcctcaaattggaactgtcaacagccagggggccttacccggtatggtctggcagaaccgggacgtgtacctgcagggtcccatctgggccaagattcctcacacggacggcaacttccacccctctcccctcatgggtggattcggacttaaacatcctccgcctcagatcctgatcaagaacacgcctgtacctgcggatcctccgaccaccttcaaccagtcaaagctgaactctttcatcacgcaatacagcaccggacaggtcagcgtggaaattgaatgggagctgcagaaggaaaacagcaagcgctggaaccccgagatccagtacacctccaactactacaaatctacaagtgtggactttgctgttaatacagaaggcgtgtactctgaaccccgccccattggcacccgttacctcacccgtaatctgtaa

SEQ ID NO: 370 - protein, 738 aa, Artificial Sequence; identical to SEQ ID NO: 116
  source: /note="Description of Artificial Sequence: Synthetic polypeptide"

SEQ ID NO: 371 - DNA, 2211 bp, Artificial Sequence
  source: /note="Description of Artificial Sequence: Synthetic polynucleotide"
atggctgctgacggttatcttccagattggctcgaggacaacctttctgaaggcattcgagagtggtgggcgctgcaacctggagcccctaaacccaaggcaaatcaacaacatcaggacaacgctcggggtcttgtgcttccgggttacaaatacctcggacccggcaacggactcgacaagggggaacccgtcaacgcagcggacgcggcagccctcgagcacgacaaggcctacgaccagcagctcaaggccggtgacaacccctacctcaagtacaaccacgccgacgccgagttccaggagcggctcaaagaagatacgtcttttgggggcaacctcgggcgagcagtcttccaggccaaaaagaggcttcttgaacctcttggtctggttgaggaagcggctaagacggctcctggaaagaagaggcctgtagatcagtctcctcaggaaccggactcatcatctggtgttggcaaatcgggcaaacagcctgccagaaaaagactaaatttcggtcagactggcgactcagagtcagtcccagaccctcaacctctcggagaaccaccagcagcccccacaagtttgggatctaatacaatggcttcaggcggtggcgcaccaatggcagacaataacgagggtgccgatggagtgggtaattcctcaggaaattggcattgcgattcccaatggctgggcgacagagtcatcaccaccagcaccagaacctgggccctgcccacttacaacaaccatctctacaagcaaatctccagccaatcaggagcttcaaacgacaaccactactttggctacagcaccccttgggggtattttgactttaacagattccactgccacttctcaccacgtgactggcagcgactcattaacaacaactggggattccggcccaagaaactcagcttcaagctcttcaacatccaagttaaagaggtcacgcagaacgatggcacgacgactattgccaataaccttaccagcacggttcaggtgtttacggactcggagtatcagctcccgtacgtgctcgggtcggcgcaccaaggctgtctcccgccgtttccagcggacgtcttcatggtccctcagtatggatacctcaccctgaacaacggaagtcaagcggtgggacgctcatccttttactgcctggagtacttcccttcgcagatgctaaggactggaaataacttccaattcagctataccttcgaggatgtaccttttcacagcagctacgctcacagccagagtttggatcgcttgatgaatcctcttattgatcagtatctgtactacctgaacagaacgcaaggaacaacctctggaacaaccaaccaatcacggctgctttttagccaggctgggcctcagtctatgtctttgcaggccagaaattggctacctgggccctgctaccggcaacagagactttcaaagactgctaacgacaacaacaacagtaactttccttggacagcggccagcaaatatcatctcaatggccgcgactcgctggtgaatccaggaccagctatggccagtcacaaggacgatgaagaaaaatttttccctatgcacggcaatctaatatttggcaaagaagggacaacggcaagtaacgcagaattagataatgtaatgattacggatgaagaagagattcgtaccaccaatcctgtggcaacagagcagtatggaactgtggcaaataacttgcagagctcaaatacagctcccacgactagaactgtcaatgatcagggggccttacctggcatggtgtggcaagatcgtgacgtgtaccttcaaggacctatctgggcaaagattcctcacacggatggacactttcatccttctcctctgatgggaggctttggactgaaacatccgcctcctcaaatcatgatcaaaaatactccggtaccggcaaatcctccgacgactttcagcccggccaagtttgcttcatttatcactcagtactccactggacaggtcagcgtggaaattgagtgggagctacagaaagaaaacagcaaacgttggaatccagagattcagtacacttccaactacaacaagtctgttaatgtggactttactgtagacactaatggtgtttatagtgaacctcgccccattggcacccgttaccttacccgtcccctgtaa

SEQ ID NO: 372 - protein, 736 aa, Artificial Sequence; identical to SEQ ID NO: 342
  source: /note="Description of Artificial Sequence: Synthetic polypeptide"

SEQ ID NO: 373 - DNA, 2211 bp, Artificial Sequence; identical to SEQ ID NO: 341
  source: /note="Description of Artificial Sequence: Synthetic polynucleotide"

SEQ ID NO: 374 - protein, 736 aa, Artificial Sequence; identical to SEQ ID NO: 342
  source: /note="Description of Artificial Sequence: Synthetic polypeptide"

SEQ ID NO: 375 - DNA, 2211 bp, Artificial Sequence
  source: /note="Description of Artificial Sequence: Synthetic polynucleotide"
atggctgctgacggttatcttccagattggctcgaggacaacctttctgaaggcattcgtgagtggtgggctctgaaacctggagtccctcaacccaaagcgaaccaacaacaccaggacaaccgtcggggtcttgtgcttccgggttacaaatacctcggacccggtaacggactcgacaaaggagagcccgtcaacgcggcggatgcagcggccctcgagcacgacaaggcctacgaccagcagctcaaagcgggtgacaatccgtacctgcggtataaccacgccgacgccgagtttcaggagcgtctgcaagaagatacgtcttttgggggcaacctcgggcgagcagtcttccaggccaagaagagggttctcgaaccttttggtctggttgaggaaggtgctaagacggctcctggaaagaaacgtccggtagagcagtcgccacaagagccagactcctcctcgggcatcggcaagacaggccagcagcccgctaaaaagagactcaattttggtcagactggcgactcagagtcagtccccgacccacaacctctcggagaacctccagcaacccccgctgctgtgggacctactacaatggcttcaggcggtggcgcaccaatggcagacaataacgaaggcgccgacggagtgggtaatgcctcaggaaattggcattgcgattccacatggctgggcgacagagtcatcaccaccagcacccgcacctgggccttgcccacctacaataaccacctctacaagcaaatctccagtgcttcaacgggggccagcaacgacaaccactacttcggctacagcaccccctgggggtattttgatttcaacagattccactgccatttctcaccacgtgactggcagcgactcatcaacaacaattggggattccggcccaagagactcaacttcaagctcttcaacatccaagtcaaggaggtcacgacgaatgatggcgtcacgaccatcgctaataaccttaccagcacggttcaagtcttctcggactcggagtaccagcttccgtacgtcctcggctctgcgcaccagggctgcctccctccgttcccggcggacgtgttcatgattccgcaatacggctacctgacgctcaacaatggcagccaagccgtgggacgttcatccttttactgcctggaatatttcccttctcagatgctgagaacgggcaacaactttaccttcagctacacctttgaggaagtgcctttccacagcagctacgcgcacagccagagcctggaccggctgatgaatcctctcatcgaccaatacctgtattacctgaacagaactcaaaatcagtccggaagtgcccaaaacaaggacttgctgtttagccgtgggtctccagctggcatgtctgttcagcccaaaaactggctacctggaccctgttatcggcagcagcgcgtttctaaaacaaaaacagacaacaacaacagcaattttacctggactggtgcttcaaaatataacctcaatgggcgtgaatccatcatcaaccctggcactgctatggcctcacacaaagacgacgaagacaagttctttcccatgagcggtgtcatgatttttggaaaagagagcgccggagcttcaaacactgcattggacaatgtcatgattacagacgaagaggaaattaaagccactaaccctgtggccaccgaaagatttgggaccgtggcagtcaatttccagagcagcagcacagaccctgcgaccggagatgtgcatgttatgggagccttacctggaatggtgtggcaagacagagacgtatacctgcagggtcctatttgggccaaaattcctcacacggatggacactttcacccgtctcctctcatgggcggctttggacttaagcacccgcctcctcagatcctcatcaaaaacacgcctgttcctgcgaatcctccggcagagttttcggctacaaagtttgcttcattcatcacccagtattccacaggacaagtgagcgtggagattgaatgggagctgcagaaagaaaacagcaaacgctggaatcccgaagtgcagtatacatctaactatgcaaaatctgccaacgttgatttcactgtggacaacaatggactttatactgagcctcgccccattggcacccgttacctcacccgtcccctgtaa

SEQ ID NO: 376 - protein, 736 aa, Artificial Sequence
  source: /note="Description of Artificial Sequence: Synthetic polypeptide"
MAADGYLPDWLEDNLSEGIREWWALKPGVPQPKANQQHQDNRRGLVLPGYKYLGPGNGLDKGEPVNAADAAALEHDKAYDQQLKAGDNPYLRYNHADAEFQERLQEDTSFGGNLGRAVFQAKKRVLEPFGLVEEGAKTAPGKKRPVEQSPQEPDSSSGIGKTGQQPAKKRLNFGQTGDSESVPDPQPLGEPPATPAAVGPTTMASGGGAPMADNNEGADGVGNASGNWHCDSTWLGDRVITTSTRTWALPTYNNHLYKQISSASTGASNDNHYFGYSTPWGYFDFNRFHCHFSPRDWQRLINNNWGFRPKRLNFKLFNIQVKEVTTNDGVTTIANNLTSTVQVFSDSEYQLPYVLGSAHQGCLPPFPADVFMIPQYGYLTLNNGSQAVGRSSFYCLEYFPSQMLRTGNNFTFSYTFEEVPFHSSYAHSQSLDRLMNPLIDQYLYYLNRTQNQSGSAQNKDLLFSRGSPAGMSVQPKNWLPGPCYRQQRVSKTKTDNNNSNFTWTGASKYNLNGRESIINPGTAMASHKDDEDKFFPMSGVMIFGKESAGASNTALDNVMITDEEEIKATNPVATERFGTVAVNFQSSSTDPATGDVHVMGALPGMVWQDRDVYLQGPIWAKIPHTDGHFHPSPLMGGFGLKHPPPQILIKNTPVPANPPAEFSATKFASFITQYSTGQVSVEIEWELQKENSKRWNPEVQYTSNYAKSANVDFTVDNNGLYTEPRPIGTRYLTRPL

SEQ ID NO: 377 - DNA, 2217 bp, Artificial Sequence
  source: /note="Description of Artificial Sequence: Synthetic polynucleotide"
atggctgccgatggttatcttccagattggctcgaggacaacctctctgagggcattcgcgagtggtgggacttgaaacctggagccccgaaacccaaagccaaccagcaaaagcaggacgacggccggggtctggtgcttcctggctacaagtacctcggacccttcaacggactcgacaagggggagcccgtcaacgcggcggatgcaacggccctcgagcacgacaaggcctacgaccagcagctgcaggcgggtgacaatccgtacctgcggtataaccacgccgacgccgagtttcaggagcgtctgcaagaagatacgtcttttgggggcaacctcgggcgagcagtcttccaggccaagaagcgggttctcgaacctctcggtctggttgaggaaggcgctaagacggctcctggaaagaagagaccggtagagccatcaccccagcgttctccagactcctctacgggcatcggcaagaaaggccaacagcccgccagaaaaagactcaattttggtcagactggcgactcagagtcagttccagaccctcaacctctcggagaaccaccagcagcccccacaagtttgggatctaatacaatggcttcaggcggtggcgcaccaatggcagacaataacgagggtgccgatggagtgggtaattcctcaggaaattggcattgcgattcccaatggctgggcgacagagtcatcaccaccagcacccgcacctgggccttgcccacctacaataaccacctctacaagcaaatctccagtgcttcaacgggggccagcaacgacaaccactacttcggctacagcaccccctgggggtattttgactttaaccgcttccactgccacttctcgccaagagactggcaaagactcatcaacaacaattggggattccggcccaagagactcaacttcaaactcttcaacatccaagtcaaggaggtcacgacgaatgatggcgtcacgaccatcgccaataacctcaccagcaccatccaggtgtttacggactcggagtaccagctgccgtacgttctcggctctgcccaccagggctgcctgcctccgttcccggcggacgtgttcatgattccccagtatggatacctcaccctgaacaacggaagtcaagcggtgggacgctcatccttttactgcctggagtacttcccttcgcagatgctaaggactggaaataacttccaattcagctataccttcgaggatgtaccttttcacagcagctacgctcacagccagagtttggatcgcttgatgaatcctcttattgatcagtatctgtactacctgaacagaacgcaaggaacaacctctggaacaaccaaccaatcacggctgctttttagccaggctgggcctcagtctatgtctttgcaggccagaaattggctacctgggccctgctaccggcaacagagactttcaaagactgctaacgacaacaacaacagtaactttccttggacagcagccagcaaatatcatctcaatggccgcgactcgctggtgaatccaggaccagctatggccagtcacaaggacgatgaagaaaaatttttccctatgcacggcaatctaatatttggcaaagaagggacaacggcaagtaacgcagaattagataatgtaatgattacggatgaagaagagattcgtaccaccaatcctgtggcaacagagcagtatggaactgtggcaaataacttgcagagctcaaatacagctcccacgactagaactgtcaatgatcagggggccttacctggcatggtgtggcaagatcgtgacgtgtaccttcaggggcccatctgggcaaagattccacacacggacggacattttcacccctctcccctcatgggtggattcggacttaaacaccctcctccgcagattctcatcaagaacaccccggtacctgcgaatccttcgaccaccttcagtgcggcaaagtttgcttccttcatcacacagtactccacgggacaggtcagcgtggagatcgagtgggagctgcagaaggaaaacagcaagcgctggaacccggagatccagtacacttccaactattacaagtctaataatgttgaatttgctgttaatactgaaggtgtatatagtgaaccccgccccattggcaccagatacctgactcgtaatctgtaa

SEQ ID NO: 378 - protein, 738 aa, Artificial Sequence
  source: /note="Description of Artificial Sequence: Synthetic polypeptide"
MAADGYLPDWLEDNLSEGIREWWDLKPGAPKPKANQQKQDDGRGLVLPGYKYLGPFNGLDKGEPVNAADATALEHDKAYDQQLQAGDNPYLRYNHADAEFQERLQEDTSFGGNLGRAVFQAKKRVLEPLGLVEEGAKTAPGKKRPVEPSPQRSPDSSTGIGKKGQQPARKRLNFGQTGDSESVPDPQPLGEPPAAPTSLGSNTMASGGGAPMADNNEGADGVGNSSGNWHCDSQWLGDRVITTSTRTWALPTYNNHLYKQISSASTGASNDNHYFGYSTPWGYFDFNRFHCHFSPRDWQRLINNNWGFRPKRLNFKLFNIQVKEVTTNDGVTTIANNLTSTIQVFTDSEYQLPYVLGSAHQGCLPPFPADVFMIPQYGYLTLNNGSQAVGRSSFYCLEYFPSQMLRTGNNFQFSYTFEDVPFHSSYAHSQSLDRLMNPLIDQYLYYLNRTQGTTSGTTNQSRLLFSQAGPQSMSLQARNWLPGPCYRQQRLSKTANDNNNSNFPWTAASKYHLNGRDSLVNPGPAMASHKDDEEKFFPMHGNLIFGKEGTTASNAELDNVMITDEEEIRTTNPVATEQYGTVANNLQSSNTAPTTRTVNDQGALPGMVWQDRDVYLQGPIWAKIPHTDGHFHPSPLMGGFGLKHPPPQILIKNTPVPANPSTTFSAAKFASFITQYSTGQVSVEIEWELQKENSKRWNPEIQYTSNYYKSNNVEFAVNTEGVYSEPRPIGTRYLTRNL

SEQ ID NO: 379 - DNA, 2208 bp, Artificial Sequence
  source: /note="Description of Artificial Sequence: Synthetic polynucleotide"
atggctgccgatggttatcttccagattggctcgaggacaaccttagtgaaggaattcgcgagtggtgggacttgaaacctggagccccgaagcccaaagccaaccagcaaaagcaggacgacggccggggtctggtgcttcctggctacaagtacctcggacccttcaacggactcgacaagggggagcccgtcaacgcggcggacgcagcggccctcgagcacgacaaggcctacgaccagcagctcaaagcgggtgacaatccgtacctgcggtataaccacgccgacgccgagtttcaggagcgtctgcaagaagatacgtcttttgggggcaacctcgggcgagcagtcttccaggccaagaagcgggttctcgaacctctcggtctggttgaggaaggtgctaagacggctcctggaaagaaacgtccggtagagcagtcgccacaagagccagactcctcctcgggcattggcaagacaggccagcagcccgctaaaaagagactcaattttggtcagactggcgactcagagtcagtccccgacccacaacctctcggagaacctccagcaacccccgctgctgtgggacctactacaatggcttcaggcggtggcgcaccaatggcagacaataacgaaggcgccgacggagtgggtaatgcctcaggaaattggcattgcgattccacatggctgggcgacagagtcatcaccaccagcacccgaacctgggccctgcccacctacaacaaccacctctacaaacaaatttccagccaatcaggagcctcgaacgacaatcactactttggctacagcaccccttgggggtattttgatttcaacagattccactgccacttttcaccacgtgactggcagcgactcatcaacaacaattggggattccggcccaagagactcagcttcaagctcttcaacatccaggtcaaggaggtcacgcagaatgaaggcaccaagaccatcgccaataaccttaccagcacggttcaagtgtttacggactcggagtatcagctcccgtacgtgctcggctcggcgcatcaaggatgcctcccgccgttcccagcagacgtcttcatggtgccacagtatggatacctcaccctgaacaacgggagtcaggcagtaggacgctcttcattttactgcctggagtactttccttctcagatgctgcgtaccggaaacaactttaccttcagctacacttttgaggacgttcctttccacagcagctacgctcacagccagagtctggaccgtctcatgaatcctctgattgaccagtacctgtattacttgagcagaacaaacactccaagtggaaccaccacgcagtcaaggcttcagttttctcaggccggagcgagtgacattcgggaccagtctaggaactggcttcctggaccctgttaccgccagcagcgagtatcaaagacatctgcggataacaacaacagtgaatactcgtggactggagctaccaagtaccacctcaatggcagagactctctggtgaatccgggcccggccatggcaagccacaaggactatgaagaaaagttttttcctcagagcggggttctcatctttgggaagcaaggctcagagaaaacaaatgtggacattgaaaaggtcatgattacagacgaagaggaaatcaggacaaccaatcccgtggctacggagcagtatggttctgtatctaccaacctccagagaggcaacagacaagcagctaccgcagatgtcaacacacaaggcgttcttccaggcatggtctggcaggacagagatgtgtaccttcaggggcccatctgggcaaagattccacacacggacggacattttcacccgtctccgctgatgggcggctttggcctgaaacatcctccgcctcagatcctgatcaagaacacgcctgtacctgcggatcctccgaccaccttcaaccagtcaaagctgaactctttcatcactcagtattctactggccaagtcagcgtggagatcgagtgggagctgcagaaggaaaacagcaagcgctggaaccccgagatccagtacacctccaactactacaaatctacaagtgtggactttgctgttaatacagaaggcgtgtactctgaaccccgccccattggcacccgttacctcacccgtaatctgtaa

SEQ ID NO: 380 - protein, 735 aa, Artificial Sequence
  source: /note="Description of Artificial Sequence: Synthetic polypeptide"
MAADGYLPDWLEDNLSEGIREWWDLKPGAPKPKANQQKQDDGRGLVLPGYKYLGPFNGLDKGEPVNAADAAALEHDKAYDQQLKAGDNPYLRYNHADAEFQERLQEDTSFGGNLGRAVFQAKKRVLEPLGLVEEGAKTAPGKKRPVEQSPQEPDSSSGIGKTGQQPAKKRLNFGQTGDSESVPDPQPLGEPPATPAAVGPTTMASGGGAPMADNNEGADGVGNASGNWHCDSTWLGDRVITTSTRTWALPTYNNHLYKQISSQSGASNDNHYFGYSTPWGYFDFNRFHCHFSPRDWQRLINNNWGFRPKRLSFKLFNIQVKEVTQNEGTKTIANNLTSTVQVFTDSEYQLPYVLGSAHQGCLPPFPADVFMVPQYGYLTLNNGSQAVGRSSFYCLEYFPSQMLRTGNNFTFSYTFEDVPFHSSYAHSQSLDRLMNPLIDQYLYYLSRTNTPSGTTTQSRLQFSQAGASDIRDQSRNWLPGPCYRQQRVSKTSADNNNSEYSWTGATKYHLNGRDSLVNPGPAMASHKDYEEKFFPQSGVLIFGKQGSEKTNVDIEKVMITDEEEIRTTNPVATEQYGSVSTNLQRGNRQAATADVNTQGVLPGMVWQDRDVYLQGPIWAKIPHTDGHFHPSPLMGGFGLKHPPPQILIKNTPVPADPPTTFNQSKLNSFITQYSTGQVSVEIEWELQKENSKRWNPEIQYTSNYYKSTSVDFAVNTEGVYSEPRPIGTRYLTRNL

SEQ ID NO: 381 - DNA, 2214 bp, Artificial Sequence
  source: /note="Description of Artificial Sequence: Synthetic polynucleotide"
atggctgccgatggttatcttccagattggctcgaggacaacctctctgagggcattcgcgagtggtgggacttgaaacctggagccccgaaacccaaagccaaccagcaaaagcaggacgacggccggggtctggtgcttcctggctacaagtacctcggacccttcaacggactcgacaagggggagcccgtcaacgcggcggatgcagcggccctcgagcacgacaaggcctacgaccagcagctcaaagcgggtgacaatccgtacctgcggtataaccacgccgacgccgagtttcaggagcgtctgcaagaagatacgtcttttgggggcaacctcgggcgagcagtcttccaggccaagaagagggttctcgaaccttttggtctggttgaggaaggtgctaagacggctcctggaaagaaacgtccggtagagcagtcgccacaagagccagactcctcctcgggcattggcaagacaggccagcagcctgcaagaaaaagattgaattttggtcagactggagacgcagactcagtacctgacccccagcctctcggacagccaccagcagccccctctggtctgggaactaatacgatggctacaggcagtggcgcaccaatggcagacaataacgagggcgccgacggagtgggtaattcctcgggaaattggcattgcgattcccaatggctgggggacagagtcatcaccaccagcacccgaacctgggccctgcccacctacaacaatcacctctacaagcaaatctccaacagcacatctggaggatcttcaaatgacaacgcctacttcggctacagcaccccctgggggtattttgatttcaacagattccactgccatttctcaccacgtgactggcagcgactcatcaacaacaattggggattccggcccaagagactcaacttcaagctcttcaacatccaggtcaaggaggtcacgcagaatgaaggcaccaagaccatcgccaataacctcaccagcaccatccaggtgtttacggactcggagtaccagctgccgtacgttctcggctctgcccaccagggctgcctgcctccgttcccggcggacgtgttcatgattccccagtacggctacctaacactcaacaacggtagtcaggccgtgggacgctcctccttctactgcctggaatactttccttcgcagatgctgagaaccggcaacaacttccagtttacttacaccttcgaggacgtgcctttccacagcagctacgcccacagccagagcttggaccggctgatgaatcctctgattgaccagtacctgtactacttgtctcggactcaaacaacaggaggcacgacaaatacgcagactctgggcttcagccaaggtgggcctaatacaatggccaatcaggcaaagaactggctgccaggaccctgttaccgccagcagcgagtatcaaagacatttgcggataacaacaacagtgaatactcgtggactggagctaccaagtaccacctcaatggcagagactctctggtgaatccgggcccggccatggcaagccacaaggacgatgaagaaaagttttttcctcagagcggggttctcatctttgggaagcaaggctcagagaaaacaaatgtggacattgaaaaggtcatgattacagacgaagaggaaatcaggacaaccaatcccgtggctacggagcagtatggttctgtatctaccaacctccagagaggcaacagacaagcagctaccgcagatgtcaacacacaaggcgttcttccaggcatggtctggcaggacagagatgtgtaccttcaggggcccatctgggcaaagattccacacacggacggacattttcacccctctcccctcatgggtggattcggacttaaacaccctccgcctcagatcctgatcaagaacacgcctgtacccgcggatcctccgaccaccttcaaccagtcaaagctgaactctttcatcacccagtattctactggccaagtcagcgtggagatcgagtgggagctgcagaaggaaaacagcaagcgctggaaccccgagatccagtacacctccaactactacaaatctacaagtgtggactttgctgttaatacagaaggcgtgtactctgaaccccgccccattggcacccgttacctcacccgtaatctgtaa

SEQ ID NO: 382 - protein, 737 aa, Artificial Sequence
  source: /note="Description of Artificial Sequence: Synthetic polypeptide"
MAADGYLPDWLEDNLSEGIREWWDLKPGAPKPKANQQKQDDGRGLVLPGYKYLGPFNGLDKGEPVNAADAAALEHDKAYDQQLKAGDNPYLRYNHADAEFQERLQEDTSFGGNLGRAVFQAKKRVLEPFGLVEEGAKTAPGKKRPVEQSPQEPDSSSGIGKTGQQPARKRLNFGQTGDADSVPDPQPLGQPPAAPSGLGTNTMATGSGAPMADNNEGADGVGNSSGNWHCDSQWLGDRVITTSTRTWALPTYNNHLYKQISNSTSGGSSNDNAYFGYSTPWGYFDFNRFHCHFSPRDWQRLINNNWGFRPKRLNFKLFNIQVKEVTQNEGTKTIANNLTSTIQVFTDSEYQLPYVLGSAHQGCLPPFPADVFMIPQYGYLTLNNGSQAVGRSSFYCLEYFPSQMLRTGNNFQFTYTFEDVPFHSSYAHSQSLDRLMNPLIDQYLYYLSRTQTTGGTTNTQTLGFSQGGPNTMANQAKNWLPGPCYRQQRVSKTFADNNNSEYSWTGATKYHLNGRDSLVNPGPAMASHKDDEEKFFPQSGVLIFGKQGSEKTNVDIEKVMITDEEEIRTTNPVATEQYGSVSTNLQRGNRQAATADVNTQGVLPGMVWQDRDVYLQGPIWAKIPHTDGHFHPSPLMGGFGLKHPPPQILIKNTPVPADPPTTFNQSKLNSFITQYSTGQVSVEIEWELQKENSKRWNPEIQYTSNYYKSTSVDFAVNTEGVYSEPRPIGTRYLTRNL

SEQ ID NO: 383 - DNA, 2217 bp, Artificial Sequence
  source: /note="Description of Artificial Sequence: Synthetic polynucleotide"
atggctgccgatggttatcttccagattggctcgaggacactctctctgaaggaataagacagtggtgggcgctgaaacctggagccccgaagcccaaagccaaccagcaaaagcaggacgacggccggggtctggtgcttcctggctacaagtacctcggacccttcaacggactcgacaagggggagcccgtcaacgcggcggatgcagcggccctcgagcacgacaaggcctacgaccagcagctcaaagcgggtgacaatccgtacctgcggtataaccacgccgacgccgagtttcaggagcgtctgcaagaagatacgtcttttgggggcaacctcgggcgagcagtcttccaggccaagaagcgggttctcgaacctctcggtctggttgaggaaggcgctaagacggctcctggaaagaagagaccggtagagccatcaccccagcgttctccagactcctctacgggcatcggcaagaaaggccaacagcccgccagaaaaagactcaattttggtcagactggcgactcagagtcagttccagaccctcaacctctcggagaaccaccagcagcccccacaagtttgggatctaatacaatggcttcaggcggtggcgcaccaatggcagacaataacgagggtgccgatggagtgggtaattcctcaggaaattggcattgcgattcccaatggctgggcgacagagtcatcaccaccagcacccgcacctgggccttgcccacctacaataaccacctctacaagcaaatctccagtgcttcaacgggggccagcaacgacaaccactacttcggctacagcaccccctgggggtattttgactttaaccgcttccactgccacttctcgccaagagactggcaaagactcatcaacaacaattggggattccggcccaagagactcaacttcaaactcttcaacatccaagtcaaggaggtcacgacgaatgatggcgtcacgaccatcgccaataacctcaccagcaccatccaggtgtttacggactcggagtaccagctgccgtacgttctcggctctgcccaccagggctgcctgcctccgttcccggcggacgtgttcatgattccccagtatggatacctcaccctgaacaacggaagtcaagcggtgggacgctcatccttttactgcctggagtacttcccttcgcagatgctaaggactggaaataacttccaattcagctataccttcgaggatgtaccttttcacagcagctacgctcacagccagagtttggatcgcttgatgaatcctcttattgatcagtatctgtactacctgaacagaacgcaaggaacaacctctggaacaaccaaccaatcacggctgctttttagccaggctgggcctcagtctatgtctttgcaggccagaaattggctacctgggccctgctaccggcaacagagactttcaaagactgctaacgacaacaacaacagtaactttccttggacagcagccagcaaatatcatctcaatggccgcgactcgctggtgaatccaggaccagctatggccagtcacaaggacgatgaagaaaaatttttccctatgcacggcaatctaatatttggcaaagaagggacaacggcaagtaacgcagaattagataatgtaatgattacggatgaagaagagattcgtaccaccaatcctgtggcaacagagcagtatggaactgtggcaaataacttgcagagctcaaatacagctcccacgactagaactgtcaatgatcagggggccttacctggcatggtgtggcaagatcgtgacgtgtaccttcaggggcccatctgggcaaagattccacacacggacggacattttcacccctctcccctcatgggtggattcggacttaaacaccctcctccgcagattctcatcaagaacaccccggtacctgcgaatccttcgaccaccttcagtgcggcaaagtttgcttccttcatcacacagtactccacgggacaggtcagcgtggagatcgagtgggagctgcagaaggaaaacagcaagcgctggaacccggagatccagtacacttccaactattacaagtctaataatgttgaatttgctgttaatactgaaggtgtatatagtgaaccccgccccattggcaccagatacctgactcgtaatctgtaa

SEQ ID NO: 384 - protein, 738 aa, Artificial Sequence
  source: /note="Description of Artificial Sequence: Synthetic polypeptide"
MAADGYLPDWLEDTLSEGIRQWWALKPGAPKPKANQQKQDDGRGLVLPGYKYLGPFNGLDKGEPVNAADAAALEHDKAYDQQLKAGDNPYLRYNHADAEFQERLQEDTSFGGNLGRAVFQAKKRVLEPLGLVEEGAKTAPGKKRPVEPSPQRSPDSSTGIGKKGQQPARKRLNFGQTGDSESVPDPQPLGEPPAAPTSLGSNTMASGGGAPMADNNEGADGVGNSSGNWHCDSQWLGDRVITTSTRTWALPTYNNHLYKQISSASTGASNDNHYFGYSTPWGYFDFNRFHCHFSPRDWQRLINNNWGFRPKRLNFKLFNIQVKEVTTNDGVTTIANNLTSTIQVFTDSEYQLPYVLGSAHQGCLPPFPADVFMIPQYGYLTLNNGSQAVGRSSFYCLEYFPSQMLRTGNNFQFSYTFEDVPFHSSYAHSQSLDRLMNPLIDQYLYYLNRTQGTTSGTTNQSRLLFSQAGPQSMSLQARNWLPGPCYRQQRLSKTANDNNNSNFPWTAASKYHLNGRDSLVNPGPAMASHKDDEEKFFPMHGNLIFGKEGTTASNAELDNVMITDEEEIRTTNPVATEQYGTVANNLQSSNTAPTTRTVNDQGALPGMVWQDRDVYLQGPIWAKIPHTDGHFHPSPLMGGFGLKHPPPQILIKNTPVPANPSTTFSAAKFASFITQYSTGQVSVEIEWELQKENSKRWNPEIQYTSNYYKSNNVEFAVNTEGVYSEPRPIGTRYLTRNL

SEQ ID NO: 385 - DNA, 2208 bp, Artificial Sequence; identical to SEQ ID NO: 21
  source: /note="Description of Artificial Sequence: Synthetic polynucleotide"

SEQ ID NO: 386 - protein, 735 aa, Artificial Sequence [sequence omitted]

SEQ ID NO: 387 - DNA, 2208 bp, Artificial Sequence
  source: /note="Description of Artificial Sequence: Synthetic polynucleotide"
atggctgccgatggttatcttccagattggctcgaggacaacctctctgagggcattcgcgagtggtgggcgctgaaacctggagccccgaagcccaaagccaaccagcaaaagcaggacgacggccggggtctggtgcttcctggctacaagtacctcggacccttcaacggactcgacaagggggagcccgtcaacgcggcggacgccgcggccctcgagcacgacaaggcctacgaccagcagctgcaggcgggtgacaatccgtacctgcggtataaccacgccgacgccgagtttcaggagcgtctgcaagaagatacgtcttttgggggcaacctcgggcgagcagtcttccaggccaaaaagaggcttcttgaacctcttggtctggttgaggaagcagctaaaacggctcctggaaagaagaggcctgtagagcagtctcctcaggaaccggactcctccgcgggtattggcaaatcgggtgcacagcccgccaaaaagagactcaatttcggtcagactggcgactcagagtcagtcccagaccctcaacctctcggagaaccaccagcagcccccacaagtttgggatctaatacaatggcttcaggcggtggcgcaccaatggcagacaataacgaaggcgccgacggagtgggtaatgcctcaggaaattggcattgcgattccacatggctgggcgacagagtcatcaccaccagcacccgcacctgggccttgcccacctacagcaaccatctctacaagcaaatctccagccaatcaggagcttcaaacgacaacgactactttggctacagcaccccttgggggtattttgatttcaacagattccactgccacttttcaccacgtgactggcaaagactcatcaacaacaactggggattccgacccaagagactcaacttcaagctctttaacattcaagtcaaagaggtcacgcagaatgacggtacgacgacgattgccaataaccttaccagcacggttcaggtgtttactgactcggagtaccagctcccgtacgtcctcggctcggcgcatcaaggatgcctcccgccgttcccagcagacgtcttcatggtgccacagtatggatacctcaccctgaacaacgggagtcaggcagtaggacgctcttcattttactgcctggagtactttccttctcagatgctgcgtaccggaaacaactttaccttcagctacacttttgaggacgttcctttccacagcagctacgctcacagccagagtctggaccgtctcatgaatcctctcatcgaccagtacctgtattacttgagcagaacaaacactccaagtggaaccaccacgcagtcaaggcttcagttttctcaggccggagcgagtgacattcgggaccagtctaggaactggcttcctggaccctgttaccgccagcagcgagtatcaaagacatctgaggataacaacaacagtgaatactcgtggactggagctaccaagtaccacctcaatggcagagactctctggtgaatccgggcccggccatggcaagccacaaggacgatgaagaaaagttttttcctcagagcggggttctcatctttgggaagcaaggctcagagaaaacaaatgtggacattgaaaaggtcatgattacagacgaagaggaaatcaggacaaccaatcccgtggctacggagcagtatggttctgtatctaccaacctccagagaggcaacagacaagcagctaccgcagatgtcaacacacaaggcgttcttccaggcatggtctggcaggacagagatgtgtaccttcaggggcccatctgggcaaagattccacacacggacggacattttcacccctctcccctcatgggtggattcggacttaaacaccctcctccacagattctcatcaagaacaccccggtacctgcgaatccttcgaccaccttcagtgcggcaaagtttgcttccttcatcacacagtactccacgggacaggtcagcgtggagatcgagtgggagctgcagaaggaaaacagcaaacgctggaatcccgaaattcagtacacttccaactacaacaagtctgttaatgtggactttactgtggacactaatggcgtgtattcagagcctcgccccattggcaccagatacctgactcgtaatctgtaa

SEQ ID NO: 388 - protein, 735 aa, Artificial Sequence
  source: /note="Description of Artificial Sequence: Synthetic polypeptide"
MAADGYLPDWLEDNLSEGIREWWALKPGAPKPKANQQKQDDGRGLVLPGYKYLGPFNGLDKGEPVNAADAAALEHDKAYDQQLQAGDNPYLRYNHADAEFQERLQEDTSFGGNLGRAVFQAKKRLLEPLGLVEEAAKTAPGKKRPVEQSPQEPDSSAGIGKSGAQPAKKRLNFGQTGDSESVPDPQPLGEPPAAPTSLGSNTMASGGGAPMADNNEGADGVGNASGNWHCDSTWLGDRVITTSTRTWALPTYSNHLYKQISSQSGASNDNDYFGYSTPWGYFDFNRFHCHFSPRDWQRLINNNWGFRPKRLNFKLFNIQVKEVTQNDGTTTIANNLTSTVQVFTDSEYQLPYVLGSAHQGCLPPFPADVFMVPQYGYLTLNNGSQAVGRSSFYCLEYFPSQMLRTGNNFTFSYTFEDVPFHSSYAHSQSLDRLMNPLIDQYLYYLSRTNTPSGTTTQSRLQFSQAGASDIRDQSRNWLPGPCYRQQRVSKTSEDNNNSEYSWTGATKYHLNGRDSLVNPGPAMASHKDDEEKFFPQSGVLIFGKQGSEKTNVDIEKVMITDEEEIRTTNPVATEQYGSVSTNLQRGNRQAATADVNTQGVLPGMVWQDRDVYLQGPIWAKIPHTDGHFHPSPLMGGFGLKHPPPQILIKNTPVPANPSTTFSAAKFASFITQYSTGQVSVEIEWELQKENSKRWNPEIQYTSNYNKSVNVDFTVDTNGVYSEPRPIGTRYLTRNL

SEQ ID NO: 389 - DNA, 2208 bp, Artificial Sequence
  source: /note="Description of Artificial Sequence: Synthetic polynucleotide"
atggctgccgatggttatcttccagattggctcgaggacaacctctctgagggcattcgcgagtggtgggcgctgaaacctggagccccgaagcccaaagccaaccagcaaaagcaggacgacggccggggtctggtgcttcctggctacaagtacctcggacccttcaacggactcgacaagggggagcccgtcaacgcggcggacgcagcggccctcgagcacgacaaggcctacgaccagcagctgcaggcgggtgacaatccgtacctgcggtataaccacgccgacgccgagttccaggagcgtctgcaagaagatacgtcttttgggggcaacctcgggcgagcagtcttccaggccaagaagagggttctcgaaccttttggtctggttgaggaaggtgctaagacggctcctggaaagaaacgtccggtagagcagtcgccacaagagccagactcctcctcgggcattggcaagacaggccagcagcccgctaaaaagagactcaattttggtcagactggcgactcagagtcagtcccagaccctcaacctctcggagaaccaccagcagcccccacaagtttgggatctaatacaatggcttcaggcggtggcgcaccaatggcagacaataacgagggcgccgacggagtgggtaattcctcgggaaattggcattgcgattccacatggatgggcgacagagtcatcaccaccagcacccgaacctgggccctgcccacctacaacaaccacctctacaaacaaatttccagccaatcaggagcttcaaacgacaaccactactttggctacagcaccccttgggggtattttgactttaacagattccactgccacttttcaccacgtgactggcagcgactcattaacaacaactggggattccggcccaagaaactcaacttcaagctctttaacatccaggtcaaggaggtcacgcagaatgaaggcaccaagaccatcgccaataacctcaccagcaccatccaggtgtttacggactcggagtaccagctgccgtacgttctcggctctgcccaccagggctgcctgcctccgttcccggcggacgtgttcatgattccccagtacggctacctaacactcaacaacggtagtcaggccgtgggacgctcctccttctactgcctggaatactttccttcgcagatgctgagaaccggcaacaacttccagtttacttacaccttcgaggacgtgcctttccacagcagctacgcccacagccagagcttggaccggctgatgaatcctctgattgaccagtacctgtattacttgtctcggactcaaacaacaggaggcacgacaaatacgcagactctgggcttcagccaaggtgggcctaatacaatggccaatcaggcaaagaactggctgcctggaccctgttaccgccagcagcgagtatcaaagacatctgcggataacaacaacagtgaatactcgtggactggagctaccaagtaccacctcaatggcagagactctctggtgaatccgggcccggccatggcaagccacaaggacgatgaagaaaagttttttcctcagagcggggttctcatctttgggaagcaaggctcagagaaaacaaatgtggacattgaaaaggttatgattacagacgaagaggaaatcaggacaaccaatcccgtggctacggagcagtatggttctgtatctaccaacctccagagaggcaacagacaagcagctaccgcagatgtcaacacacagggcgttcttccaggcatggtctggcaggacagagatgtgtaccttcagggtcccatttgggccaaaattcctcacacagatggacactttcacccgtcccctcttatgggcggctttggactcaagaacccgcctcctcagatcctcatcaaaaacacgcctgttcctgcgaatcctccggcagagttttcagctacaaagtttgcttcattcatcacccaatactccacaggacaagtgagtgtggaaattgaatgggagctgcagaaagaaaacagcaagcgctggaatcccgaagtgcagtacacatccaattatgcaaaatctgccaacgttgattttactgtggacactaatggcgtgtattcagagcctcgccccattggcaccagatacctcacccgtaatctgtaa

SEQ ID NO: 390 - protein, 735 aa, Artificial Sequence
  source: /note="Description of Artificial Sequence: Synthetic polypeptide"
MAADGYLPDWLEDNLSEGIREWWALKPGAPKPKANQQKQDDGRGLVLPGYKYLGPFNGLDKGEPVNAADAAALEHDKAYDQQLQAGDNPYLRYNHADAEFQERLQEDTSFGGNLGRAVFQAKKRVLEPFGLVEEGAKTAPGKKRPVEQSPQEPDSSSGIGKTGQQPAKKRLNFGQTGDSESVPDPQPLGEPPAAPTSLGSNTMASGGGAPMADNNEGADGVGNSSGNWHCDSTWMGDRVITTSTRTWALPTYNNHLYKQISSQSGASNDNHYFGYSTPWGYFDFNRFHCHFSPRDWQRLINNNWGFRPKKLNFKLFNIQVKEVTQNEGTKTIANNLTSTIQVFTDSEYQLPYVLGSAHQGCLPPFPADVFMIPQYGYLTLNNGSQAVGRSSFYCLEYFPSQMLRTGNNFQFTYTFEDVPFHSSYAHSQSLDRLMNPLIDQYLYYLSRTQTTGGTTNTQTLGFSQGGPNTMANQAKNWLPGPCYRQQRVSKTSADNNNSEYSWTGATKYHLNGRDSLVNPGPAMASHKDDEEKFFPQSGVLIFGKQGSEKTNVDIEKVMITDEEEIRTTNPVATEQYGSVSTNLQRGNRQAATADVNTQGVLPGMVWQDRDVYLQGPIWAKIPHTDGHFHPSPLMGGFGLKNPPPQILIKNTPVPANPPAEFSATKFASFITQYSTGQVSVEIEWELQKENSKRWNPEVQYTSNYAKSANVDFTVDTNGVYSEPRPIGTRYLTRNL

SEQ ID NO: 391 - DNA, 2214 bp, Artificial Sequence; identical to SEQ ID NO: 381
  source: /note="Description of Artificial Sequence: Synthetic polynucleotide"

SEQ ID NO: 392 - protein, 737 aa, Artificial Sequence; identical to SEQ ID NO: 382
  source: /note="Description of Artificial Sequence: Synthetic polypeptide"

SEQ ID NO: 393 - DNA, 2196 bp, Artificial Sequence
  source: /note="Description of Artificial Sequence: Synthetic polynucleotide"
atggctgctgacggttatcttccagattggctcgaggacaacctctctgagggcattcgcgagtggtgggcgctgaaacctggagccccgcaacccaaagccaaccagcaaaagcaggacgacggccggggtctggtgcttcctggctacaagtacctcggacccttcaacggactcgacaagggggagcccgtcaacgaggcggacgccgcggccctcgagcacgacaaggcctacgaccagcagctcaaagcgggtgacaatccgtacctgcggtataatcacgccgacgccgagtttcaagagcgtctgcaagaagatacgtcctttgggggcaacctcgggcgagcagtcttccaggccaaaaagagggtactcgagcctctgggtctggttgaggaaggcgctaagacggctcctggaaagaagcggccagtagaaccggactccagctcgggcatcggcaagtcaggccagcagcccgcgaaaaagagactgaattttgggcagactggcgactcagagtcagtgcctgacccccaacctctctcagaaccacccgcaggtccctctggtctgggatctggtacaatggctgctggcggtggcgctccaatggcagacaataacgaaggcgccgacggagtgggtaatgtctcaggaaattggcattgcgattccacatggctgggcgaccgagtcatcaccaccagcactcggacctgggccctccccacctacaacaaccacctctacaagcaaatctccaacgggacctcgggaggcagcagcaacgacaacacctactttggctacagcaccccctgggggtattttgactttaacagattccactgccacttttcaccacgtgactggcagcgactcatcaacaacaactgggggttccggcccaagaagctcaacttcaagctcttcaacatccaggtcaaggaggtcacccagaatgaaggcaccaagaccatcgccaataacctcaccagcacggtgcaggtctttacggactcggagtaccagctcccgtacgtgctcggctctgcccaccagggctgcctgcctccgttcccggcggacgtgttcatgattccgcagtacgggtacctgacgctgaacaacgggagccaggccgtggggcgatcctccttctactgcctggagtactttccctcgcagatgctgagaacgggcaacaactttaccttcagctacaccttcgaggacgtgcccttccacagcagctacgcgcacagccagagcctggaccggctgatgaacccgctgattgaccagtacctgtactacctgtctcggactcagaccaacgggaccaatgccacgcagactctgttgtttgctcaggccgggcctcagaacatgtcggctcaggccaagaactggctgcctggtccttgctatcggcagcagcgcgtctctacgacagtgtcgcaaaacaacaacagcaactttacctggaccggggcgaccaagtaccacctgaacggccgagactccctggtgagccccggtgtcgccatggcaacgcacaaggacgacgaggagcgcttcttcccgagcagcggggtcctgatgtttggcaagcagggcgctggaaaggacaatgtcgagtacaccaacgtgatgctcaccagcgaggaggagatcaagaccaccaaccctgtggccacggagcagtacggcgtggtggctgacaatctgcagcagaccaactcagctcccattgtgggggcagtcaacagccagggggccttacccggtatggtctggcagaaccgggacgtgtacctgcagggtcccatctgggccaagatcccgcatacggacggcaactttcacccgtctcctctcatgggcggctttggactgaaacacccgcctccccagatcctgatcaaaaacacgccggtacctgcggatcccccggtgaactttacggacgctaagctggcgagtttcatcacgcagtacagcaccgggcaggtcagcgtggagattgagtgggagctgcagaaggagaacagcaagcgctggaatcccgagattcagtacacttccaattattataaatcagctaatgtggactttgccgtcaatgcagatggtgtatatagtgaaccccgccccattggcactcgttacctcacccgtaatctgtaa

SEQ ID NO: 394 - protein, 731 aa, Artificial Sequence
  source: /note="Description of Artificial Sequence: Synthetic polypeptide"
MAADGYLPDWLEDNLSEGIREWWALKPGAPQPKANQQKQDDGRGLVLPGYKYLGPFNGLDKGEPVNEADAAALEHDKAYDQQLKAGDNPYLRYNHADAEFQERLQEDTSFGGNLGRAVFQAKKRVLEPLGLVEEGAKTAPGKKRPVEPDSSSGIGKSGQQPAKKRLNFGQTGDSESVPDPQPLSEPPAGPSGLGSGTMAAGGGAPMADNNEGADGVGNVSGNWHCDSTWLGDRVITTSTRTWALPTYNNHLYKQISNGTSGGSSNDNTYFGYSTPWGYFDFNRFHCHFSPRDWQRLINNNWGFRPKKLNFKLFNIQVKEVTQNEGTKTIANNLTSTVQVFTDSEYQLPYVLGSAHQGCLPPFPADVFMIPQYGYLTLNNGSQAVGRSSFYCLEYFPSQMLRTGNNFTFSYTFEDVPFHSSYAHSQSLDRLMNPLIDQYLYYLSRTQTNGTNATQTLLFAQAGPQNMSAQAKNWLPGPCYRQQRVSTTVSQNNNSNFTWTGATKYHLNGRDSLVSPGVAMATHKDDEERFFPSSGVLMFGKQGAGKDNVEYTNVMLTSEEEIKTTNPVATEQYGVVADNLQQTNSAPIVGAVNSQGALPGMVWQNRDVYLQGPIWAKIPHTDGNFHPSPLMGGFGLKHPPPQILIKNTPVPADPPVNFTDAKLASFITQYSTGQVSVEIEWELQKENSKRWNPEIQYTSNYYKSANVDFAVNADGVYSEPRPIGTRYLTRNL

SEQ ID NO: 395 - DNA, 2196 bp, Artificial Sequence
  source: /note="Description of Artificial Sequence: Synthetic polynucleotide"
atggctgctgacggttatcttccagattggctcgaggacaacctctctgagggcattcgcgagtggtgggcgctgaaacctggagccccgcaacccaaagccaaccagcaaaagcaggacgacggccggggtctggtgcttcctggctacaagtacctcggacccttcaacggactcgacaagggggagcccgtcaacgaggcggacgccgcggccctcgagcacgacaaggcctacgaccagcagctcaaagcgggtgacaatccgtacctgcggtataatcacgccgacgccgagtttcaagagcgtctgcaagaagatacgtcctttgggggcaacctcgggcgagcagtcttccaggccaaaaagagggtactcgagcctctgggtctggttgaggaaggcgctaagacggctcctggaaagaagcggccagtagaaccggactccagctcgggcatcggcaagtcaggccggcagcccgcgaaaaagagactgaattttgggcagactggcgactcagagtcagtgcctgacccccaacctctctcagaaccacccgcaggtccctctggtctgggatctggtacaatggctgcaggcggtggcgctccaatggcagacaataacgaaggcgccgacggagtgggtaatgcctcaggaaattggcattgcgattccacatggctgggcgaccgagtcatcaccaccagcactcggacctgggccctccccacctacaacaaccacctctacaagcaaatctccaacgggacctcgggaggcagcagcaacgacaacacctactttggctacagcaccccctgggggtattttgactttaacagattccactgccacttttcaccacgtgactggcagcgactcatcaacaacaactggggattccggcccaagaggctcaacttcaagctcttcaacatccaggtcaaggaggtcacccagaatgaaggcaccaagaccatcgccaataacctcaccagcacggtgcaggtctttacggactcgaagtaccagctcccgtacgtgctcggctctgcccaccagggctgcctgcctccgttcccggcggacgtgttcatgattccgcagtacgggtacctgacgctgaacaacgggagccaggccgtggggcgatcctccttctactgcctggagtactttccctcgcagatgctgagaacgggcaacaactttaccttcagctacaccttcgaggacgtgcccttccacagcagctacgcgcacagccagagcctggaccggctgatgaacccgctgattgaccagtacctgtactacctgtctcggactcagaccaacgggaccaatgccacgcagactctgttgtttgctcaggccgggcctcagaacatgtcggctcaggccaagaactggctgcctggtccttgctatcggcagcagcgcgtctctacgacagtgtcgcaaaacaacaacagcaactttacctggaccggggcgaccaagtaccacctgaacggccgagactccctggtgaaccccggtgtcgccatggcaacgcacaaggacgacgaggagcgcttcttcccgagcagcggggtcctgatgtttggcaagcagggcgctggaaaggacaatgtcgagtacaccaacgtgatgctcaccagcgaggaggagatcaagaccaccaaccctgtggccacggagcagtacggtgtggtggctgacaatctgcagcagaccaactcggctcccattgtgggggcagtcaacagccagggggccttacccggtatggtctggcagaaccgggacgtgtacctgcagggtcccatctgggccaagatcccgcatacggacggcaactttcacccgtctcctctcatgggcggctttggactgaaacacccgcctccccagatcctgatcaaaaacacgccggtacctgcggatcccccggtgaactttacggacgctaagctggcgagtttcatcacgcagtacagcaccgggcaggtcagcgtggagattgagtgggagctgcagaaggagaacagcaagcgctggaatcccgagattcagtacacttccaattattataaatcagctaatgtggactttgccgtcaatgcagatggtgtatatagtgaaccccgccccattggcactcgttacctcacccgtaatctgtaa

SEQ ID NO: 396 - protein, 731 aa, Artificial Sequence
  source: /note="Description of Artificial Sequence: Synthetic polypeptide"
MAADGYLPDWLEDNLSEGIREWWALKPGAPQPKANQQKQDDGRGLVLPGYKYLGPFNGLDKGEPVNEADAAALEHDKAYDQQLKAGDNPYLRYNHADAEFQERLQEDTSFGGNLGRAVFQAKKRVLEPLGLVEEGAKTAPGKKRPVEPDSSSGIGKSGRQPAKKRLNFGQTGDSESVPDPQPLSEPPAGPSGLGSGTMAAGGGAPMADNNEGADGVGNASGNWHCDSTWLGDRVITTSTRTWALPTYNNHLYKQISNGTSGGSSNDNTYFGYSTPWGYFDFNRFHCHFSPRDWQRLINNNWGFRPKRLNFKLFNIQVKEVTQNEGTKTIANNLTSTVQVFTDSKYQLPYVLGSAHQGCLPPFPADVFMIPQYGYLTLNNGSQAVGRSSFYCLEYFPSQMLRTGNNFTFSYTFEDVPFHSSYAHSQSLDRLMNPLIDQYLYYLSRTQTNGTNATQTLLFAQAGPQNMSAQAKNWLPGPCYRQQRVSTTVSQNNNSNFTWTGATKYHLNGRDSLVNPGVAMATHKDDEERFFPSSGVLMFGKQGAGKDNVEYTNVMLTSEEEIKTTNPVATEQYGVVADNLQQTNSAPIVGAVNSQGALPGMVWQNRDVYLQGPIWAKIPHTDGNFHPSPLMGGFGLKHPPPQILIKNTPVPADPPVNFTDAKLASFITQYSTGQVSVEIEWELQKENSKRWNPEIQYTSNYYKSANVDFAVNADGVYSEPRPIGTRYLTRNL

SEQ ID NO: 397 - DNA, 2196 bp, Artificial Sequence
  source: /note="Description of Artificial Sequence: Synthetic polynucleotide"
atggctgctgacggttatcttccagattggctcgaggacaacctctctgagggcattcgcgagtggtgggcgctgaaacctggagccccgcaacccaaagccaaccagcaaaagcaggacgacggccggggtctggtgcttcctggctacaagtacctcggacccttcaacggactcgacaagggggagcccgtcaacgaggcggacgccgcggccctcgagcacgacaaggcctacgaccagcagctcaaagcgggtgacaatccgtacctgcggtataatcacgccgacgccgagtttcaagagcgtctgcaagaagatacgtcctttgggggcaacctcgggcgagcagtcttccaggccaaaaagagggtactcgagcctctgggtctggttgaggaaggcgctaagacggctcctggaaagaagcggccagtagaaccggactccagctcgggcatcggcaagtcaggccagcagcccgcgaaaaagagactgaattttgggccgactggcgactcagagtcagtgcctgacccccaacctctctcagaaccacctgcaggtccctctggtctgggatctggtacaatggctgcaggcggtggcgctccaatggcagacaataacgaaggcgccgacggagtgggtaatgtctcaggaaattggcattgcgattccacatggctgggcgaccgagtcatcaccaccagcactcggacctgggccctccccacctacaacaaccacctctacaagcaaatctccaacgggacctcgggaggcagcagcaacgacaacacctactttggctacagcaccccctgggggtattttgactttaacagattccactgccacttttcaccacgcgactggcagcgactcatcaacaacaactggggattccggcccaagaagctcaacttcaagctcttcaacatccaggtcaaggaggtcacccagaatgaaggcaccaagaccaccgccaataacctcaccagcacggtgcaggtctttacggactcggagtaccagctcccgtacgtgctcggctctgcccaccagggctgcctgcctccgttcccggcggacgtgttcatgattccgcagtacgggtacctgacgctgaacaacgggagccaggccgtggggcgatcctccttctactgcctggagtactttccctcgcagatgctgagaacgggcaacaactttaccttcagctacaccttcgaggacgtgcccttccacagcagctacgcgcacagccagagcctggaccggctgatgaacccgctgattgaccagtacctgtactacctgtctcggactcagaccaacgggaccaatgccacgcagactctgttgtttgctcaggccgggcctcagaacatgtcggctcaggccaagaactggctgcctggtccttgctatcggcagcagcgcgtctctacggcagtgtcgcaaaacaacaacagcaactttacctggaccggggcgaccaagtaccacctgaacggccgagactccctggtgaaccccggtgtcgccatggcaacgcacaaggacgacgaggagcgcttcttcccgagcagcggggtcctgatgtttggcaagcagggcgctggaaaggacaatgtcgagtacaccaacgtgatgctcaccagcgaggaggagatcaagaccaccaaccctgtggccacggagcagtacggtgtggtggctgacaatctgcagcagaccaactcggctcccattgtgggggcagtcaacagccagggggccttacccggtatggtctggcagaaccgggacgtgtacctgcagggtcccatctgggccaagatcccgcatacggacggcaactttcacccgtctcctctcatgggcggctttggactgaaacacccgcctccccagatcctgatcaaaaacacgccggtacctgcggatcccccggtgaactttacggacgctaagctggcgagtttcatcacgcagtacagcaccgggcaggtcagcgtggagattgagtgggagctgcagaaggagaacagcaagcgctggaatcccgagattcagtacacttccaattattataaatcagctaatgtggactttgccgtcaatgcagatggtgtatatagcgaaccccgccccattggcactcgttacctcacccgtaatctgtaa

SEQ ID NO: 398 - protein, 731 aa, Artificial Sequence
  source: /note="Description of Artificial Sequence: Synthetic polypeptide"
MAADGYLPDWLEDNLSEGIREWWALKPGAPQPKANQQKQDDGRGLVLPGYKYLGPFNGLDKGEPVNEADAAALEHDKAYDQQLKAGDNPYLRYNHADAEFQERLQEDTSFGGNLGRAVFQAKKRVLEPLGLVEEGAKTAPGKKRPVEPDSSSGIGKSGQQPAKKRLNFGPTGDSESVPDPQPLSEPPAGPSGLGSGTMAAGGGAPMADNNEGADGVGNVSGNWHCDSTWLGDRVITTSTRTWALPTYNNHLYKQISNGTSGGSSNDNTYFGYSTPWGYFDFNRFHCHFSPRDWQRLINNNWGFRPKKLNFKLFNIQVKEVTQNEGTKTTANNLTSTVQVFTDSEYQLPYVLGSAHQGCLPPFPADVFMIPQYGYLTLNNGSQAVGRSSFYCLEYFPSQMLRTGNNFTFSYTFEDVPFHSSYAHSQSLDRLMNPLIDQYLYYLSRTQTNGTNATQTLLFAQAGPQNMSAQAKNWLPGPCYRQQRVSTAVSQNNNSNFTWTGATKYHLNGRDSLVNPGVAMATHKDDEERFFPSSGVLMFGKQGAGKDNVEYTNVMLTSEEEIKTTNPVATEQYGVVADNLQQTNSAPIVGAVNSQGALPGMVWQNRDVYLQGPIWAKIPHTDGNFHPSPLMGGFGLKHPPPQILIKNTPVPADPPVNFTDAKLASFITQYSTGQVSVEIEWELQKENSKRWNPEIQYTSNYYKSANVDFAVNADGVYSEPRPIGTRYLTRNL

SEQ ID NO: 399 - DNA, 4404 bp, Artificial Sequence
  source: /note="Description of Artificial Sequence: Synthetic polynucleotide"
atggctgccgatggttatcttccagattggctcgagggcaacctctctgagggcattcgcgagtggtgggacttgaaacctggagccccgaaacccaaagccaaccagcaaaagcaggacgacggccggggtctggtgcttcctggctacaggtacctcggacccttcaacggactcgacaagggagagccggtcaacgaggcagacgccgcggccctcgagcacgacaaggcctacgacaagcagctcgagcagggggacaacccgtacctcaagtacaaccacgccgacgccgagtttcaggagcgtcttcaagaagatacgtcttttgggggcaacctcgggcgagcagtcttccaggccaagaagcgggttctcgaacctctcggtctggttgaggaaggcgctaagacggctcctggaaagaagagacccatagaatcccccgactcctccacgggcatcggcaagaacggccagccgcccgctaaaaagaagctcaactttgggcagactggcgactcagagtcagtgcccgacccccaacctctcggagaacctcccgccgcgccctcaggtctgggatctggtacaatggctgcaggcggtggcgcaccaatggcagacaataacgaaggcgccgacggagtgggtaatgcctccggaaattggcattgcgattccacatggctgggcgacagagtcatcaccaccagcacccgcacctgggccctgcccacctacaacaaccacctctacaagcagatatcaagtcagagcggggctaccaacgacaaccacttcttcggctacagcaccccctggggctattttgacttcaacagattccactgccacttctcaccacgtgactggcagcgactcatcaacaacaactggggattccggcccagaaagctgcggttcaagttgttcaacatccaggtcaaggaggtcacgacgaacgacggcgttacgaccatcgctaataaccttaccagcacgattcaggtcttctcggactcggagtaccaactgccgtacgtcctcggctctgcgcaccagggctgcctccctccgttccctgcggacgtgttcatgattcctcagtacggatatctgactctaaacaacggcagtcagtctgtgggacgttcctccttctactgcctggagtactttccttctcagatgctgagaacgggcgataactttgaattcagctacacctttgaggaagtgcctttccacagcagctatgcgcacagccagagcctggaccggctgatgaatcccctcatcgaccagtacctgtactacctggcccggacccagagcactacggggtccacaagggagctgcagttccatcaggctgggcccaacaccatggccgagcaatcaaagaactggctgcccggaccctgttatcggcagcagagactgtcaaaaaacatagacagcaacaacaacagtaactttgcctggaccggggccactaaataccatctgaatggtagaaattcattaaccaacccgggcgtagccatggccaccaacaaggacgacgaggaccagttctttcccatcaacggagtgctggtttttggcaaaacgggggctgccaacaagacaacgctggaaaacgtgctaatgaccagcgaggaggagatcaaaaccaccaatcccgtggctacagaagaatacggtgtggtctccagcaacctgcaatcgtctacggccggaccccagacacagactgtcaacagccagggggctctgcccggcatggtctggcagaaccgggacgtgtacctgcagggtcccatctgggccaaaattcctcacacggacggcaactttcacccgtctcccctgatgggcggatttggactcaaacacccgcctcctcaaattctcatcaaaaacaccccggtacctgctaatcctccagaggtgtttactcctgccaagtttgcctcatttatcacgcagtacagcaccggccaggtcagcgtggagatcgagtgggaactgcagaaagaaaacagcaaacgctggaatccagagattcagtacacctcaaattatgccaagtctaataatgtggaatttgctgtcaacaacgaaggggtttatactgagcctcgccccattggcacccgttacctcacccgtaacctgtaaatggctgccgatggttatcttccagattggctcgaggacaacctctctgagggcattcgcgagtggtgggacttgaaacctggagccccgaaacccaaagccaaccagcaaaagcaggacgacggccggggtctggtgcttcctggctacaagtacctcggacccttcaacggactcgacaagggggagcccgtcaacgcggcggacgcagcggccctcgagcacgacaaggcctacgaccagcagctcaaagcgggtgacaatccgtacctgcggtataaccacgccgacgccgagtttcaggagcgtctgcaagaagatacgtcttttgggggcaacctcgggcgagcagtcttccaggccaagaagcgggttctcgaacctctcggtctggttgaggaaggcgctaagacggctcctggaaagaagagaccggtagagccatcaccccagcgttctccagactcctctacgggcatcggcaagaaaggccagcagcccgcgaaaaagagactcaactttgggcagactggcgactcagagtcagtgcccgaccctcaaccaatcggagaaccccccgcaggcccctctggtctgggatctggtacaatggctgcaggcggtggcgctccaatggcagacaataacgaaggcgccgacggagtgggtagttcctcaggaaattggcattgcgattccacatggctgggcgacagagtcatcaccaccagcacccgaacctgggccctccccacctacaacaaccacctctacaagcaaatctccaacgggacttcgggaggaagcaccaacgacaacacctacttcggctacagcaccccctgggggtattttgactttaacagattccactgccacttctcaccacgtgactggcagcgactcatcaacaacaactggggattccggcccaagagactcaacttcaagctcttcaacatccaggtcaaggaggtcacgcagaatgaaggcaccaagaccatcgccaataaccttaccagcacgattcaggtctttacggactcggaataccagctcccgtacgtcctcggctctgcgcaccagggctgcctgcctccgttcccggcggacgtcttcatgattcctcagtacgggtacctgactctgaacaatggcagtcaggccgtgggccgttcctccttctactgcctggagtactttccttctcaaatgctgagaacgggcaacaactttgagttcagctaccagtttgaggacgtgccttttcacagcagctacgcgcacagccaaagcctggaccggctgatgaaccccctcatcgaccagtacctgtactacctgtctcggactcagtccacgggaggtaccgcaggaactcagcagttgctattttctcaggccgggcctaataacatgtcggctcaggccaaaaactggctacccgggccctgctaccggcagcaacgcgtctccacgacactgtcgcaaaataacaacagcaactttgcctggaccggtgccaccaagtatcatctgaatggcagagactctctggtaaatcccggtgtcgctatggcaacccacaaggacgacgaagagcgattttttccgtccagcggagtcttaatgtttgggaaacagggagctggaaaagacaacgtggactatagcagcgttatgctaaccagtgaggaagaaattaaaaccaccaacccagtggccacagaacagtacggcgtggtggccgataacctgcaacagcaaaacgccgctcctattgtaggggccgtcaacagtcaaggagccttacctggcatggtctggcagaaccgggacgtgtacctgcagggtcctatctgggccaagattcctcacacggacggaaactttcatccctcgccgctgatgggaggctttggactgaaacacccgcctcctcagatcctgattaagaatacacctgttcccgcggatcctccaactaccttcagtcaagctaagctggcgtcgttcatcacgcagtacagcaccggacaggtcagcgtggaaattgaatgggagctgcagaaagaaaacagcaaacgctggaacccagagattcaatacacttccaactactacaaatctacaaatgtggactttgctgttaacacagatggcacttattctgagcctcgccccatcggcacccgttacctcacccgtaatctgtaa

SEQ ID NO: 400 - protein, 738 aa, Artificial Sequence; identical to SEQ ID NO: 18
  source: /note="Description of Artificial Sequence: Synthetic polypeptide"

SEQ ID NO: 401 - DNA, 3129 bp, Artificial Sequence
  source: /note="Description of Artificial Sequence: Synthetic polynucleotide"
gaattcgccctttctacggctgcgtcaactggaccaatgagaactttcccttcaacgattgcgtcgacaagatggtgatctggtgggaggagggcaagatgacggccaaggtcgtggagtccgccaaggccattctcggcggcagcaaagtgcgcgtggaccaaaagtgcaagtcgtccgcccagatcgaccccacccccgtgatcgtcacctccaacaccaacatgtgcgccgtgattgacgggaacagcaccaccttcgagcaccagcagccgttgcaggaccggatgttcaagtttgaactcacccgccgtctggagcacgactttggcaaggtgacaaagcaggaagtcagagagttcttccgctgggcgcaggatcacgtgaccgaggtggcgcacgagttctacgtcagaaagggtggagccaacaagagacccgcccccgatgacgcggataaaagcgagcccaagcgggcctgcccctcagtcgcggatccatcgacgtcagacgcggaaggagctccggtggactttgccgacaggtaccaaaacaaatgttctcgtcacgcgggcatgcttcagatgctgtttccctgcaaaacatgcgagagaatgaatcagaatttcaacatttgcttcacgcacgggaccagagactgttcagaatgtttccccggcgtgtcagaatctcaaccggtcgtcagaaaaaagacgtatcggaaactctgtgcgattcatcatctgctgggggcgggcacccgagattgcttgctcggcctgcgatctggtcaacgtggacctagatgactgtgtttctgagcaataaatgacttaaaccaggtatggctgccgatggttatcttccagattggctcgaggacaacctctctgagggcattcgcgagtggtgggacttgaaacctggagccccgaaacccaaagccaaccagcaaaagcaggacgacggccggggtctggtgcttcctggctacaagtacctcggacccttcaacggactcgacaagggggagcccgtcaacgcggcggacgcagcggccctcgagcacgacaaggcctacgaccagcagctcaaagcgggtgacaatccgtacctgcggtataaccacgccgacgccgagtttcaggagcgtctgcaagaagatacgtcttttgggggcaacctcgggcgagcagtcttccaggccaagaagcgggttctcgaacctctcggtctggttgaggaaggcgctaagacggctcctggaaagaagagaccggtagagccatcaccccagcgttctccagactcctctacgggcatcggcaagaaaggccagcagcccgcgaaaaagagactcaactttgggcagactggcgactcagagtcagtgcccgaccctcaaccaatcggagaaccccccgcaggcccctctggtctgggatctggtacaatggctgcaggcggtggcgctccaatggcagacaataacgaaggcgccgacggagtgggtagttcctcaggaaattggcattgcgattccacatggctgggcgacagagtcatcaccaccagcacccgaacctgggccctccccacctacaacaaccacctctacaagcaaatctccaacgggacttcgggaggaagcaccaacgacaacacctacttcggctacagcaccccctgggggtattttgactttaacagattccactgccacttctcaccacgtgactggcagcgactcatcaacaacaactggggattccggcccaagagactcaacttcaagctcttcaacatccaggtcaaggaggtcacgcagaatgaaggcaccaagaccatcgccaataaccttaccagcacgattcaggtctttacggactcggaataccagctcccgtacgtcctcggctctgcgcaccagggctgcctgcctccgttcccggcggacgtcttcatgattcctcagtacgggtacctgactctgaacaatggcagtcaggccgtgggccgttcctccttctactgcctggagtactttccttctcaaatgctgagaacgggcaacaactttgagttcagctaccagtttgaggacgtgccttttcacagcagctacgcgcacagccaaagcctggaccggctgatgaaccccctcatcgaccagtacctgtactacctgtctcggactcagtccacgggaggtaccgcaggaactcagcagttgctattttctcaggccgggcctaataacatgtcggctcaggccaaaaactggctacccgggccctgctaccggcagcaacgcgtctccacgacactgtcgcaaaataacaacagcaactttgcctggaccggtgccaccaagtatcatctgaatggcagagactctctggtaaatcccggtgtcgctatggcaacccacaaggacgacgaagagcgattttttccgtccagcggagtcttaatgtttgggaaacagggagctggaaaagacaacgtggactatagcagcgttatgctaaccagtgaggaagaaattaaaaccaccaacccagtggccacagaacagtacggcgtggtggccgataacctgcaacagcaaaacgccgctcctattgtaggggccgtcaacagtcaaggagccttacctggcatggtctggcagaaccgggacgtgtacctgcagggtcctatctgggccaagattcctcacacggacggaaactttcatccctcgccgctgatgggaggctttggactgaaacacccgcctcctcagatcctgattaagaatacacctgttcccgcggatcctccaactaccttcagtcaagctaagctggcgtcgttcatcacgcagtacagcaccggacaggtcagcgtggaaattgaatgggagctgcagaaagaaaacagcaaacgctggaacccagagattcaatacacttccaactactacaaatctacaaatgtggactttgctgttaacacagatggcacttattctgagcctcgccccatcggcacccgttacctcacccgtaatctgtaattgcttgttaatcaataaaccggttgattcgtttcagttgaactttggtctctgcgaagggcgaattc

SEQ ID NO: 402 - protein, 738 aa, Artificial Sequence; identical to SEQ ID NO: 18
  source: /note="Description of Artificial Sequence: Synthetic polypeptide"

SEQ ID NO: 403 - protein, 733 aa, Artificial Sequence
  source: /note="Description of Artificial Sequence: Synthetic polypeptide"
MAADGYLPDWLEDNLSEGIREWWDLRPGAPKPKANQQKQDDGRGLVLPGYKYLGPFNGLDKGEPVNEADAAALEHDKAYDKQLEQGDNPYLKYNHADAEFQERLQEDTSFGGNLGRAVFQAKKRVLEPLGLVEEGAKTAPGKKRPIESPDSSTGIGKKGQQPAKKRLNFGQTGDSESVPDPQPIGEPPAGPSGLGSGTMAAGGGAPMADNNEGADGVGSSSGNWHCDSTWLGDRVITTSTRTWALPTYNNHLYKQISNGTSGGSTNDNTYFGYSTPWGYFDFNRFHCHFSPRDWQRLINNNWGFRPKRLNFKLFNIQVKEVTQNEGTKTIANNLTSTIQVFTDSEYQLPYVLGSAHQGCLPPFPADVFMIPQYGYLTLNNGSQAVGRSSFYCLEYFPSQMLRTGNNFEFSYQFEDVPFHSSYAHSQSLDRLMNPLIDQYLYYLSRTQSTGGTAGTQQLLFSQAGPNNMSAQAKNWLPGPCYRQQRVSTTVSQNNNSNFAWTGATKYHLNGRDSLVNPGVAMATHKGDEERFFPSSGVLMFGKQGAGKDNVDYSSVMLTSEEEIKTTNPVATEQYGVVADNLQQQNAAPIVGAVNSQGALPGMVWQNRDVYLQGPIWAKIPHTDGNFHPSPLMGGFGLKHPPPQILIKNTPVPADPPTTFSQAKLASFITQYSTGQVSVEIEWELQKENSKRWNPEIQYTSNYYKSTNVDFAVNTEGTYSEPRPIGTRYLTRNL

SEQ ID NO: 404 - DNA, 2501 bp, Artificial Sequence
  source: /note="Description of Artificial Sequence: Synthetic polynucleotide"
gaattcgcccttggctgcgtcaactggaccaatgagaactttcccttcaacgattgcgtcgacaagatggtgatctggtgggaggagggcaagatgacggccaaggtcgtggagtccgccaaggccattcatcatctgctggggcgggctcccgagattgcttgctcggcctgcgatctggtcaacgtggacctggatgactgtgtttctgagcaataaatgacttaaaccaggtatggctgccgatggttatcttccagattggctcgaggacaacctctctgagggcattcgcgagtggtgggacttgagacctggagccccgaaacccaaagccaaccagcaaaagcaggacgacggccggggtctggtgcttcctggctacaagtacctcggacccttcaacggactcgacaagggagagccggtcaacgaggcagacgccgcggccctcgagcacgacaaggcctacgacaagcagctcgagcagggggacaacccgtacctcaagtacaaccacgccgacgccgagtttcaggagcgtcttcaagaagatacgtcttttgggggcaacctcgggcgagcagtcttccaggccaagaagcgggttctcgaacctctcggtctggttgaggaaggcgctaagacggctcctggaaagaagagacccatagaatcccccgactcctccacgggcatcggcaagaaaggccagcagcccgctaaaaagagactcaactttgggcagactggcgactcagagtcagtgcccgaccctcaaccaatcggagaaccccccgcaggcccctctggtctgggatctggcacaatggctgcaggcggtggcgctccaatggcagacaataacgaaggcgccgacggagtgggtagttcctcaggaaattggcattgcgattccacatggctgggcgacagagtcatcaccaccagcacccgaacctgggccctccccacctacaacaaccacctctacaagcaaatctccaacgggacatcgggaggaagcaccaacgacaacacctacttcggctacagcaccccctgggggtattttgactttaacagattccactgccacttctcaccacgtgactggcagcgactcatcaacaacaactggggattccggcccaagagactcaacttcaagctcttcaacatccaggtcaaggaggtcacgcagaatgaaggcaccaagaccatcgccaataaccttaccagcacgattcaggtctttacggactcggaataccagctcccgtacgtcctcggctctgcgcaccagggctgcctgcctccgttcccggcggacgtcttcatgattcctcagtacgggtacctgactctgaacaacggcagtcaggccgtgggccgttcctccttctactgcctggagtactttccttctcaaatgctgagaacgggcaacaactttgagttcagctaccagtttgaggacgtgccttttcacagcagctatgcgcacagccaaagcctggaccggctgatgaaccccctcatcgaccagtacctgtactacctgtctcggactcagtccacgggaggtaccgcaggaactcagcagttgctattttctcaggccgggcctaataacatgtcggctcaggccaaaaactggctacccgggccctgctaccggcagcaacgcgtctccacgacagtgtcgcaaaataacaacagcaactttgcttggaccggtgccaccaagtatcatctgaatggcagagactctctggtaaatcccggtgtcgctatggcaacgcacaagggcgacgaagagcgattttttccatccagcggagtcttgatgtttgggaaacagggagctggaaaagacaacgtagactatagcagcgttatgctaaccagtgaggaagaaatcaaaaccaccaacccagtggccacagaacagtacggcgtggtggccgataacctgcaacagcaaaacgccgctcctattgtaggggccgtcaacagtcaaggagccttacctggcatggtctggcagaaccgggacgtgtacctgcagggtcctatctgggccaagattcctcacacggacggcaactttcatccttcgccgctgatgggaggctttggactgaaacacccgcctcctcagatcctgattaagaatacacctgttcccgcggatcctccaactaccttcagtcaagccaagctggcgtcgttcatcacgcagtacagcaccggacaggtcagcgtggaaattgaatgggagctgcagaaagagaacagcaagcgctggaacccagagattcagtatacttccaactactacaaatctacaaatgtggactttgctgtcaatactgagggtacttattcagagcctcgccccattggcacccgttacctcacccgtaacctgtaattgcctgttaatcaataaaccggttgattcgtttcagttgaactttggtctcaagggcgaattc

SEQ ID NO: 405 - DNA, 2187 bp, Artificial Sequence
  source: /note="Description of Artificial Sequence: Synthetic polynucleotide"
atggctgccgatggttatcttccagattggctcgaggacaacctctctgagggcattcgcgagtggtgggacttgaaacctggagccccgaaacccaaagccaaccagcaaaagcaggacgacggccggggtctggtgcttcctggctacaagtacctcggacccttcaacggactcgacaagggagagccggtcaacgaggcagacgccgcggccctcgagcacgacaaggcctacgacaagcagctcgagcagggggacaacccgtacctcaagtacaaccacgccgacgccgagtttcaggagcgtcttcaagaagatacgtcttttgggggcaacctcgggcgagcagtcttccaggccaagaagcgggttctcgaacctctcggtctggttgaggaaggcgctaagacggctcctggaaagaagagacccatagaatcccccgactcctccacgggcatcggcaagaaaggccagcagcccgctaaaaagaagctcaactttgggcagactggcgactcagagtcagtgcccgacccccaacctctcggagaacctcccgccgcgccctcaggtctgggatctggtacaatggctgcaggcggtggcgcaccaatggcagacaataacgaaggcgccgacggagtgggtaatgcctccggaaattggcattgcgattccacatggctgggcgacagagtcatcaccaccagcacccgcacctgggccctgcccacctacaacaaccacctctacaagcagatatcaagtcagagcggggctaccaacgacaaccacttcttcggctacagcaccccctggggctattttgacttcaacagattccactgccacttctcaccacgtgactggcagcgactcatcaacaacaactggggattccggcccagaaagctgcggttcaagttgttcaacatccaggtcaaggaggtcacgacgaacgacggcgttacgaccatcgctaataaccttaccagcacgattcaggtcttctcggactcggagtaccaactgccgtacgtcctcggctctgcgcaccagggctgcctccctccgttccctgcggacgtgttcatgattcctcagtacggatatctgactctaaacaacggcagtcagtctgtgggacgttcctccttctactgcctggagtactttccttctcagatgctgagaacgggcaataactttgaattcagctacacctttgaggaagtgcctttccacagcagctatgcgcacagccagagcctggaccggctgatgaatcccctcatcgaccagtacctgtactacctggcccggacccagagcactacggggtccacaagggagctgcagttccatcaggctgggcccaacaccatggccgagcaatcaaagaactggctgcccggaccctgttatcggcagcagagactgtcaaaaaacatagacagcaacaacaacagtaactttgcctggaccggggccactaaataccatctgaatggtagaaattcattaaccaacccgggcgtagccatggccaccaacaaggacgacgaggaccagttctttcccatcaacggagtgctggtttttggcgaaacgggggctgccaacaagacaacgctggaaaacgtgctaatgaccagcgaggaggagatcaaaaccaccaatcccgtggctacagaagaatacggtgtggtctccagcaacctgcaatcgtctacggccggaccccagacacagactgtcaacagccagggggctctgcccggcatggtctggcagaaccgggacgtgtacctgcagggtcccatctgggccaaaattcctcacacggacggcaactttcacccgtctcccctgatgggcggatttggactcaaacacccgcctcctcaaattctcatcaaaaacaccccggtacctgctaatcctccagaggtgtttactcctgccaagtttgcctcatttatcacgcagtacagcaccggccaggtcagcgtggagatcgagtgggaactgcagaaagaaaacagcaaacgctggaatccagagattcagtacacctcaaattatgccaagtctaataatgtggaatttgctgtcaacaacgaaggggtttatactgagcctcgccccattggcacccgttacctcacccgtaacctgtaa

SEQ ID NO: 406 - protein, 728 aa, Artificial Sequence; identical to SEQ ID NO: 74
  source: /note="Description of Artificial Sequence: Synthetic polypeptide"

SEQ ID NO: 407 - protein, 728 aa, Artificial Sequence; identical to SEQ ID NO: 166
  source: /note="Description of Artificial Sequence: Synthetic polypeptide"

SEQ ID NO: 408 - protein, 728 aa, Artificial Sequence; identical to SEQ ID NO: 166
  source: /note="Description of Artificial Sequence: Synthetic polypeptide"

SEQ ID NO: 409 - protein, 733 aa, Artificial Sequence
  source: /note="Description of Artificial Sequence: Synthetic polypeptide"
MAADGHLPDWLEDNLSEGIREWWDLKPGAPKPKANQQKQDDGRGLVLPGYKYLGPFNGLDKGEPVNAADAAALEHDKAYDQQLKAGDNPYLRYNHADAEFQERLQEDTSFGGNLGRAVFQAKKRVLEPLGLVEEGAKTAPGKKRPIESPDSSTGIGKKGQQPAKKKLNFGQTGDSESVPDPQPIGEPPAGPSGLGSGTMAAGGGAPMADNNEGADGVGSSSGNWHCDSTWLGDRVITTSTRTWALPTYNNHLYKQISNGTSGGSTNDNTYFGYSTPWGYFDFNRFHCHFSPRDWQRLINNSWGFRPKRLNFKLFNIQVKEVTQNEGTKTIANNLTSTIQVFTDSEYQLPYVLGSAHQGCLPPFPADVFMIPQYGYLTLNNGSQAVGRSSFYCLEYFPSQMLRTGNNFEFSYQFEDVPFHSSYAHSQSLDRLMNPLIDQYLYYLSRTQSTGGTAGTQQLLFSQAGPNNMSAQAKNWLPGPCYRQQRVSTTLSQNNNSNFAWTGATKYHLNGRDSLVNPGVAMATHKDDEERFFPSSGVLMFGKQGAGKDNVDYSSVMLTSEEEIKTTNPVATEQYGVVADNLQQQNAAPIVGAVNSQGALPGMVWQNRDVYLQGPIWAKIPHTDGNFHPSPLMGGFGLKHPPPQILIKNTPVPADPPTTFSQAKLASFITQYSTGQVSVEIEWELQKENSKRWNPEIQYTSNYYKSTNVDFAVNTEGTYSEPRPIGTRYLTRNL

SEQ ID NO: 410 - DNA, 3113 bp, Artificial Sequence
  source: /note="Description of Artificial Sequence: Synthetic polynucleotide"
gaattcgccctttctacggctgcgtcaactggaccaatgagaactttcccttcaacgattgcgtcgacaagatggtgatctggtgggaggagggcaagatgacggccaaggtcgtggagtccgccaaggccattctcggcggcagcaaggtgcgcgtggaccaaaagtgcaagtcgtccgcccagatcgatcccacccccgtgatcgtcacttccaacaccaacatgtgcgccgtgattgacgggaacagcaccaccttcgagcaccagcagccgttacaagaccggatgttcaaatttgaactcacccgccgtctggagcatgactttggcaaggtgacaaagcaggaagtcaaagagttcttccgctgggcgcaggatcacgtgaccgaggtggcgcatgagttctacgtcagaaagggtggagccaacaagagacccgcccccgatgacgcggataaaagcgagcccaagcgggcctgcccctcagtcgcggatccatcgacgtcagacgcggaaggagctccggtggactttgccgacaggtaccaaaacaaatgttctcgtcacgcgggcatgcttcagatgctgcttccctgcaagacatgcgagagaatgaatcagaatttcagcatttgcttcacgcacgggaccagagactgttcagaatgtttccccggcgtgtcagaatctcaaccggtcgtcagaaagaggacgtatcggaaactctgtgccattcatcatctgctggggcgggctcccgagattgcttgctcggcctgcgatctggtcaacgtggacctggatgactgtgtttctgagcaataaatgacttaaaccaggtatggctgccgatggtcatcttccagattggctcgaggacaacctctctgagggcattcgcgagtggtgggacttgaaacctggagccccgaaacccaaagccaaccagcaaaagcaggacgacggccggggtctggtgcttcctggctacaagtacctcggacccttcaacggactcgacaagggggagcccgtcaacgcggcggacgcagcggccctcgagcacgacaaggcctacgaccagcagctcaaagcgggtgacaatccgtacctgcggtataaccacgccgacgccgagtttcaggagcgtcttcaagaagatacgtcttttgggggcaacctcgggcgagcagtcttccaggccaagaagcgggttctcgaacctctcggtctggttgaggaaggcgctaagacggctcctggaaagaagagacccatagaatcccccgactcctccacgggcatcggcaagaaaggccagcagcccgctaaaaagaagctcaactttgggcagactggcgactcagagtcagtgcccgaccctcaaccaatcggagaaccccccgcaggcccctctggtctgggatctggtacaatggctgcaggcggtggcgctccaatggcagacaataacgaaggcgccgacggagtgggtagttcctcaggaaattggcattgcgattccacatagctgggcgacagagtcatcaccaccagcacccgaacctgggccctccccacctacaacaaccacctctacaagcaaatctccaacgggacatcgggaggaagcaccaacgacaacacctacttcggctacagcaccccctgggggtattttgactttaacagattccactgccacttctcaccacgtgactggcagcgactcatcaacaacagctggggattccggcccaagagactcaacttcaagctcttcaacatccaggtcaaggaggtcacgcagaatgaaggcaccaagaccatcgccaataaccttaccagcacgattcaggtctttacggactcggaataccagctcccgtacgtcctcggctctgcgcaccagggctgcctgcctccgttcccggcggacgtcttcatgattcctcagtacgggtacctgactctgaacaacggcagtcaggccgtgggccgttcctccttctactgcctggagtactttccttctcaaatgctgagaacgggcaacaactttgagttcagctaccagtttgaggacgtgccttttcacagcagctacgcgcacagccaaagcctggaccggctgatgaaccccctcatcgaccagtacctgtactacctgtctcggactcagtccacgggaggtaccgcaggaactcagcagttgctattttctcaggccgggcctaataacatgtcggctcaggccaaaaactggctacccgggccctgctaccggcagcaacgcgtctccacgacactgtcgcaaaataacaacagcaactttgcttggaccggtgccaccaagtatcatctgaatggcagagactctctggtaaatcccggtgtcgctatggcaacgcacaaggacgacgaagagcgattttttccatccagcggagtcttgatgtttgggaaacagggagctggaaaagacaacgtggactatagcagcgttatgctaaccagtgaggaagaaatcaaaaccaccaacccagtggccacagaacagtacggcgtggtggccgataacctgcaacagcaaaacgccgctcctattgtaggggccgtcaacagtcaaggagccttacctggcatggtctggcagaaccgggacgtgtacctgcagggtcctatctgggccaagattcctcacacggacggcaactttcatccttcgccgctgatgggaggctttggactgaaacacccgcctcctcagatcctgattaagaatacacctgttcccgcggatcctccaactaccttcagtcaagccaagctggcgtcgttcatcacgcagtacagcaccggacaggtcagcgtggaaattgaatgggagctgcagaaagagaacagcaagcgctggaacccagagattcagtatacttccaactactacaaatctacaaatgtggactttgctgtcaatactgagggtacttattcagagcctcgccccattggcacccgttacctcacccgtaacctgtaattgcctgttaatcaataaaccggttaattcgtttcagttgaactttggtctctgcgaagggcgaattc

SEQ ID NO: 411 - protein, 731 aa, Artificial Sequence
  source: /note="Description of Artificial Sequence: Synthetic polypeptide"
MAADGYLPDWLEDNLSEGIREWWDLKPGAPKPKANQQKQDDGRGLVLPGYKYLGPFNGLDKGEPVNEADAAALEHDKAYDKQLEQGDNPYLKYNHADAEFQERLQEDTSFGGNLGRAVFRAKKRVLEPLGLVEEGAKTAPGKKRPIESPDSSTGIGKKGQQPAKKKLNFGQTGDSESVPDPQPLGEPPAAPSGLGSGTMAAGGGAPMADNNEGADGVGNASGNWHCDSTWLGDRVITTSTRTWALPTYNNHLYKQISSQSGATNDNHFFGYSTPWGYFDFNRFHCHFSPRDWQRLINNNRGFRPRKLRFKLFNIQVKEVTTNDGVTTIANNLTSTIQVFSDSEYQLPYVLGSAHQGCLPPFPADVFMIPQYGYLTLNNGSQSVGRSSFYCLEYFPSQMLRTGNNFEFSYQFEDVPFHSSYAHSQSLDRLMNPLIDQYLYYLSRTQSTGGTAGTQQLLFSQAGPNNMSAQAKNWLPGPCYRQQRVSTTLSQNNNSNFAWTGATKYHLNGRDSLVNPGVAMATHKDDEERFFPSSGVLMFGKQGAGKDNVDYSSVMLTSEEEIKTTNPVATEQYGVVADNLQQQNAAPIVGAVNSQGALPGMAWQNRDVYLQGPIWAKIPHTDGNFHPSPLMGGFGLKHPPPQILIKNTPVPADPPTTFSQAKLASFITQYSTGQVSVEIEWELQKENSKRWNPEIQYTSNYYKSTNVDFAVNTEGTYSEPRPIGTRYLTRNL

SEQ ID NO: 412 - DNA, 3106 bp, Artificial Sequence
  source: /note="Description of Artificial Sequence: Synthetic polynucleotide"
gaattcgcccttctacggctgcgtcaactggaccaatgagaactttcccttcaacgattgcgtcgacaagatggtgatctggtgggaggagggcaagatgacggccaaggtcgtggagtccgccaaggccattctcggcggcagcaaggtgcgcgtggaccaaaagtgcaagtcgtccgcccagatcgaccccacccccgtgatcgtcacctccaacaccaacatgtgcgccgtgattgacgggaacagcaccaccttcgagcaccagcagccgttgcaggaccggatgttcaaatttgaactcacccgccgtctggagcatgactttggcaaggcgacaaagcaggaagtcaaagagttcttccgctgggcgcaggatcacgtgaccgaggtggcgcatgagttctacgtcagaaagggtggagccaacaagagacccgcccccgatgacgcggataaaagcgagcccaagcgggcccgcccctcagtcgcggatccatcgacgtcagacgcggaaggagctccggtggactttgccgacaggtaccaaaacaaatgttctcgtcacgcgggcatgcttcagatgctgtttccctgcaaaacatgcgagagaatgaatcagaatttcaacatttgcttcacgcacgggaccagagactgttcagaatgtttccccggcgtgtcagaatctcaaccggtcgtcagaaagaggacgtatcggaaactctgtgccattcatcatctgctggggcgggctcccgagattgcttgctcggcctgcgatctggtcaacgtggacctggatgactgtgtttctgagcaataaatgacttaaaccaggtatggctgccgatggttatcttccagattggctcgaggacaacctctctgagggcattcgcgagtggtgggacttgaaacctggagccccgaaacccaaagccaaccagcaaaagcaggacgacggccggggtctggtgcttcctggctacaagtacctcggacccttcaacggactcgacaagggagagccggtcaacgaggcagacgccgcggccctcgagcacgacaaggcctacgacaagcagctcgagcagggggacaacccgtacctcaagtacaaccacgccgacgccgagtttcaggagcgtcttcaagaagatacgtcttttgggggcaacctcgggcgagcagtcttccgggccaagaagcgggttctcgaacctctcggtctggttgaggaaggcgctaagacggctcctggaaagaagagacccatagaatcccccgactcctccacgggcatcggcaagaaaggccagcagcccgctaaaaagaagctcaactttgggcagactggcgactcagagtcagtgcccgacccccaacctctcggagaacctcccgccgcgccctcaggtctgggatctggtacaatggctgcaggcggtggcgcaccaatggcagacaataacgaaggcgccgacggagtgggtaatgcctccggaaattggcattgcgattccacatggctgggcgacagagtcatcaccaccagcacccgcacctgggccctgcccacctacaacaaccacctctacaagcagatatcaagtcagagcggggctaccaacgacaaccacttcttcggctacagcaccccctggggctattttgacttcaacagattccactgccacttctcaccacgtgactggcagcgactcatcaacaacaaccggggattccggcccagaaagctgcggttcaagttgttcaacatccaggtcaaggaggtcacgacgaacgacggcgttacgaccatcgctaataaccttaccagcacgattcaggtcttctcggactcggagtaccaactgccgtacgtcctcggctctgcgcaccagggctgcctccctccgttccctgcggacgtgttcatgattcctcagtacggatatctgactctaaacaacggcagtcagtctgtgggacgttcctccttctactgcctggagtactttccttctcagatgctgagaacgggcaataactttgaattcagctaccagtttgaggacgtgccctttcacagcagctacgcgcacagccaaagcctggaccggctgatgaaccccctcatcgaccagtacctgtactacctgtctcggactcagtccacgggaggtaccgcaggaactcagcagttgctattttctcaggccgggcctaataacatgtcggctcaggccaaaaactggctacccgggccctgctaccggcagcaacgcgtctccacgacactgtcgcaaaataacaacagcaactttgcttggaccggtgccaccaagtatcatctgaatggcagagactctctggtaaatcccggtgtcgctatggcaacgcacaaggacgacgaagagcgattttttccatccagcggagtcttgatgtttgggaaacagggagctggaaaagacaacgtggactatagcagcgttatgctaaccagtgaggaagaaatcaaaaccaccaacccagtggccacagaacagtacggcgtggtggccgataacctgcaacagcaaaacgccgctcctattgtaggggccgtcaacagtcaaggagccttacctggcatggcctggcagaaccgggacgtgtacctgcagggtcctatctgggccaagattcctcacacggacggcaactttcatccttcgccgctgatgggaggctttggactgaaacacccgcctcctcagatcctgattaagaatacacctgttcccgcggatcctccaactaccttcagtcaagccaagctggcgtcgttcatcacgcagtacagcaccggacaggtcagcgtggaaattgaatgggagctgcagaaagagaacagcaagcgctggaacccagagattcagtatacttccaactactacaaatctacaaatgtggactttgctgtcaatactgagggtacttattcagagcctcgccccattggcacccgttacctcacccgtaacctgtaattgcctgttaatcaataaaccggttaattcgtttcagttgaactttggtctctgcgaagggcgaattc

SEQ ID NO: 413 - protein, 738 aa, Artificial Sequence
  source: /note="Description of Artificial Sequence: Synthetic polypeptide"
MAADGYLPDWLEDNLSEGIREWWDLKPGAPKPKANQQKQDDGRGLVLPGYKYLGPFNGLDKGEPVNEADAAALEHDKAYDKQLEQGDNPYLKYNHADAEFQERLQEDTSFGGNLGRAVFQAKKRVLEPLGLVEEGAKTAPGKKRPVEPSPQRSPDSSTGIGKTGQQPAKKRLNFGQTGDSESVPDPQPIGEPPAGPSGLGSGTMAAGGGAPMADNNEGADGVGSSSGNWHCDSTWLGDRVITTSTRTWALPTYNNHLYKQISNGTSGGSTNDNTYFGYSTPWGYFDFNRFHCHFSPRDWQRLINNNWGFRPKRLNFKLFNIQVKEVTQNEGTKTIANNLTSTIQVFTDSEYQLPYVLGSAHQGCLPPFPADVFMIPQYGYLTLNNGSQAVGRSSFYCLEYFPSQMLRTGNNFEFSYQFEDVPFHSSYAHSQSLDRLMNPLIDQYLYYLSRTQSTGGTAGTQQLLFSQAGPNNMSAQAKNWLPGPCYRQQRVSTTLSQNNNSNFAWTGATKYHLNGRDSLVNPGVAMATHKDDEERFFPSSGVLMFGKQGAGKDNVDYSSVMLTSEEEIKTTNPVATEQYGVVADNLQQQNAAPIVGAVNSQGALPGMVWQNRDVYLQGPIWAKIPHTDGNFHPSPLMGGFGLKHPPPQILIKNTPVPADPPTTFSQAKLASFITQYSTGQVSVEIEWELQKENSKRWNPEIQYTSNYYKSTNVDFAVNTEGTYSEPRPIGTRYLTRNL

SEQ ID NO: 414 - DNA, 3197 bp, Artificial Sequence
  source: /note="Description of Artificial Sequence: Synthetic polynucleotide"
gaattcgccctttctacggctgcgtcaactggaccaatgagaactttcccttcaacgattgcgtcgacaagatggtgatctggtgggaggagggcaagatgacggccaaggtcgtggagtccgccaaggccattctcggcggcagcaaggtgcgcgtggaccaaaagtgcaagtcgtccgcccagatcgaccccacccccgtgatcgtcacctccaacaccaacatgtgcgccgtgattgacgggaacagcaccaccttcgagcaccagcagccgttacaagaccggatgttcaaatttgaactcacccgccgtctggagcacgactttggcaaggtgacaaagcaggaagtcaaagagttcttccgctgggcgcaggatcacgtgaccgaggtggcgcatgagttctacgtcagaaagggtggagccaacaagagacccgcccccgatgacgcggataaaagcgagcccaagcgggcctgcccctcagtcgcggatccatcgacgtcagacgcggaaggagctccggtggactttgccgacaggtaccaaaacaaatgttctcgtcacgcgggcatgcttcagatgctgtttccctgcaagacatgcgagagaatgaatcagaatttcaacatttgcttcacgcacgggaccagagactgttcagaatgtttccccggcgtgtcagaatctcaaccggtcgtcagaaagaggacgtatcggaaactctgtgccattcatcatctgctggggcgggctcccgagattgcttgctcggcctgcgatctggtcaacgtggacctggatgactgtgtttctgagcaataaatgacttaaaccaggtatggctgccgatggttatcttccagattggctcgaggacaacctctctgagggcattcgcgagtggtgggacttgaaacctggagccccgaaacccaaagccaaccagcaaaagcaggacgacggccggggtctggtgcttcctggctacaagtacctcggacccttcaacggactcgacaagggagagccggtcaacgaggcagacgccgcggccctcgagcacgacaaggcctacgacaagcagctcgagcagggggacaacccgtacctcaagtacaaccacgccgacgccgagtttcaggagcgtcttcaagaagatacgtcttttgggggcaacctcgggcgagcagtcttccaggccaagaagcgggttctcgaacctctcggtctggttgaggaaggcgctaagacggctcctggaaagaagagaccggtagagccatcaccccagcgttctccagactcctctacgggcatcggcaagacaggccagcagcccgcgaaaaagagactcaactttgggcagactggcgactcagagtcagtgcccgaccctcaaccaatcggagaaccccccgcaggcccctctggtctgggatctggtacaatggctgcaggcggtggcgctccaatggcagacaataacgaaggcgccgacggagtgggtagttcctcaggaaattggcattgcgattccacatggctgggcgacagagtcatcaccaccagcacccgaacctgggccctccccacctacaacaaccacctctacaagcaaatctccaacgggacatcgggaggaagcaccaacgacaacacctacttcggctacagcaccccctgggggtattttgactttaacagattccactgccacttctcaccacgtgactggcagcgactcatcaacaacaactggggattccggcccaagagactcaacttcaagctcttcaacatccaggtcaaggaggtcacgcagaatgaaggcaccaagaccatcgccaataaccttaccagcacgattcaggtctttacggactcggaataccagctcccgtacgtcctcggctctgcgcaccagggctgcctgcctccgttcccggcggacgtcttcatgattcctcagtacgggtacctgactctgaacaacggcagtcaggccgtgggccgttcctccttctactgcctggagtactttccttctcaaatgctgagaacgggcaacaactttgagttcagctaccagtttgaggacgtgccttttcacagcagctacgcgcacagccaaagcctggaccggctgatgaaccccctcatcgaccagtacctgtactacctgtctcggactcagtccacgggaggtaccgcaggaactcagcagttgctattttctcaggccgggcctaataacatgtcggctcaggccaaaaactggctacccgggccctgctaccggcagcaacgcgtctccacgacactgtcgcaaaataacaacagcaactttgcttggaccggtgccaccaagtatcatctgaatggcagagactctctggtaaatcccggtgtcgctatggcaacgcacaaggacgacgaagagcgattttttccatccagcggagtcttgatgtttgggaaacagggagctggaaaagacaacgtggactatagcagcgttatgctaaccagtgaggaagaaatcaaaaccaccaacccagtggccacagaacagtacggcgtggtggccgataacctgcaacagcaaaacgccgctcctattgtaggggccgtcaacagtcaaggagccttacctggcatggtctggcagaaccgggacgtgtacctgcagggtcctatctgggccaagattcctcacacggacggcaactttcatccttcgccgctgatgggaggctttggactgaaacacccgcctcctcagatcctgattaagaatacacctgttcccgcggatcctccaactaccttcagtcaagccaagctggcgtcgttcatcacgcagtacagcaccggacaggtcagcgtggaaattgaatgggagctgcagaaagagaacagcaagcgctggaacccagagattcagtatacttccaactactacaaatctacaaatgtggactttgctgtcaatactgagggtacttattcagagcctcgccccattggcacccgttacctcacccgtaacctgtaattgcctgttaatcaataaaccggttaattcgtttcagttgaactttggtctctgcgaagggcgaattcgtttaaacctgcaggactagtccctttagtgagggttaattctgagcttggcgtaatcatgggtcatag

SEQ ID NO: 415 - protein, 735 aa, Artificial Sequence
  source: /note="Description of Artificial Sequence: Synthetic polypeptide"
MAADGYLPDWLEDNLSEGIREWWDLKPGAPKPKANQQKQDDGRGLVLPGYKYLGPFNGLDKGEPVNEADAAALEHDKAYDKQLEQGDNPYLKYNHADAEFQERLQEDTSFGGNLGRAVFQAKKRVLEPLGLVEEGAKTAPGKKRPVEPSPQRSPDSSTGIGKTGQQPAKKRLNFGQTGDSESVPDPQPIGEPPAGPSGLGSGTMAAGGGAPMADNNEGADGVGSSSGNWHCDSTWLGDRVITTSTRTWALPTYNNHLYKQISNGTSGGSTNDNTYFGYSTPWGYFDFNRFHCHFSPRDWQRLINNNWGFRPRKLRFKLFNIQVKEVTTDDGVTTIANNLTSTIQVFSDSEYQLPYVLGSAHQGCLPPFPADVFMIPQYGYLTLNNGSQSVGRSSFYCLEYFPSQMLRTGNNFEFSYTFEEVPFHSSYAHSQSLDRLMNPLIDQYLYYLARTQSTTGSTRELQFHQAGPNTMAEQSKNWLPGPCYRQQRLSKNIDSNNNSNFAWTGATKYHLNGRNSLTNPGVAMATNKDDEDQFFPINGVLVFGKTGAANKTTLENVLMTSEEEIKTTNPVATEEYGVVSSNLQSSTAGPQTQTVNSQGALPGMVWQNRDVYLQGPIWAKIPHTDGNFHPSPLMDGFGLKHPPPQILIKNTPVPANPPEVFTPAKFASFITQYSTGQVSVEIEWELQKENSKRWNPEIQYTSNYAKSNNVEFAVNNEGVYTEPRPIGTRYLTRNL

SEQ ID NO: 416 - DNA, 3276 bp, Artificial Sequence
  source: /note="Description of Artificial Sequence: Synthetic polynucleotide"
gaattcgcccttcgcagagaccaaagttcaactgaaacgaattaaccggtttattgattaacaggcaattacaggttacgggtgaggtaacgggtgccaatggggcgaggctcagtataaaccccttcgttgttgacagcaaattccacattattagacttggcataatttgaggtgtactgaatctctggattccagcgtttgctgttttctttctgcagttcccactcgatctccacgctgacctggccggtgctgtactgcgtgataaatgaggcaaacttggcaggagtaaacacctctggaggattagcaggtaccggggtgtttttgatgagaatttgaggaggcgggtgtttgagtccaaatccgtccatcaggggagacgggtgaaagttgccgtccgtgtgaggaattttggcccagatgggaccctgcaggtacacgtcccggttctgccagaccatgccgggcagagccccctggctgttgacagtctgtgtctggggtccggccgtagacgattgcaggttgctggagaccacaccgtattcttctgtagccacgggattggtggttttgatctcctcctcgctggtcattagcacgttttccagcgttgtcttgttggcagcccccgttttgccaaaaaccagcactccgttgatgggaaagaactggtcctcgtcgtccttgttggtggccatggctacgcccgggttggttaatgaatttctaccattcagatggtatttagtggccccggtccaggcaaagttactgttgttgttgctgtctatgttttttgacagtctctgctgccgataacagggtccgggcagccagttctttgattgctcggccatggtgttgggcccagcctgatggaactgcagctcccttgtggaccccgtagtgctctgggtccgggccaggtagtacaggtactggtcgatgaggggattcatcagccggtccaggctctggctatgcgcatagctgctgtggaaaggcacttcctcaaaggtgtagctgaattcaaagttattgcccgttctcagcatctgagaaggaaagtactccaggcagtagaaggaggaacgtcccacagactgactgccgttgtttagagtcagatatccgtactgaggaatcatgaacacgtccgcagggaacggagggaggcagccctggtgcgcagagccgaggacgtacggcagttggtactccgagtccgagaagacctgaatcgtgctggtaaggttattagcgatggtcgtaacgccgtcgtccgtcgtgacctccttgacctggatgttgaacaacttgaaccgcagctttctgggccggaatccccagttgttgttgatgagtcgctgccagtcacgtggtgagaagtggcagtggaatctgttaaagtcaaaatacccccagggggtgctgtagccgaagtaggtgttgtcgttggtgcttcctcccgatgtcccgttggagatttgcttgtagaggtggttgttgtaggtggggagggcccaggttcgggtgctggtggtgatgactctgtcgcccagccatgtggaatcgcaatgccaatttcctgaggaactacccactccgtcggcgccttcgttattgtctgccattggagcgccaccgcctgcagccattgtaccagatcccagaccagaggggcctgcggggggttctccgattggttgagggtcgggcactgactctgagtcgccagtctgcccaaagttgagtctctttttcgcgggctgctggcctgtcttgccgatgcccgtagaggagtctggagaacgctggggtgatggctctaccggtctcttctttccaggagccgtcttagcgccttcctcaaccagaccgagaggttcgagaacccgcttcttggcctggaagactgctcgcccgaggttgcccccaaaagacgtatcttcttgaagacgctcctgaaactcggcgtcggcgtggttgtacttgaggtacgggttgtccccctgctcgagctgcttgtcgtaggccttgtcgtgctcgagggccgcggcgtctgcctcgttgaccggctctcccttgtcgagtccgttgaagggtccgaggtacttgtagccaggaagcaccagaccccggccgtcgtcctgcttttgctggttggctttgggtttcggggctccaggtttcaagtcccaccactcgcgaatgccctcagagaggttgtcctcgagccaatctggaagataaccatcggcagccatacctggtttaagtcatttattgctcagaaacacagtcatccaggtccacgttgaccagatcgcaggccgagcaagcaatctcgggagcccgccccagcagatgatgaatggcacagagtttccgatacgtcctctttctgacgaccggttgagattctgacacgccggggaaacattctgaacagtctctggtcccgtgcgtgaagcaaatgttgaaattctgattcattctctcgcatgtcttgcagggaaacagcatctgaagcatgcccgcgtgacgagaacacttgttttggtacctgtcggcaaagtccaccggagctccttccgcgtctgacgtcgatggatgcaaaatgtcgcaaaagcactcacgtgacagctaatacaggaccactcccctatgacgtgatttacgtcagcgctatgcccgcgtgacgagaacatttgttttggtacctgtcggcaaagtccaccggagctccttccgcgtctgacgtcgatggatccgcgactgaggggcaggcccgcttgggctcgcttttatccgcgtcatcgggggcgggtctcttgttggctccaccctttctgacgtagaactcatgcgccacctcggtcacgtgatcctgcgcccagcggaagaactctttgacttcctgctttgtcaccttgccaaagtcatgctccagacggcgggtgagttcaaatttgaacatccggtcctgcaacggctgctggtgctcgaaggtggtgctgttcccgtcaatcacggcgcacatgttggtgttggaagtgacgatcacgggggtgggatcgatctgggcggaagacttgcacttttggtccacgcgcaccttgctgccgccgagaatggccttggcggactccacgaccttggccgtcatcttgccctcctcccaccagatcaccatcttgtcgacgcaatcgttgaagggaaagttctcattggtccagttgacgcagccgtagaaagggcgaattc

SEQ ID NO: 417 - protein, 738 aa, Artificial Sequence; identical to SEQ ID NO: 82
  source: /note="Description of Artificial Sequence: Synthetic polypeptide"

SEQ ID NO: 418 - protein, 738 aa, Artificial Sequence
  source: /note="Description of Artificial Sequence: Synthetic polypeptide"
MAADGYLPDWLEDNLSEGIREWWDLKPGAPKPKANQQKQDDGRGLVLPGYKYLGPFNGLDKGEPVNAADAAALEHDKAYDQQLKAGDNPYLRYNHADAEFQERLQEDTSFGGNLGRAVFQAKKRVLEPLGLVEEGAKTAPGKKRPVEPSPQRSPDSSTGIGKKGHQPARKRLNFGQTGDSESVPDPQPIGEPPAGPSGLGSGTMAAGGGAPMADNNEGADGVGSSSGNWHCDSTWLGDRVITTSTRTWALPTYNNHLYKQISNGTSGGSTNDNTYFGYSTPWGYFDFNRFHCHFSPRDWQRLINNNWGFRPKRLNFKLFNIQVKEVTQNEGTKTIANNLTSTIQVFTDSEYQLPYVPGSAHQGCLPPFPADVFMIPQYGYLTLNNGSQAVGRSSFYCLEYFPSQMLRTGNNFEFSYTFEDVPFHSSYAHSQSLDRLMNPLIDQYLYYLSRTQSTGGTQGTQQLLFSQAGPANMSAQAKNWLPGPCYRQQRVSTTLSQNNNSNFAWTGATKYHLNGRDSLVNPGVAMATHKDDEERFFPSSGVLMFGKQGAGKDNVDYSSVMLTSEEEIKTTNPVATEQYGVVADNLQQTNGAPIVGTVNSQGALPGMVWQNRDVYLQGPIWAKIPHTDGNFHPSPLMGGFGLKHPPPQILIKNTPVPADPPTTFSQAKLASFITQYSTGQVSVEIEWELQKENSKRWNPEIQYTSNYYKSTNVDFAVNTEGTYSEPRPIGTRYLTRNL

SEQ ID NO: 419 - protein, 738 aa, Artificial Sequence; identical to SEQ ID NO: 80
  source: /note="Description of Artificial Sequence: Synthetic polypeptide"

SEQ ID NO: 420 - protein, 728 aa, Artificial Sequence
  source: /note="Description of Artificial Sequence: Synthetic polypeptide"
MAADGYLPDWLEDNLSEGIREWWDLKPGAPKPKANQQKQDDGRGLVLPGYKYLGPFNGLDKGEPVNEADAAALEHDKAYDKQLEQGDNPYLKYNHADAEFQERLQEDTSFGGNLGRAVFQAKKRVLEPLGLVEEGAKTAPGKKRPIESPDSSTGIGRKGQQPAKKKLNFGQTGDSESVPDPQPIGEPPAGPSGLGSGTMAAGGGAPMADNNEGADGVGNASGNWHCDSTWLGDRVITTSTRTWALPTYNNHLYKQISSQSGATNDNHFFGYSTPWGYFDFNRFHCHFSPRDWQRLINNNWGFRPRKLRFKLFNIQVKEVTTNDGVTTIANNLTSTIQVFSDSEYQLPYVLGSAHQGCLPPFPADVFMIPQYGYLTLNNGSQSVGRSSFYCLEYFPSQMLRTGNNFEFSYTFEEVPFHSSYAHSQSLDRLMNPLIDQYLYYLARTQSTTGSTRELQFHQAGPNTMAEQSKNWLPGPCYRQQRLSKNIDSNNNSNFAWTGATKYHLNGRNSLTNPGVAMATNKDDEDQFFPINGVLVFGKTGAANKTTLENVLMTSEEEIKTTNPVATEEYGVVSSNLQSSTAGPQTQTVNSQGALPGMVWQNRDVYLQGPIWAKIPHTDGNFHPSPLMGGFGLKHPPPQILIKNTPVPANPPEVFTPAKFASFITQYSTGQVSVEIEWELQKENSKRWNPEIQYTSNYAKSNNVEFAVNNEGVYTEPRPIGTRYLTRNL

SEQ ID NO: 421 - DNA, 2489 bp, Artificial Sequence
  source: /note="Description of Artificial Sequence: Synthetic polynucleotide"
gaattcgccctttctacggctgcgtcaactggaccaatgagaactttcccttcaacgattgcgtcgacaagatggtgatctggtgggaggagggcaagatgacggccaaggtcgtgaagtccgccaaggccattcatcatctgctggggcgggctcccgagattgcttgctcggcctgcgatctggtcaacgtggacctggatgactgtgtttctgagcaataaatgacttaaaccaggtatggctgccgatggttatcttccagattggctcgaggacaacctctctgagggcattcgcgagtggtgggacttgaaacctggagccccgaaacccaaagccaaccagcaaaagcaggacgacggccggggtctggtgcttcctggctacaagtacctcggacccttcaacggactcgacaagggagagccggtcaacgaggcagacgccgcggccctcgagcacgacaaggcctacgacaagcagctcgagcagggggacaacccgtacctcaagtacaaccacgccgacgccgagtttcaggagcgtcttcaagaagatacgtcttttgggggcaacctcgggcgagcagtcttccaggccaagaagcgggttctcgaacctctcggtctggttgaggaaggcgctaagacggctcctggaaagaagagacccatagaatcccccgactcctccacgggcatcggcaggaaaggccagcagcccgctaaaaagaagctcaactttgggcagactggcgactcagagtcagtgcccgaccctcaaccaatcggagaaccccccgcaggcccctctggtctgggatctggtacaatggctgcaggcggtggcgctccaatggcagacaataacgaaggcgccgacggagtgggtaatgcctccggaaattggcattgcgattccacatggctgggcgacagagtcatcaccaccagcacccgcacctgggccctgcccacctacaacaaccacctctacaagcagatatcaagtcagagcggggctaccaacgacaaccacttcttcggctacagcaccccctggggctattttgacttcaacagattccactgccacttctcaccacgtgactggcagcgactcatcaacaacaactggggattccggcccagaaagctgcggttcaagttgttcaacatccaggtcaaggaggtcacgacgaacgacggcgttacgaccatcgccaataaccttaccagcacgattcaggtcttctcggactcggagtaccaactgccgtacgtcctcggctctgcgcaccagggctgcctccctccgttccctgcggacgtgttcatgattcctcagtacggatatctgactctaaacaacggcagtcagtctgtgggacgttcctccttctactgcctggagtactttccttctcagatgctgagaacgggcaataactttgaattcagctacacctttgaggaagtgcctttccacagcagctatgcgcacagccagagcctggaccggctgatgaatcccctcatcgaccagtacctgtactacctggcccggacccagagcactacggggtccacaagggagctgcagttccatcaggctgggcccaacaccatggccgagcaatcaaagaactggctgcccggaccctgttatcggcagcagagactgtcaaaaaacatagacagcaacaacaacagtaactttgcctggaccggggccactaaataccatctgaatggtagaaattcattaaccaacccgggcgtagccatggccaccaacaaggacgacgaggaccagttctttcccatcaacggagtgctggtttttggcaaaacgggggctgccaacaagacaacgctggaaaacgtgctaatgaccagcgaggaggagatcaaaaccaccaatcccgtggctacagaagaatacggtgtggtctccagcaacctgcaatcgtctacggccggaccccagacacagactgtcaacagccagggggctctgcccggcatggtctggcagaaccgggacgtgtacctgcagggtcccatctgggccaaaattcctcacacggacggcaactttcacccgtctcccctgatgggcggatttggactcaaacacccgcctcctcaaattctcatcaaaaacaccccggtacctgctaatcctccagaggtgtttactcctgccaagtttgcctcatttatcacgcagtacagcaccggccaggtcagcgtggagatcgagtgggaactgcagaaagaaaacagcaaacgctggaatccagagattcagtacacctcaaattatgccaagtctaataatgtggaatttgctgtcaacaacgaaggggtttatactgagcctcgccccattggcacccgttacctcacccgtaacctgtaattgcctgttaatcaataaaccggttaattcgtttcagttgaactttggtcaagggcgaattc

SEQ ID NO: 422 - protein, 728 aa, Artificial Sequence
  source: /note="Description of Artificial Sequence: Synthetic polypeptide"
MAADGYLPDWLEDNLSEGIREWWDLKPGAPKPKANQQKQDDGRGLVLPGYKYLGPFNGLDKGEPVNAADAAALEHDKAYDQQLKAGDNPYLRYNHADAEFQERLQEDTSFGGNLGRAVFQAKKRVLEPLGLVEEGAKTAPGKKRPIESPDSSTGIGKKGQQPAKKKLNFGQTGDSESVPDPQPIGEPPAGPSGLGSGTMAAGGGAPMADNNEGADGVGNASGNWHCDSTWLGDRVITTSTRTWALPTYNNHLYKQISSQSGATNDNHFFGYSTPWGYFDFNRFHCHFSPRDWQRLINNNWGFRPRKLRFKLFNIQVKEVTTNDGVTTIANNLTSTIQVFSDSEYQLPYVLGSAHQGCLPPFPADVFMIPQYGYLTLNNGSQSVGRSSFYCLEYFPSQMLRTGNNFEFSYTFEEVPFHSSYAHSQSLDRLMNPLIDQYLYYLARTQSTTGSTRELQFHQAGPNTMAEQSKNWLPGPCYRRQRLSKDIDSNNNSNFAWTGATKYHLNGRNSLTNPGVAMATNKDDEDQFFPINGVLVFGKTGAANKTTLENVLMTSEEEIKTTNPVATEEYGVVSSNLQSSTAGPQTQTVNSQGALPGMVWQNRDVYLQGPIWAKIPHTDGNFHPSPLMGGFGLKHPPPQILIKNTPVPANPPEVFTPAKFASFITQYSTGQVSVEIEWELQKENSKRWNPEIQYTSNYAKSNNVEFAVNNEGVYTEPRPIGTRYLTRNL

SEQ ID NO: 423 - DNA, 3098 bp, Artificial Sequence
  source: /note="Description of Artificial Sequence: Synthetic polynucleotide"
gaattcgccctttctacggctgcgtcaactggaccaatgagaactttcccttcaacgattgcgtcgacaagatggtgatctggtgggaggagggcaagatgacggccaaggtcgtggagtccgccaaggccattctcggcggcagcaaggtgcgcgtggaccaaaagtgcaagtcttccgcccagatcgatcccacccccgtgatcgtcacttccaacaccaacatgtgcgccgtgattgacgggaacagcaccaccttcgagcaccagcagccgttacaagaccggatgttcaaatttgaactcacccgccgtctggagcacgactttggcaaggtgacaaagcaggaagtcaaagagttcttccgctgggcgcaggatcacgtgaccgaggtggcgcatgagttctacgtcagaaagggtggagccaacaagagacccgcccccgatgacgcggataaaagcgagcccaagcgggcctgcccctcagtcgcggatccatcgacgtcagacgcggaaggagctccggtggactttgccgacaggtaccaaaacaaatgttctcgtcacgcgggcatgcttcagatgctgtttccctgcaagacatgcgagagaatgaatcagaatttcaacatttgcttcacgcacgggaccggagactgttcagaatgtttccccggcgtgtcagaatctcaaccggtcgtcagaaagaggacgtatcggaaactctgtgccattcatcatctgctggggcgggctcccgagattgcttgctcggcctgcgatctggtcaacgtggacctggatgactgtgtttctgagcaataaatgacttaaaccaggtatggctgccgatggttatcttccagattggctcgaggacaacctctctgagggcattcgcgagtggtgggacttgaaacctggagccccgaaacccaaagccaaccagcaaaagcaggacgacggccggggtctggtgcttcctggctacaagtacctcggacccttcaacggactcgacaagggagagccggtcaacgcggcggacgcagcggccctcgagcacgacaaggcctacgaccagcagctcaaagcgggtgacaatccgtacctgcggtataaccacgccgacgccgagtttcaggagcgtcttcaagaagatacgtcttttgggggcaacctcgggcgagcagtcttccaggccaagaagcgggttctcgaacctctcggtctggttgaggaaggcgctaagacggctcctggaaagaagagacccatagaatcccccgactcctccacgggcatcggcaagaaaggccagcagcccgctaaaaagaagctcaactttgggcagactggcgactcagagtcagtgcccgaccctcaaccaatcggagaaccccccgcaggcccctctggtctgggatctggtacaatggctgcaggcggtggcgctccaatggcagacaataacgaaggcgccgacggagtgggtaatgcctccggaaattggcattgcgattccacatggctgggcgacagagtcatcaccaccagcacccgcacctgggccctgcccacctacaacaaccacctctacaagcagatatcaagtcagagcggggctaccaacgacaaccacttcttcggctacagcaccccctggggctattttgacttcaacagattccactgccacttctcaccacgtgactggcagcgactcatcaacaacaactggggattccggcccagaaagctgcggttcaagttgttcaacatccaggtcaaggaggtcacgacgaacgacggcgttacgaccatcgctaataaccttaccagcacgattcaggtcttctcggactcggagtaccaactgccgtacgtcctcggctctgcgcaccagggctgcctccctccgttccctgcggacgtgttcatgattcctcagtacggatatctgactctaaacaacggcagtcagtctgtgggacgttcctccttctactgcctggagtactttccttctcagatgctgagaacgggcaataactttgaattcagctacacctttgaggaagtgcctttccacagcagctatgcgcacagccagagcctggaccggctgatgaatcccctcatcgaccagtacctgtactacctggcccggacccagagcactacggggtccacaagggagctgcagttccatcaggctgggcccaacaccatggccgagcaatcaaagaactggctgcccggaccctgttatcggcggcagagactgtcaaaagacatagacagcaacaacaacagtaactttgcctggaccggggccactaaataccatctgaatggtagaaattcattaaccaacccgggcgtagccatggccaccaacaaggacgacgaggaccagttctttcccatcaacggagtgctggtttttggcaaaacgggggctgccaacaagacaacgctggaaaacgtgctaatgaccagcgaggaggagatcaaaaccaccaatcccgtggctacagaagaatacggtgtggtctccagcaacctgcaatcgtctacggccggaccccagacacagactgtcaacagccagggggctctgcccggcatggtctggcagaaccgggacgtgtacctgcagggtcccatctgggccaaaattcctcacacggacggcaactttcacccgtctcccctgatgggcggatttggactcaaacacccgcctcctcaaattctcatcaaaaacaccccggtacctgctaatcctccagaggtgtttactcctgccaagtttgcctcatttatcacgcagtacagcaccggccaggtcagcgtggagatcgagtgggaactgcagaaagagaacagcaaacgctggaatccagagattcagtacacctcaaattatgccaagtctaataatgtggaatttgctgtcaacaacgaaggggtttatactgagcctcgccccattggcacccgttacctcacccgtaacctgtaattacttgttaatcaataaaccggttgattcgtttcagttgaactttggtctctgcgaagggcgaattc

SEQ ID NO: 424 - protein, 685 aa, Artificial Sequence
  source: /note="Description of Artificial Sequence: Synthetic polypeptide"
MAADGYLPDWLEDNLSEGIREWWDLKPGAPKPKANQQKQDDGRGLVLPGYKYLGPFNGLDKGEPVNEADAAALEHDKAYDKQLEQGDNPYLKYNHADAEFQERLQEDTSFGGNLGRAVFQAKKRVLEPLGLVEEGAKTAPGKKRPVEPSPQRSPDSSTGIGKTGQQPAKKRLNFGQTGDSESVPDPQPIGEPPAGPSGLGSGTMAAGGGAPMADNNEGADGVGSSSGNWHCDSTWLGDRVITTSTRTWALPTYNNHLYKQISNGTSGGSTNDNTYFGYSTPWGYFDFNRFHCHFSPRDWQRLINNNWGFRPKRLNFKLFNIQVKEVTQNEGTKTIANNLTSTIQVFTDSEYQLPYVLGSAHQGCLPPFPADVFMIPQYGYLTLNNGSQAVGRSSFYCLEYFPSQMLRTGNNFEFSYQFEDVPFHSSYAHSQSLDRLTNPLIDQYLYYLARTQSTTGSTRGLQFHQAGPNTMAEQSKNWLPGPCYRQQRLSKNIDSNNNSNFAWTGATKYHLNGRNSLTNPGVAMATNKDDEDQFFPINGVLVFGKTGAANKTTLENVLMTSEEEIKTTNPVATEEYGVVSSNLQSSTAGPQTQTVNSQGALPGMVWQNRDVYLQGPIWAKIPHTDGNFHPSPLMGGFGLKHPPPQILIKYTSNYYKSTNVDFAVNTEGTYSEPRPIGTRYLTRNL

SEQ ID NO: 425 - DNA, 2969 bp, Artificial Sequence
  source: /note="Description of Artificial Sequence: Synthetic polynucleotide"
gaattcgccctttctacggctgcgtcaactggaccaatgagaactttcccttcaacgattgcgtcgacaagatggtgatctggtgggaggagggcaagatgacggccaaggtcgtggagtccgccaaggccattctcggcggcagcaaggtgcgcgtggaccaaaagtgcaagtcgtccgcccagatcgaccccacccccgtgatcgtcacctccaacaccaacatgtgcgccgtgattgacgggaacagcaccaccttcgagcaccagcagccgttacaagaccggatgttcaaatttgaactcacccgccgtctggagcacgactttggcaaggtgacaaagcaggaagtcaaagagttcttccgctgggcgcaggatcacgtgaccgaggtggcgcatgagttctacgtcagaaagggtggagccaacaagagacccgcccccgatgacgcggataaaagcgagcccaagcgggcctgcccctcagtcgcggatccatcgacgtcagacgcggaaggagctccggtggactttgccgacaggtaccaaaacaaatgttctcgtcacgcgggcatgcttcagatgctgtttccctgcaagacatgcgagagaatgaatcagaatttcaacatttgcttcacgcacgggaccagagactgttcagaatgtttccccggcgtgtcagaatctcaaccggtcgtcagaaagaggacgtatcggaaactctgtgccattcatcatctgctggggcgggctcccgagattgcttgctcggcctgcgatctggtcaacgtggacctggatgactgtgtttctgagcaataaatgacttaaaccaggtatggctgccgatggttatcttccagattggctcgaggacaacctctctgagggcatccgcgagtggtgggacttgaaacctggagccccgaaacccaaagccaaccagcaaaagcaggacgacggccggggtctggtgcttcctggctacaagtacctcggacccttcaacggactcgacaagggagagccggtcaacgaggcagacgccgcggccctcgagcacgacaaggcctacgacaagcagctcgagcagggggacaacccgtacctcaagtacaaccacgccgacgccgagtttcaggagcgtcttcaagaagatacgtcttttgggggcaacctcgggcgagcagtcttccaggccaagaagcgggttctcgaacctctcggtctggttgaggaaggcgctaagacggctcctggaaagaagagaccggtagagccatcaccccagcgttctccagactcctctacgggcatcggcaagacaggccagcagcccgcgaaaaagagactcaactttgggcagactggcgactcagagtcagtgcccgaccctcaaccaatcggagaaccccccgcaggcccctctggtctgggatctggtacaatggctgcaggcggtggcgctccaatggcagacaataacgaaggcgccgacggagtgggtagttcctcaggaaattggcattgcgattccacatggctgggcgacagagtcatcaccaccagcacccgaacctgggccctccccacctacaacaaccacctctacaagcaaatctccaacgggacatcgggaggaagcaccaacgacaacacctacttcggctacagcaccccctgggggtattttgactttaacagattccactgccacttctcaccacgtgactggcagcgactcatcaacaacaactggggattccggcccaagagactcaacttcaagctcttcaacatccaggtcaaggaggtcacgcagaatgaaggcaccaagaccatcgccaataaccttaccagcacgattcaggtctttacggactcggaataccagctcccgtacgtcctcggctctgcgcaccagggctgcctgcctccgttcccggcggacgtcttcatgattcctcagtacgggtacctgactctgaacaacggcagtcaggccgtgggccgttcctccttctactgcctggagtactttccttctcaaatgctgagaacgggcaacaactttgagttcagctaccagtttgaggacgtgccttttcacagcagctacgcgcacagccaaagcctggaccggctgacgaaccccctcatcgaccagtacctgtactacctggcccggacccagagcactacggggtccacaagggggctgcagttccatcaggctgggcccaacaccatggccgagcaatcaaagaactggctgcccggaccctgttatcggcagcagagactgtcaaaaaacatagacagcaacaacaacagtaactttgcctggaccggggccactaaataccatctgaatggtagaaattcattaaccaacccgggcgtagccatggccaccaacaaggacgacgaggaccagttctttcccatcaacggagtgctggtttttggcaaaacgggggctgccaacaagacaacgctggaaaacgtgctaatgaccagcgaggaggagatcaaaaccaccaatcccgtggctacagaagaatacggtgtggtctccagcaacctgcaatcgtctacggccggaccccagacacagactgtcaacagccagggggctctgcccggcatggtctggcagaaccgggacgtgtacctgcagggtcccatctgggccaaaattcctcacacggacggcaactttcacccgtctcccctgatgggcggatttggactcaaacacccgcctcctcaaattctcatcaagtatacttccaactactacaaatctacaaatgtggactttgctgtcaatactgagggtacttattcagagcctcgccccattggcacccgttacctcacccgtaacctgtaattgcctgttaatcaataaaccggttaattcgtttcagttgaactttggtctctgcgaagggcgaattc

SEQ ID NO: 426 - protein, 733 aa, Artificial Sequence
  source: /note="Description of Artificial Sequence: Synthetic polypeptide"
MAADGYLPDWLEDNLSEGIREWWDLKPGAPKPKANQQKQDDGRGLVLPGYKYLGPFNGLDKGEPVNAADAAALEHDKAYDQQLKAGDNPYLRYNHADAEFQERLQEDTSFGGNLGRAVFQAKKRVLEPLGLVEEGAKTAPGKKRPIESPDSSTGIGKKGQQPAKKKLNFGQTGDSESVPDPQPIGEPPAGPSGLGSGTMAAGGGAPMADNNEGADGVGSSSGNWHCDSTWLGDRVITTSTRTWALPTYNNHLYKQISNGTSGGSTNDNTYFGYSTPWGYFDFNRFHCHFSPRDWQRLINNNWGFRPKRLNFKLFNIQVKEVTQNEGTKTIANNLTSTIQVFTDSEYQLPYVLGSAHQGCLPPFPADVFMIPQYGYLTLNNGSQAVGRSSFYCLEYFPSQMLRTGNNFEFSYQFEDVPFHSSYAHSQSLDRLMNPLIDQYLYYLSRTQSTGGTAGTQQLLFSQAGPNNMSAQAKNWLPGPCYRQQRVSTTVSQNNNSNFAWTGATKYHLNGRDSLVNPGVAMATHKGDEERFFPSSGVLMFGKQGAGKDNVDYSSVMLTSEEEIKTTNPVATEQYGVVADNLQQQNAAPIVGAVNSQGALPGMVWQNRDVYLQGPIWAKIPHTDGNFHPSPLMGGFGLKHPPPQILIKNTPVPADPPTTFSQAKLASFITQYSTGQVSVEIEWELQKENSKRWNPEIQYTSNYYKSTNVDFAVNTEGTYSEPRPIGTRYLTRSL

SEQ ID NO: 427 - DNA, 3113 bp, Artificial Sequence
  source: /note="Description of Artificial Sequence: Synthetic polynucleotide"
gaattcgccctttctacggctgcgtcaactggaccaatgagaactttcccttcaacgattgcgtcgacaagatggtgatctggtgggaggagggcaagatgacggccaaggtcgtggagtccgccaaggccattctcggcggcagcaaggtgcgcgtggaccaaaagtgcaagtcgtccgcccagatcgatcccacccccgtgatcgtcacttccaacaccaacatgtgcgccgtgattgacgggaacagcaccaccttcgagcaccagcagccgttacaagaccggatgttcaaatttgaactcacccgccgtctggagcatgactttggcaaggtgacaaagcaggaagtcaaagagttcttccgctgggcgcaggatcacgtgaccgaggtggcgcatgagttctacgtcagaaagggtggagccaacaagagacccgcccccgatgacgcggataaaagcgagcccaagcgggcctgcccctcagtcgcggatccatcgacgtcagacgcggaaggagctccggtggactttgccgacaggtaccaaaacaaatgttctcgtcacgcgggcatgcttcagatgctgtttccctgcaagacatgcgagagaatgaatcagaatttcaacatttgcttcacgcacgggaccagagactgttcagaatgtttccccggcgtgtcagaatctcaaccggtcgtcagaaagaggacgtatcggaaactctgtgccattcatcatctgctggggcgggctcccgagattgcttgctcggcctgcgatctggtcaacgtggacctggatgactgtgtttctgagcaataaatgacttaaaccaggtatggctgccgatggttatcttccagattggctcgaggacaacctctctgagggcattcgcgagtggtgggacttgaaacctggagccccgaaacccaaagccaaccagcaaaagcaggacgacggccggggtctggtgcttcctggctacaagtacctcggacccttcaacggactcgacaagggggagcccgtcaacgcggcggacgcagcggccctcgagcacgacaaggcctacgaccagcagctcaaagcgggtgacaatccgtacctgcggtataaccacgccgacgccgagtttcaggagcgtcttcaagaagatacgtcttttgggggcaacctcgggcgagcagtcttccaggccaagaagcgggttctcgaacctctcggtctggttgaggaaggcgctaagacggctcctggaaagaagagacccatagaatcccccgactcctccacgggcatcggcaagaaaggccagcagcccgctaaaaagaagctcaactttgggcagactggcgactcagagtcagtgcccgaccctcaaccaatcggagaaccccccgcaggcccctctggtctgggatctggtacaatggctgcaggcggtggcgctccaatggcagacaataacgaaggcgccgacggagtgggtagttcctcaggaaattggcattgcgattccacatggctgggcgacagagtcatcaccaccagcacccgaacctgggccctccccacctacaacaaccacctctacaagcaaatctccaacgggacatcgggaggaagcaccaacgacaacacctacttcggctacagcaccccctgggggtattttgactttaacagattccactgccacttctcaccacgtgactggcagcgactcatcaacaacaactggggattccggcccaagagactcaacttcaagctcttcaacatccaggtcaaggaggtcacgcagaatgaaggcaccaagaccatcgccaataaccttaccagcacgattcaggtctttacggactcggaataccagctcccgtacgtcctcggctctgcgcaccagggctgcctgcctccgttcccggcggacgtcttcatgattcctcagtacgggtacctgactctgaacaacggcagtcaggccgtgggccgttcctccttctactgcctggagtactttccttctcaaatgctgagaacgggcaacaactttgagttcagctaccagtttgaggacgtgccttttcacagcagctatgcgcacagccaaagcctggaccggctgatgaaccccctcatcgaccagtacctgtactacctgtctcggactcagtccacgggaggtaccgcaggaactcagcagttgctattttctcaggccgggcctaataacatgtcggctcaggccaaaaactggctacccgggccctgctaccggcagcaacgcgtctccacgacagtgtcgcaaaataacaacagcaactttgcttggaccggtgccaccaagtatcatctgaatggcagagactctctggtaaatcccggtgtcgctatggcaacgcacaagggcgacgaagagcgattttttccatccagcggagtcttgatgtttgggaaacagggagctggaaaagacaacgtggactatagcagcgttatgctaaccagtgaggaagaaatcaaaaccaccaacccagtggccacagaacagtacggcgtggtggccgataacctgcaacagcaaaacgccgctcctattgtaggggccgtcaacagtcaaggagccttacctggcatggtctggcagaaccgggacgtgtacctgcagggtcctatctgggccaagattcctcacacggacggcaactttcatccttcgccgctgatgggaggctttggactgaaacacccgcctcctcagatcctgattaagaatacacctgttcccgcggatcctccaactaccttcagtcaagccaagctggcgtcgttcatcacgcagtacagcaccggacaggtcagcgtggaaattgaatgggagctgcagaaagagaacagcaagcgctggaacccagagattcagtatacttccaactactacaaatctacaaatgtggactttgctgtcaatactgagggtacttattcagagcctcgccccattggcacccgttacctcacccgtagcctgtaattgcctgttaatcaataaaccggttgattcgtttcagttgaactttggtctctgcgaagggcgaattc

SEQ ID NO: 428 - protein, 738 aa, Artificial Sequence
  source: /note="Description of Artificial Sequence: Synthetic polypeptide"
MAADGYLPDWLEDNLSEGIREWWDLKPGAPKPKANQQKQDDGRGLVLPGYKYLGPFNGLDKGEPVNAADAAALEHDKAYDQQLKAGDNPYLRYNHADAEFQERLQEDTSFGGNLGRAVFQAKKRVLEPLGLVEEGAKTAPGKKRPVEPSPQRSPDSSTGIGKTGQQPAKKRLNFGQTGDSESVPDPQPIGEPPAGPSGLGSGTMAAGGGAPMADNNEGADGVGSSSGNWHCDSTWLGDRVITTSTRTWALPTYNNHLYKQISNGTSGGSTNDNTYFGYSTPWGYFDFNRFHCHFSPRDWQRLINNNWGFRPKRLNFKLFNIQVKEVTQNEGTKTIANNLTSTIQVFTDSEYQLPYVLGSAHQGCPPPFPADVFMIPQYGYLTLNNGSQAVGRSSFYCLEYFPSQMRRTGNNFEFSYQFEDVPFHSSYAHSQSLDRLMNPLIDQYLYYLSRTQSTGGTAGTQQLLFSQAGPNNMSAQAKNWLPGPCYRQQRVSTTLSQNNNSNFAWTGATKYHLNGRDSLVNPGVAMATHKDDEERFFPSSGVLMFGKQGAGKDNVDYSSVMLTSEEEIKTTNPVATEQYGVVADNLQQQNAAPIVGAVNSQGALPGMVWQNRDVYLQGPIWAKIPHTDGNFHPSPLMGGFGLKHPPPQILIKNTPVPADPPTTFSQAKLASFITQYSTGQVSVEIEWELQKENSKRWNPEIQYTSNYYKSTNVDFAVNTEGTYSEPRPIGTRYLTRNL

SEQ ID NO: 429 - DNA, 3128 bp, Artificial Sequence
  source: /note="Description of Artificial Sequence: Synthetic polynucleotide"
gaattcgccctttctacggctgcgtcaactggaccaatgagaactttcccttcaacgattgcgtcgacaagatggtgatctggtgggaggagggcaagatgacggccaaggtcgtggagtccgccaaggccattctcggcggcagcaaggtgcgcgtggaccaaaagtgcaagtcgtccgcccagatcgaccccacccccgtgatcgtcacctccaacaccaacatgtgcgccgtgattgacgggaacagcaccaccttcgagcaccagcagccgttgcaggaccggatgttcaaatttgaactcacccgccgtctggagcatgactttggcaaggtgacaaagcaggaagtcaaagagttcttccgctgggcgcaggatcacgtgaccgaggtggcgcatgagttctacgtcagaaagggtggagccaacaagagacccgcccccgatgacgcggataaaagcgagcccaagcgggcctgcccctcagtcgcggatccatcgacgtcagacgcggaaggagctccggtggactttgccgacaggtaccaaaacaaatgttctcgtcacgcgggcatgcttcagatgctgtttccctgcaagacatgcgagagaatgaatcagaatttcaacatttgcttcacgcgcgggaccagagactgttcagaatgtttcccgggcgtgtcagaatctcaaccggtcgtcagaaagaggacgtatcggaaactctgtgccattcatcatctgctggggcgggctcccgagattgcttgctcggcctgcgatctggtcaacgtggacctggatgactgtgtttctgagcaataaatgacttaaaccaggtatggctgccgatggttatcttccagattggctcgaggacaacctctctgagggcattcgcgagtggtgggacttgaaacctggagccccgaaacccaaagccaaccagcaaaagcaggacgacggccggggtctggtgcttcctggctacaagtacctcggacccttcaacggactcgacaagggggagcccgtcaacgcggcggacgcagcggccctcgagcacgacaaggcctacgaccagcagctcaaagcgggtgacaatccgtacctgcggtataaccacgccgacgccgagtttcaggagcgtctgcaagaagatacgtcttttgggggcaacctcgggcgagcagtcttccaggccaagaagcgggttctcgaacctctcggtctggttgaggaaggcgctaagacggctcctggaaagaagagaccggtagagccatcaccccagcgttctccagactcctctacgggcatcggcaagacaggccagcagcccgcgaaaaagagactcaactttgggcagactggcgactcagagtcagtgcccgaccctcaaccaatcggagaaccccccgcaggcccctctggtctgggatctggtacaatggctgcaggcggtggcgctccaatggcagacaataacgaaggcgccgacggagtgggtagttcctcaggaaattggcattgcgattccacatggctgggcgacagagtcatcaccaccagcacccgaacctgggccctccccacctacaacaaccacctctacaagcaaatctccaacgggacatcgggaggaagcaccaacgacaacacctacttcggctacagcaccccctgggggtattttgactttaacagattccactgccacttctcaccacgtgactggcagcgactcatcaacaacaactggggattccggcccaagagactcaacttcaagctcttcaacatccaggtcaaggaggtcacgcagaatgaaggcaccaagaccatcgccaataaccttaccagcacgattcaggtctttacggactcggaataccagctcccgtacgtcctcggctctgcgcaccagggctgcccgcctccgttcccggcggacgtcttcatgattcctcagtacgggtacctgactctgaacaacggcagtcaggccgtgggccgttcctccttctactgcctggagtactttccttctcaaatgcggagaacgggcaacaactttgagttcagctaccagtttgaggacgtgccttttcacagcagctacgcgcatagccaaagcctggaccggctgatgaaccccctcatcgaccagtacctgtactacctgtctcggactcagtccacgggaggtaccgcaggaactcagcagttgctattttctcaggccgggcctaataacatgtcggctcaggccaaaaactggctacccgggccctgctaccggcagcaacgcgtctccacgacactgtcgcaaaataacaacagcaactttgcttggaccggtgccaccaagtatcatctgaatggcagagactctctggtaaatcccggtgtcgctatggcaacgcacaaggacgacgaagagcgattttttccatccagcggagtcttgatgtttgggaaacagggagctggaaaagacaacgtggactatagcagcgttatgctaaccagtgaggaagaaatcaaaaccaccaacccagtggccacagaacagtacggcgtggtggccgataacctgcaacagcaaaacgccgctcctattgtaggggccgtcaacagtcaaggagccttacctggcatggtctggcagaaccgggacgtgtacctgcagggtcctatctgggccaagattcctcacacggacggcaactttcatccttcgccgctgatgggaggctttggactgaaacacccgcctcctcagatcctgattaagaatacacctgttcccgcggatcctccaactaccttcagtcaagccaagctggcgtcgttcatcacgcagtacagcaccggacaggtcagcgtggaaattgaatgggagctgcagaaagagaacagcaagcgctggaacccagagattcagtatacttccaactactacaaatctacaaatgtggactttgctgtcaatactgagggtacttattcagagcctcgccccattggcacccgttacctcacccgtaacctgtaattgcctgttaatcaataaaccggttaattcgtttcagttgaactttggtctctgcgaagggcgaattc

SEQ ID NO: 430 - protein, 738 aa, Artificial Sequence; identical to SEQ ID NO: 418
  source: /note="Description of Artificial Sequence: Synthetic polypeptide"

SEQ ID NO: 431 - DNA, 1933 bp, Artificial Sequence
  source: /note="Description of Artificial Sequence: Synthetic polynucleotide"
  modified_base (1302)..(1302): a, c, t, or g
caaggcctacgaccagcagctcaaagcgggtgacaatccgtacctgcggtataaccacgccgacgccgagtttcaggagcgtcttcaagaagatacgtcttttgggggcaacctcgggcgagcagtcttccaggccaaaaagcgggttctcgaacctcttggtctggttgagacgccagctaagacggcacctggaaagaagcgaccggtagactcgccagactccacctcgggcatcggcaagaaaggccagcagcccgcgaaaaagagactcaactttgggcagactggcgactcagagtcagtccccgaccctcaaccaatcggagaaccaccagcaggcccctctggtctgggatctggtacaatggctgcaggcggtggcgcaccaatggctgacaataacgagggcgccgacggagtgggtaatgcctcaggaaattggcattgcgattccacatggctgggcgacagagtcatcaccaccagcacccgaacctgggccctgcccacctacaacaaccacctctacaagcaaatctccagtcagtcagcagggagcaccaacgataacgtctatttcggctacagcaccccctgggggtattttgacttcaacagattccattgccacttctcaccacgtgactggcagcgacttatcaacaacaactggggattccggcccaagaagctcaacttcaagctcttcaacatccaggtcaaggaggtcacgacgaatgacggtgtcacaaccatcgctaataaccttaccagcacggttcaggtcttttcggactcggaatatcaactgccgtacgtcctcggctccgcgcaccagggctgcctgcctccgttcccggcagacgtgttcatgattccgcagtacggatacctgactctgaacaatggcagccaatcggtaggccgttcctccttctactgcctggagtactttccttctcagatgctgagaacgggcaacaacttcacctttagctacaccttcgaggacgtgcctttccacagcagctacgcgcacagccagagtctggaccggctgatgaatcccctcatcgaccagtacctgtactacttggccagaacacagagcaacgcaggaggtactgctggcaatcgggaactgcagttttatcagggcggacctaccaccatggccgaacaagcaaagaactggctgcccggaccttgcttccggcaacagagagtatccaagacgctggatcaaaataacaacagcaactttgcctggactggtgccacaaaataccatttaaatgnaagaaattcattggttaatcccggtgtcgccatggcaacccacaaggacgacgaggaacgcttcttcccttcgagcggagttctaatttttggcaaaactggagcagctaataaaactacattagaaaacgtgctcatgacaaatgaagaagaaattcgtcctaccaacccggtagctaccgaggaatacgggattgtaagcagcaacttgcaggcggctagcaccgcagcccagacacaagttgttaacaaccagggagccttacctggcatggtctggcagaaccgggacgtgtacctgcaaggtcccatttgggccaagattcctcacacggacggcaactttcacccgtctcctctaatgggtggctttggactgaaacacccgcctccccagatcctgatcaaaaacacaccggtacctgctaatcctccagaagtgtttactcctgccaagtttgcttccttcatcacgcagtacagcaccgggcaagtcagcgttgagatcgagtgggagctgcagaaagagaacagcaagcgctggaacccagagattcagtacacctccaactttgacaaacagactggagtggactttgctgttgacagccagggtgtttactctgagcct

SEQ ID NO: 432 - protein, 733 aa, Artificial Sequence
  source: /note="Description of Artificial Sequence: Synthetic polypeptide"
MAADGYLPDWLEDNLSEGIREWWDLKPGAPKPKANQQKQDDGRGLVLPGYKYLGPFNGLDKGEPVNAADAAALEHDKAYDQQLKAGDNPYLRYNHADAEFQERLQEDTSFGGNLGRAVFQAKKRVLEPLGLVEEGAKTAPGKKRPLESPQEPDSSSGIGKKGKQPAKKRLNFEEDTGAGDGPPEGSDTSAMSSDIEMRAAPGGNAVDAGQGSDGVGNASGDWHCDSTWSEGKVTTTSTRTWVLPTYNNHLYLRLGTTSNSNTYNGFSTPWGYFDFNRFHCHFSPRDWQRLINNNWGLRPKAMRVKIFNIQVKEVTTSNGETTVANNLTSTVQIFADSSYELPYVMDAGQEGSLSPFPNDVFMVPQYGYCGIVTGENQNQTDRNAFYCLEYFPSQMLRTGNNFEMAYNFGKVPFHSMYAYSQSPDRLMNPLLDQYLWHLQSTTSGETLNQGNAATTFGKIRSGDFAFYRKNWLPGPCVKQQRLSKTASQNYKIPASGGNALLKYDTHYTLNNRWSNIAPGPPMATAGPSDGDFSNAQLIFPGPSVTGNTTTSANNLLFTSEEEIAATNPRDTDMFGQIADNNQNATTAPITGNVTAMGVLPGMVWQNRDIYYQGPIWAKIPHADGHFHPSPLIGGFGLKHPPPQIFIKNTPVPANPATTFTAARVDSFITQYSTGQVAVQIEWEIEKERSKRWNPEVQFTSNYGNQSSMLWAPDTTGKYTEPRVIGSRYLTNHL

SEQ ID NO: 433 - DNA, 3105 bp, Artificial Sequence
  source: /note="Description of Artificial Sequence: Synthetic polynucleotide"
gaattcgcccttgctgcgtcaactggaccaatgagaactttcccttcaacgattgcgtcgacaagatggtgatctggtgggaggagggcaagatgaccgccaaggtcgtggagtccgccaaggccattctgggcggaagcaaggtgcgcgtggaccaaaagtgcaagtcatcggcccagatcgaccccacgcccgtgatcgtcacctccaacaccaacatgtgcgccgtgatcgacgggaacagcaccaccttcgagcaccagcagccgctgcaggaccgcatgttcaagttcgagctcacccgccgtctggagcacgactttggcaaggtgaccaagcaggaagtcaaagagttcttccgctgggctcaggatcacgtgactgaggtggcgcatgagttctacgtcagaaagggcggagccaccaaaagacccgcccccagtgacgcggatataagcgagcccaagcgggcctgcccctcagttgcggagccatcgacgtcagacgcggaagcaccggtggactttgcggacaggtaccaaaacaaatgttctcgtcacgcgggcatgcttcagatgctgtttccctgcaagacatgcgagagaatgaatcagaatttcaacgtctgcttcacgcacggggtcagagactgctcagagtgcttccccggcgcgtcagaatctcaacccgtcgtcagaaaaaagacgtatcagaaactgtgcgcgattcatcatctgctggggcgggcacccgagattgcgtgttcggcccgcgatctcgtcaacgtggacttggatgactgtgtttctgagcaataaatgacttaaaccaggtatggctgctgacggttatcttccagattggctcgaggacaacctctctgagggcattcgcgagtggtgggacctgaaacctggagcccccaagcccaaggccaaccagcagaagcaggacgacggccggggtctggtgcttcctggctacaagtacctcggacccttcaacggactcgacaagggggagcccgtcaacgcggcggacgcagcggccctcgagcacgacaaggcctacgaccagcagctcaaagcgggtgacaatccgtacctgcggtataaccacgccgacgccgagtttcaggagcgtctgcaagaagatacgtcttttgggggcaacctcgggcgagcagtcttccaggccaagaagagggtactcgaacctctgggcctggttgaagaaggtgctaagacggctcctggaaagaagagaccgttagagtcaccacaagagcccgactcctcctcaggaatcggcaaaaaaggcaaacaaccagccaaaaagagactcaactttgaagaggacactggagccggagacggaccccctgaaggatcagataccagcgccatgtcttcagacattgaaatgcgtgcagcaccgggcggaaatgctgtcgatgcgggacaaggttccgatggagtgggtaatgcctcgggtgattggcattgcgattccacctggtctgagggcaaggtcacaacaacctcgaccagaacctgggtcttgcccacctacaacaaccacttgtacctgcggctcggaacaacatcaaacagcaacacctacaacggattctccaccccctggggatactttgactttaacagattccactgtcacttctcaccacgtgactggcaaagactcatcaacaacaactggggactacgaccaaaagccatgcgcgttaaaatcttcaatatccaagttaaggaggtcacaacgtcgaacggcgagactacggtcgctaataaccttaccagcacggttcagatatttgcggactcgtcgtatgagctcccgtacgtgatggacgctggacaagagggaagtctgtctcctttccccaatgacgtcttcatggtgcctcaatatggctactgtggcattgtgactggcgaaaatcagaaccagacggacagaaatgctttctactgcctggagtattttccttcacaaatgctgagaactggcaataactttgaaatggcttacaactttgggaaggtgccgttccactcaatgtatgcttacagccagagcccggacagactgatgaatcccctcctggaccagtacctgtggcacttacagtcgaccacctctggagagactctgaatcaaggcaatgcagcaaccacatttggaaaaatcaggagtggagactttgccttttacagaaagaactggctgcctgggccttgtgttaaacagcagagactctcaaaaactgccagtcaaaattacaagattcctgccagcgggggcaacgctctgttaaagtatgacacccactataccttaaacaaccgctggagcaacatagcgcctggacctccaatggcaacagctggaccttcagatggggacttcagcaacgcccagctcatcttccctggaccatcagtcaccggaaacacaacaacctcagcaaacaatctgttgtttacatcagaagaagaaattgctgccaccaacccaagagacacggacatgtttggtcagattgctgacaataatcagaatgctacaactgctcccataaccggcaacgtgactgctatgggagtgcttcctggcatggtgtggcaaaacagagacatttactaccaagggccaatttgggccaagatcccacacgcggacggacattttcatccttcaccgctaattggcggttttggactgaaacatccgcctccccagatatttatcaaaaacacccccgtacctgccaatcctgcgacaaccttcactgcagccagagtggactctttcatcacacaatacagcaccggccaggtcgctgttcagattgaatgggaaatcgaaaaggaacgctccaaacgctggaatcctgaagtgcagtttacttcaaactatgggaaccagtcttctatgttgtgggctcccgatacaactgggaagtatacagagccgcgggttattggctctcgttatttgactaatcatttgtaactgcctagttaatcaataaaccgtgtgattcgtttcagttgaactttggtctctgcgaagggcgaattc

SEQ ID NO: 434 - protein, 733 aa, Artificial Sequence
  source: /note="Description of Artificial Sequence: Synthetic polypeptide"
MAADGYLPDWLEDNLSEGIREWWDLKPGAPKPKANQQKQDDGRGLVLPGYKYLGPFNGLDKGEPVNAADAAALEHDKAYDQQLKAGDNPYLRYNHADAEFQERLQEDTSFGGNLGRAVFQAKKRVLEPLGLVEEGAKTAPGKKRPLESPQEPDSSSGIGKKGKQPAKKRLNFEEDTGAGDGPPEGSDTSAMSSDIEMRAAPGGNAVDAGQGSDGVGNASGDWHCDSTWSEGKVTTTSTRTWVLPTYNNHLYLRLGTTSNSNTYNGFSTPWGYFDFNRFHCHFSPRDWQRLINNNWGLRPKAMRVKIFNIQVKEVTTSNGETTVANNLTSTVQIFADSSYELPYVMDAGQEGSLPPFPNDVFMVPQYGYCGIVTGENQNQTDRNAFYCLEYFPSQMLRTGNNFEMAYNFEKVPFHSMYAHSQSLDRLMNPLLDQYLWHLQSTTSGETLNQGNAATTFGKIRSGDFAFYRKNWLPGPCVKQQRFSKTASQNYKIPASGGNALLKYDTHYTLNNRWSNIAPGPPMATAGPSDGDFSNAQLIFPGPSVTGNTTTSANNLLFTSEEEIAATNPRDTDMFGQIADNNQNATTAPITGNVTAMGVLPGMVWQNRDIYYQGPIWAKIPHADGHFHPSPLIGGFGLKHPPPQIFIKNTPVPANPATTFTAARVDSFITQYSTGQVAVQIEWEIEKERSKRWNPEVQFTSNYGNQSSMLWAPDTTGKYTEPRVIGSRYLTNHL

SEQ ID NO: 435 - DNA, 3105 bp, Artificial Sequence
  source: /note="Description of Artificial Sequence: Synthetic polynucleotide"
gaattcgcccttgctgcgtcaactggaccaatgagaactttcccttcaacgattgcgtcgacaagatggtgatctggtgggaggagggcaagatgaccgccaaggtcgtggagtccgccaaggccattctgggcggaagcaaggtgcgcgtggaccaaaagtgcaagtcatcggcccagatcgaccccacgcccgtgatcgtcacctccaacaccaacatgtgcgccgtgatcgacgggaacagcaccaccttcgagcaccagcagccgctgcaggaccgcatgttcaagttcgagctcacccgccgtctggagcacgactttggcaaggtgaccaagcaggaagtcaaagagttcttccgctgggctcaggatcacgtgactgaggtggcgcatgagttctacgtcagaaagggcggagccaccaaaagacccgcccccagtgacgcggatataagcgagcccaagcgggcctgcccctcagttgcggagccatcgacgtcagacgcggaagcaccggtggactttgcggacaggtaccaaaacaaatgttctcgtcacgcgggcatgcttcagatgctgtttccctgcaagacatgcgagagaatgaatcagaatttcaacgtctgcttcacgcacggggtcagagactgctcagagtgcttccccggcgcgtcagaatctcaacccgtcgtcagaaaaaagacgtatcagaaactgtgcgcgattcatcatctgctggggcgggcacccgagattgcgtgttcggcctgcgatctcgtcaacgtggacttggatgactgtgtttctgagcaataaatgacttaaaccaggtatggctgctgacggttatcttccagattggctcgaggacaacctctctgagggcattcgcgagtggtgggacctgaaacctggagcccccaagctcaaggccaaccagcagaagcaggacgacggccggggtctggtgcttcctggctacaagtacctcggacccttccacggactcgacaagggggagcccgtcaacgcggcggacgcagcggccctcgagcacgacaaggcctacgaccagcagctcaaagcgggtgacaatccgtacctgcggtataaccacgccgacgccgagtttcaggagcgtctgcaagaagatacgtcttttgggggcaacctcgggcgagcagtcttccaggccaagaagagggtactcgaaccactgggcctggttgaagaaggtgctaagacggctcctggaaagaagagaccgttagagtcaccacaagagcccgactcctcctcaggaatcggcaaaaaaggcaaacaaccagccaaaaagagactcaactttgaagaggacactggagccggagacggaccccctgaaggatcagataccagcgccatgtcttcagacattgaaatgcgtgcagcaccgggcggaaatgctgtcgatgcgggacaaggttccgatggagtgggtaatgcctcgggtgattggcattgcgattccacctggtctgagggcaaggtcacaacaacctcgaccagaacctgggtcttgcccacctacaacaaccacttgtacctgcggctcggaacaacatcaaacagcaacacctacaacggattctccaccccctggggatactttgactttaacagattccactgtcacttctcaccacgtgactggcaaagactcatcaacaacaactggggactacgaccaaaagccatgcgcgttaaaatcttcaatatccaagttaaggaggtcacaacgtcgaacggcgagactacggtcgctaataaccttaccagcacggttcagatatttgcggactcgtcgtatgagctcccgtacgtgatggacgctggacaagagggaagtctgcctcctttccccaatgacgtcttcatggtgcctcaatatggctactgtggcattgtgactggcgaaaatcagaaccagacggacagaaatgctttctactgcctggagtattttccttcacaaatgctgagaactggcaataactttgaaatggcttacaactttgagaaggtgccgttccactcaatgtatgctcacagccagagcctggacagactgatgaatcccctcctggaccagtacctgtggcacttacagtcgaccacctctggagagactctgaatcaaggcaatgcagcaaccacatttggaaaaatcaggagtggagactttgccttttacagaaagaactggctgcctgggccttgtgttaaacagcagagattctcaaaaactgccagtcaaaattacaagattcctgccagcgggggcaacgctctgttaaagtatgacacccactataccttaaacaaccgctggagcaacatagcgcctggacctccaatggcaacagctggaccttcagatggggacttcagcaacgcccagctcatcttccctggaccatcagtcaccggaaacacaacaacctcagcaaacaatctgttgtttacatcagaaggagaaattgctgccaccaacccaagagacacggacatgtttggtcagattgctgacaataatcagaatgctacaactgctcccataaccggcaacgtgactgctatgggagtgcttcctggcatggtgtggcaaaacagagacatttactaccaagggccaatttgggccaagatcccacacgcggacggacattttcatccttcaccgctaattggcggttttggactgaaacatccgcctccccagatatttatcaaaaacacccccgtacctgccaatcctgcgacaaccttcactgcagccagagtggactctttcatcacacaatacagcaccggccaggtcgctgttcagattgaatgggaaatcgaaaaggaacgctccaaacgccggaatcctgaagtgcagtttacttcaaactatgggaaccagtcttctatgttgtgggctcccgatacaactgggaagtatacagagccgcgggttattggctctcgttatttgactaatcatttgtaactgcctagttaatcaataaaccgtgtgattcgtttcagttgaactttggtctctgcgaagggcgaattc

SEQ ID NO: 436 - protein, 733 aa, Artificial Sequence
  source: /note="Description of Artificial Sequence: Synthetic polypeptide"
MAADGYLPDWLEDNLSEGIREWWDLKPGAPKPKANQQKQDDGRGLVLPGYEYLGPFNGLDKGEPVNAADAAALEHDKAYDQQLKAGDNPYLRYNHADAEFQERLQEDTSFGGNLGRAVFQAKKRVLEPLGLVEEGAKTAPGKKRPLESPQEPDSSSGIGKKGKQPAKKRLNFEEDTGAGDGPPEGSDTSAMSSDIEMRAAPGGNAVDAGQGSDGVGNASGDWHCDSTWSEGKVTTTSTRTWVLPTYNNHLYLRLGTTSNSNTYNGFSTPWGYFDFNRFHCHFSPRDWQRLINNNWGLRPKAMRVKIFNIQVKEVTTSNGETTVANNLTSTVQIFADSSYELPYVMDAGQEGSLPPFPNDVFMVPQYGYCGIVTGENQNQTDRNAFYCLEYFPSQMLRTGNNFETAYNFEKVPFHSMYAHSQSLDGLMNPLLDQYLWHLQSTTSGETLNQGNAATTFGKIRSGDFAFYRKNWLPGPCVKQQRFSKTASQNYKIPASGGNALLKYDTHYTLNNRWSNIAPGPPMATAGPSDGDFSNAQLIFPGPSVTGNTTTSANNLLFTSEEEIAATNPRDTDMFGQIADNNQNATTAPITGNVTAMGVLPGMVWQNRDIYYQGPIWAKIPHADGHFHPSPLIGGFGLKHPPPQIFIKNTPVPAYPATTFTAARVDSFITQYSTGQVAVQIEWEIEKERSKRWNPEVQFTSNCGNQSSMLWAPDTTGKYTEPRVIGSRYLTNHL

SEQ ID NO: 437 - DNA, 3105 bp, Artificial Sequence
  source: /note="Description of Artificial Sequence: Synthetic polynucleotide"
gaattcgcccttcgcagagaccaaagttcaactgaaacgaatcacacggtttattgattaactaggcagttacaaatgattagtcaaataacgagagccaataacccgcggctctgtatacttcccagttgtatcgggagcccacaacatagaagactggttcccacagtttgaagtaaactgcacttcaggattccagcgtttggagcgttccttttcgatttcccattcaatctgaacagcgacctggccggtgctgtattgtgtgatgaaagagtccactctggctgcagtgaaggttgtcgcaggataggcaggtacgggggtgtttttgataaatatctggggaggcggatgtttcagtccaaaaccgccaattagcggtgaaggatgaaaatgtccgtccgcgtgtgggatcttggcccaaattggcccttggtagtaaatgtctctgttttgccacaccatgccaggaagcactcccatagcagtcacgttgccggttatgggagcagttgtagcattctgattattgtcagcaatctgaccaaacatgtccgtgtctcttgggttggtggcagcaatttcttcttctgatgtaaacaacagattgtttgctgaggttgttgtgtttccggtgactgatggtccagggaagatgagctgggcgttgctgaagtccccatctgaaggtccagctgttgccattggaggtccaggcgctatgttgctccagcggttgtttaaggtatagtgggtgtcatactttaacagagcgttgcccccgctggcaggaatcttgtaattttgactggcagtttttgagaatctctgctgtttaacacaaggcccaggcagccagttctttctgtaaaaggcaaagtctccactcctgatttttccaaatgtggttgctgcattgccttgattcagagtctctccagaggtggtcgactgtaagtgccacaggtactggtccaggaggggattcatcagtccgtccaggctctggctgtgagcatacattgagtggaacggcaccttctcaaagttgtaagccgtttcaaagttattgccagttctcagcatttgtgaaggaaaatactccaggcagtagaaagcatttctgtccgtctggttctgattttcgccagtcacaatgccacagtagccatattgaggcaccatgaagacgtcattggggaaaggaggcagacttccctcttgtccagcgtccatcacgtacgggagctcatacgacgagtccgcaaatatctgaaccgtgctggtaaggttattagcgaccgtagtctcgccgttcgacgttgtgacctccttaacttggatattgaagattttaacgcgcatggcttttggtcgtagtccccagttgttgttgatgagtctttgccagtcacgtggtgagaagtgacagtggaatctgttaaagtcaaagtatccccagggggtggagaatccgttgtaggtgttgctgtttgatgttgttccgagccgcaggtacaagtggttgttgtaggtgggcaagacccaggttctggtcgaggttgttgtgaccttgccctcagaccaggtggaatcgcaatgccaatcacccgaggcattacccactccatcggaaccttgtcccgcatcgacagcatttccgcccggtgctgcacgcatttcaatgtctgaagacatggcgctggtatctgatccttcagggggtccgtctccggctccagtgtcctcttcaaagttgagtctctttttggctggttgtttgccttttttgccgattcctgaggaggagtcgggctcttgtggtgactctaacggtctcttctttccaggagccgtcttagcaccttcttcaaccaggcccagaggttcgagtaccctcttcttggcctggaagactgctcgcccgaggttgcccccaaaagacgtatcttcttgcagacgctcctgaaactcggcgtcggcgtggttataccgcaggtacggattgtcacccgctttgagctgctggtcgtaggccttgtcgtgctcgagggccgctgcgtccgccgcgttgacgggctcccccttgtcgagtccgttgaagggtccgaggtactcgtagccaggaagcaccagaccccggccgtcgtcctgcttctgctggttggccttgggcttgggggctccaggtttcaggtcccaccactcgcgaatgccctcagagaggttgtcctcgagccaatctggaagataaccgtcagcagccatacctggtttaagtcatttattgctcagaaacacagtcatccaagtccacgttgacgagatcgcaggccgaacacgcaatctcgggtgcccgccccagcagatgatgaatcgcgcacagtttctgatacgtcttttttctgacgacgggttgagattctgacgcgccggggaagcactctgagcagtctctgaccccgtgcgtgaagcagacgttgaaattctgattcattctctcgcatgtcttgcagggaaacagcatctgaagcatgcccgcgtgacgagaacatttgttttggtacctgtccgcaaggtccaccggtgcttccgcgtctgacgtcgatggctccgcaactgaggggcaggcccgcttgggctcgcttatatccgcgtcactgggggcgggtcttttggtggctccgccctttctgacgtagaactcatgcgccacctcagtcacgtgatcctgagcccagcggaagaactctttgacttcctgcttggtcaccttgccaaagtcgtgctccagacggcgggtgagctcgaacttgaacatgcggtcctgcagcggctgctggtgctcgaaggtggtgctgttcccgtcgatcacggcgcacatgttggtgttggaggtgacgatcacgggcgtggggtcgatctgggccgatgacttgcacttttggtccacgcgcaccttgcttccgcccagaatggccttggcggactccacgaccttggcggtcatcttgccctcctcccaccagatcaccatcttgtcgacgcaatcgttgaagggaaagttctcattggtccagttgacgcagcaagggcgaattc

SEQ ID NO: 438 - protein, 729 aa, Artificial Sequence
  source: /note="Description of Artificial Sequence: Synthetic polypeptide"
MAADGYLPDWLEDNLSEGIREWWDLKPGAPKPKANQQKQDDGRGLVLPGYKYLGPFNGLDKGEPVNAADAAALEHDKAYDQQLKAGDNPYLRYNHADAEFQERLQEDTSFGGNLGRAVFQAKKRVLEPLGLVEEGAKTAPGKKRPIDSPDSSTGIGKKGQQPAKKKLNFGQTGDSESVPDPQPLGEPPAAPSSVGSGTMAAGGGAPMADNNEGADGVGNASGNWHCDSTWLGDRVITTSTRTWALPTYNNHLYKQISSSSSGATNDNHYFGYSTPWGYFDFNRFHCHFSPRDWQRLINNNWGFRPKKLRFKLFNIQVKEVTTNDGVTTIANNLTSTVQVFSDSEYQLPYVLGSAHQGCLPPFPADVFMIPQYGYLTLNNGSQSVGRSSFYCLEYFPSQMLRTGNNFEFSYSFEDVPFHSSYAHSQSLDRLMNPLIDQYLYYLARTQSTTGSTRELQFHQAGPNTMAEQSKNWLPGPCYRQQGLSKNLDFNNNSNFAWTAATKYHLNGRNSLTNPGIPMATNKDDEDQFFPINGVLVFGKTGAANKTTLENVLMTSEEEIKTTNPVATEEYGVVSSNLQPSTAGPQSQTINSQGALPGMVWQNRDVYLQGPIWAKIPHTDGNFHPSPLMGGFGLKHPPPQILIKNTPVPANPPEVFTPAKFASFITQYSTGQVSVEIEWELQKENSKRWNPEIQYTSNYAKSNNVEFAVNPDGVYTEPRPIGTRYLPRNL

SEQ ID NO: 439 - DNA, 3094 bp, Artificial Sequence
  source: /note="Description of Artificial Sequence: Synthetic polynucleotide"
gaattcgcccttgctgcgtcaactggaccaagagaactttcccttcaacgattgcgtcgacaagatggtgatctggtgggaggagggcaagatgacggccaaggtcgtggagtccgccaaagccattctgggcggaagcaaggtgcgcgtcgaccaaaagtgcaagtcctcggcccagatcgatcccacccccgtgatcgtcacctccaacaccaacatgtgcgccgtgatcgacgggaacagcaccaccttcgagcaccagcagccgttgcaggaccggatgttcaaatttgaactcacccgccgtctggaacacgactttggcaaggtgaccaagcaggaagtcaaagagttcttccgctgggctagtgatcacgtgactgaggtgacgcatgagttctacgtcagaaagggcggagccagcaaaagacccgcccccgatgacgcggatataagcgagcccaagcgggcctgtccctcagtcacggacccatcgacgtcagacgcggaaggagctccggtggactttgccgacaggtaccaaaacaaatgttctcgtcacgcgggcatgcttcagatgctgtttccctgcaaaacgtgcgagagaatgaatcagaatttcaacatttgcttcacgcacggggtcagagactgtttagaatgtttccccggcgtgtcagaatctcaaccggtcgtcagaaaaaagacgtatcggaagctgtgtgcgattcatcatctgctggggcgggcacccgagattgcttgctcggcctgcgacctggtcaacgtggacctggacgactgtgtttctgagcaataaatgacttaaaccgggtatggctgccgatggttatcttccagattggctcgaggacaacctctctgagggcattcgcgagtggtgggacctgaaacctggagccccgaaacccaaagccaaccagcaaaagcaggacgacggccggggtctggtgcttcctggctacaagtacctcggacccttcaacggactcgacaagggggagcccgtcaacgcggcggacgcagcggccctcgagcacgacaaggcctacgaccagcagctcaaagcgggtgacaatccgtacctgcggtataaccacgccgacgccgagtttcaggagcgtctgcaagaagatacgtcatttgggggcaacctcgggcgagcagtcttccaggccaagaagcgggttctcgaacctctcggtctggttgaggaaggcgctaagacggctcctggaaagaagagacccatagactctccagactcctccacgggcatcggcaaaaaaggccagcagcccgctaaaaagaagctcaattttggtcagactggcgactcagagtcagtccccgaccctcaacctcttggagaacctccagcagcgccctctagtgtgggatctggtacaatggctgcaggcggtggcgcaccaatggcagacaataacgaaggtgccgacggagtgggtaatgcctcaggaaattggcattgcgattccacatggctgggcgacagagtcatcaccaccagcaccagaacctgggccctccccacctacaacaaccacctctacaagcaaatctccagcagcagctcaggagccaccaatgacaaccactacttcggctacagcaccccctgggggtattttgactttaacagattccactgccacttctcaccacgtgactggcagcgactcatcaacaacaactggggattccggcccaagaagctgcggttcaagctcttcaacatccaggtcaaggaggtcacaacgaatgacggcgtcacgaccatcgctaataaccttaccagcacggttcaggtcttctcggactcggaataccagctgccgtacgtcctcggctctgcgcaccagggctgcctgcctccgttcccggcggacgtcttcatgattcctcagtacggctacctgactctgaacaacggcagccaatcggtgggccgttcctccttctactgcctggaatatttcccctctcaaatgctgagaacgggcaacaactttgagttcagttacagcttcgaggacgtgcctttccacagcagctacgcgcacagccagagcctagaccggctgatgaaccctctcatcgaccagtacctgtactacctggcccggacccagagcaccacgggttccaccagggaactgcaatttcatcaagctgggcccaatactatggccgagcagtcaaagaactggctgcctggaccctgctataggcaacagggactgtcaaagaacttggactttaacaacaacagcaattttgcctggactgctgccactaaatatcatctgaatggcagaaactctttgaccaatcctggcattcccatggcaaccaacaaggatgatgaggaccagttctttcccatcaacggggtactggtttttggcaagacgggagctgccaacaaaactacgctggaaaacgttctgatgaccagcgaggaggagatcaagaccactaaccctgtggctacagaagaatacggtgtggtctccagcaacctgcagccgtctacagccgggcctcaatcacagactatcaacagccagggagcactgcctggcatggtctggcagaaccgggacgtgtatctgcagggtcccatctgggccaaaattcctcacacggatggcaactttcacccgtctcctctgatgggcggttttggactcaaacacccgcctccacagatcctgatcaaaaacacacctgtacctgctaatcctccggaggtgtttactcctgccaagtttgcctccttcatcacgcagtacagcaccggacaagtcagcgtggaaatcgagtgggagctgcagaaagaaaacagcaagcgctggaacccagaaattcagtatacttccaattatgccaagtctaataatgttgaatttgctgtgaaccctgatggtgtttatactgagcctcgccccattggcactcgttacctcccccgtaatctgtaattgcttgttaatcaataaaccggttgattcgtttcagttgaactttggtctctgcgaagggcgaattc

SEQ ID NO: 440 - protein, 1458 aa, Artificial Sequence
  source: /note="Description of Artificial Sequence: Synthetic polypeptide"
MAADGYLPDWLEDNLSEGIREWWDLKPGAPKPKANQQKQDDGRGLVLPGYKYLGPFNGLDKGEPVNAADAAALEHDKAYDQQLKAGDNPYLRYNHADAEFQERLQEDTSFGGNLGRAVFQAKKRVLEPLGLVEEGAKTAPGKKRPIDSPDSSTGIGKKGQQPAKKKLNFGQTGDSESVPDPQPLGEPPAAPSSVGSGTMAAGGGAPTADNNEGADGVGNASGNWHCDSTWLGDRVITTSTRTWALPTYNNHLYKQISSSSSGATNDNHYFGYSTPWGYFDFNRFHCHFSPRDWQRLINNNWGFRPKKLRFKLFNIQVKEVTTNDGVTTIANNLTSTVQVFSDSEYQLPYVLGSAHQGCLPPFPADVFMIPQYGYLTLNNGSQSVGRSSFYCLEYFPSQMLRTGNNFEFSYSFEDVPFHSSYAHSQSLDRLMNPLIDQYLYYLARTQSTTGSTRELQFHQAGPNTMAEQSKNWLPGPCYRQQRLSKNLDFNNNSNFAWTAATKYHLNGRNSLTNPGIPMATNKDDEDQFFPINGVLVFGKTGAANKTTLENVLMTSEEEIKTTNPVATEEYGVVSSNLQSSTAGPQSQTINSQGALPGMVWQNRDVYLQGPIWAKIPHTDGNFHPSPLMGGFGLEHPPPQILIKNTPVPANPPEVFTPAKFASFITQYSTGQVSVEIEWELQKENSKRWNPEIQYTSNYAKSNNVEFAVNPDGVYTEPRPIGTRYLTRNLMAADGYLPDWLEDNLSEGIREWWDLKPGAPKPKANQQKQDDGRGLVLPGYKYLGPFNGLDKGEPVNAADAAALEHDKAYDQQLKAGDNPYLRYNHADAEFQERLQEDTSFGGNLGRAVFQAKKRVLEPLGLVEEGAKTAPGKKRPIGSPDSSTGIGKKGQQPAKKKLNFGQTGDSESVPDPQPLGEPPAAPSSVGSGTMAAGGGAPMADNNEGADGVGNASGNWHCDSTWLGDRVITTSTRTWALPTYNNHLYKQISSSSSGATNDNHYFGYSTPWGYFDFNRFHCHFSPRDWQRLINNNWGFRPKKLRFKLLNIQVKEVTTNDGVTTIANNLTSTVQVFSDSEYQLPYVLGSAHQGCLPPFPADVFMIPQYGYLTLDNGSQSVGRSSFYCLEYFPSQMLRTGNNFEFSYSFEDVPFHSSYAHSQSLDRLMNPLIDQYLYYLARTQSTTGSTRELQFHQAGPNTMAEQSKNWLPGPCYRQQRLSKNLDFNNNSNFAWTAATKYHLNGRNSLTNPGIPMATNKDDEDQFFPINGVLVFGKTGAANKTTLENVLMTSEEEIKTTNPVATEEYGVVSSNLQSSTAGPQSQTINSQGALPGMVWQNRDVYLQGPIWAKIPHTDGNFHPSPLMGGFGLKHPPPQILIKNTPVPANPPEVFTPAKFASFITQYSTGQVSVEIEWELQKENSKRWNPEIQYTSNYAKSNNVEFAVNPDGVYTEPRPIGTRYLTRNL

SEQ ID NO: 441 - DNA, 3095 bp, Artificial Sequence
  source: /note="Description of Artificial Sequence: Synthetic polynucleotide"
gaattcgcccttcgcagagaccaaagttcaactgaaacgaatcaaccggtttattgattaacaagcaattacagattacgggtgaggtaacgagtgccaatggggcgaggctcagtataaacaccatcagggttcacagcaaattcaacattattagacttggcataattggaagtatactgaatttctgggttccagcgcttgctgttttctttctgcagctcccactcgatttccacgctgacttgtccggtgctgtactgcgtgatgaaggaggcaaacttggcaggagtaaacacctccggaggattagcaggtacaggtgtgtttttgatcaggatctgtggaggcgggtgtttgagtccaaaaccgcccatcagaggagacgggtgaaagttgccatccgtgtgaggaattttggcccagatgggaccctgcagatacacgtcccggttctgccagaccatgccaggcagtgctccctggctgttgatagtctgtgattgaggcccggctgtagacgactgcaggttgctggagaccacaccgtattcttctgtagccacagggttagtggtcttgatctcctcctcgctggtcatcagaacgttttccagcgtagttttgttggcagctcccgtcttgccaaaaaccagtaccccgttgatgggaaagaactggtcctcatcatccttgttggttgccatgggaatgccaggattggtcaaagagtttctgccattcagatgatatttagtggcagcagtccaggcaaaattgctgttgttgttaaagtccaagttctttgacagtctctgttgcctatagcagggtccaggcagccagttctttgactgctcggccatagtattgggcccagcttgatgaaattgcagttccctggtggaacccgtggtgctctgggtccgggccaggtagtacaggtactggtcgatgagagggttcatcagccggtctaggctctggctgtgcgcgtagctgctgtggaaaggcacgtcctcgaagctgtaactgaactcaaagttgttgcccgttctcagcatttgagaggggaaatattccaggcagtagaaggaggaacggcccaccgattggctgccgttgtccagagtcaggtagccgtactgaggaatcatgaagacgtccgccgggaacggaggcaggcagccctggtgcgcagagccgaggacgtacggcagctggtattccgagtccgagaagacctgaaccgtgctggtaaggttattagcgatggtcgtgacgccgtcattcgttgtgacctccttgacctggatgttgaggagcttgaaccgcagcttcttgggccggaatccccagttgttgttgatgagtcgctgccagtcacgtggtgagaagtggcagtggaatctgttaaagtcaaaatacccccagggggtgctgtagccgaagtagtggttgtcattggtggctcctgagctgctgctggagatttgcttgtagaggtggttgttgtaggtggggagggcccaggttctggtgctggtggtgatgactctgtcgcccagccatgtggaatcgcaatgccaatttcctgaggcattacccactccgtcggcaccttcgttattgtctgccattggtgcgccaccgcctgcagccattgtaccagatcccacactagagggcgctgctggaggttctccaagaggttgagggtcggggactgactctgagtcgccagtctgaccaaaattgagcttctttttagcgggctgctggccttttttgccgatgcccgtggaggagtctggagagcctatgggtctcttctttccaggagccgtcttagcgccttcctcaaccagaccgagaggttcgagaacccgcttcttggcctggaagactgctcgcccgaggttgcccccaaatgacgtatcttcttgcagacgctcctgaaactcggcgtcggcgtggttataccgcaggtacggattgtcacccgctttgagctgctggtcgtaggccttgtcgtgctcgagggccgctgcgtccgccgcgttgacgggctcccccttgtcgagtccgttgaagggtccgaggtacttgtagccaggaagcaccagaccccggccgtcgtcctgcttttgctggttggctttgggtttcggggctccaggtttcaggtcccaccactcgcgaatgccctcagagaggttgtcctcgagccaatctggaagataaccatcggcagccatacctggtttaagtcatttattgctcagaaacacagtcgtccaggtccacgttgaccaggtcgcaggccgagcaagcaatctcgggtgcccgccccagcagatgatgaatcgcacacagcttccgatacgtcttttttctgacgaccggttgagattctgacacgccggggaaacattctaaacagtctctgaccccgtgcgtgaagcaaatgttgaaattctgattcattctctcgcacgttttgcagggaaacagcacctgaagcatgcccgcgtgacgagaacatttgttttggtacctgtcggcaaagtccaccggagctccttccgcgtctgacgtcgatgggtccgtgactgagggacgggcccgcttgggctcgcttatatccgcgtcatcgggggcgggtcttttgctggctccgccctttctgacgtagaactcatgcgtcacctcagtcacgtgatcactagcccagcggaagaactctttgacttcctgctttgtcaccttgccaaagtcgtgttccagacggcgggtgagttcaaatttgaacatccggtcctgcaacggttgctggtgctcgaaggtggtgctgttcccgtcgatcacggcgcacatgttggtgttggaggtgacgatcacgggggtgggatcgatctgggcggacgacttgcacttttggtccacgcgcaccttgctgccgccgagaatggccttggcggactccacgaccttggccgtcatcttgccctcctcccaccagatcaccatcttgtcgacgcaatcgttgaagggaaagttctcattggtccagttgacgcagcaagggcgaattc

SEQ ID NO: 442 - DNA, 3095 bp, Artificial Sequence
  source: /note="Description of Artificial Sequence: Synthetic polynucleotide"
gaattcgcccttcgcagagaccaaagttcaactgaaacgaatcaaccggtttattgattaacaagcaattacagattacgggtgaggtaacgagtgccaatggggcgaggctcagtataaacaccatcagggttcacagcaaattcaacattattagacttggcataattggaagtatactgaatttctgggttccagcgcttgctgttttctttctgcagctcccactcgatttccacgctgacttgtccggtgctgtactgcgtgatgaaggaggcaaacttggcaggagtaaacacctccggaggattagcaggtacaggtgtgtttttgatcaggatctgtggaggcgggtgttcgagtccaaaaccgcccatcagaggagacgggtgaaagttgccatccgtgtgaggaattttggcccagatgggaccctgcagatacacgtcccggttctgccagaccatgccaggcagtgctccctggctgttgatagtctgtgattgaggcccggctgtagacgactgcaggttgctggagaccacaccgtattcttctgtagccacagggttagtggtcttgatctcctcctcgctggtcatcagaacgttttccagcgtagttttgttggcagctcccgtcttgccaaaaaccagtaccccgttgatgggaaagaactggtcctcatcatccttgttggttgccatgggaatgccaggattggtcaaagagtttctgccattcagatgatatttagtggcagcagtccaggcaaaattgctgttgttgttaaagtccaagttctttgacagtctctgttgcctatagcagggtccaggcagccagttctttgactgctcggccatagtattgggcccagcttgatgaaattgcagttccctggtggaacccgtggtgctctgggtccgggccaggtagtacaggtactggtcgatgagagggttcatcagccggtctaggctctggctgtgcgcgtagctgctgtggaaaggcacgtcctcgaagctgtaactgaactcaaagttgttgcccgttctcagcatttgagaggggaaatattccaggcagtagaaggaggaacggcccaccgattggctgccgttgttcagagtcaggtagccgtactgaggaatcatgaagacgtccgccgggaacggaggcaggcagccctggtgcgcagagccgaggacgtacggcagctggtattccgagtccgagaagacctgaaccgtgctggtaaggttattagcgatggtcgtgacgccgtcattcgttgtgacctccttgacctggatgttgaagagcttgaaccgcagcttcttgggccggaatccccagttgttgttgatgagtcgctgccagtcacgtggtgagaagtggcagtggaatctgttaaagtcaaaatacccccagggggtgctgtagccgaagtagtggttgtcattggtggctcctgagctgctgctggagatttgcttgtagaggtggttgttgtaggtggggagggcccaggttctggtgctggtggtgatgactctgtcgcccagccatgtggaatcgcaatgccaatttcctgaggcattacccactccgtcggcaccttcgttattgtctgccgttggtgcgccaccgcctgcagccattgtaccagatcccacactagagggcgctgctggaggttctccaagaggttgagggtcggggactgactctgagtcgccagtctgaccaaaattgagcttctttttagcgggctgctggccttttttgccgatgcccgtggaggagtctggagagtctatgggtctcttctttccaggagccgtcttagcgccttcctcaaccagaccgagaggttcgagaacccgcttcttggcctggaagactgctcgcccgaggttgcccccaaatgacgtatcttcttgcaggcgctcctgaaactcggcgtcggcgtggttataccgcaggtacggattgtcacccgctttgagctgctggtcgtaggccttgtcgtgctcgagggccgctgcgtccgccgcgttgacgggctcccccttgtcgagtccgttgaagggtccgaggtacttgtagccaggaagcaccagaccccggccgtcgtcctgcttttgctggttggctttgggtttcggggctccaggtttcaggtcccaccactcgcgaatgccctcagagaggttgtcctcgagccaatctggaagataaccatcggcagccatacctggtttaagccatttattgctcagaaacacagtcgtccaggtccacgttgaccaggtcgcaggccgagcaggcaatctcgggtgcccgccccagcagatgatgaatcgcacacagcttccgatacgtcttttttctgacgaccggttgagattctgacacgccggggaaacattctaaacagtctctgaccccgtgcgtgaagcaaatgttgaaattctgattcattctctcgcacgttttgcagggaaacagcatctgaagcatgcccgcgtggcgagaacatttgttttggtacctgtcggcaaagtccaccggagctccttccgcgtctgacgtcgatgggtccgtgactgagggacaggcccgcttgggctcgcttatatccgcgtcatcgggggcgggtcttttgctggctccgccctttctgacgtagaactcatgcgtcacctcagtcacgtgatcactagcccagcggaagaactctttgacttcctgctttgtcaccttgccaaagtcgtgttccagacggcgggtgagttcaaatttgaacatccggtcctgcaacggctgctggtgctcgaaggtggtgctgttcccgtcgatcacggcgcgcatgttggtgttggaggtgacgatcacgggggtgggatcgatctgggcggacgacttgcacttttggtccacgcgcaccttgctgccgccgagaatggccttggcggactccacgaccttggccgtcatcttgccctcctcccaccagatcaccatcttgtcgacgcaatcgttgaagggaaagttctcattggtccagttgacgcagcaagggcgaattc

SEQ ID NO: 443 - protein, 729 aa, Artificial Sequence; identical to SEQ ID NO: 171
  source: /note="Description of Artificial Sequence: Synthetic polypeptide"

SEQ ID NO: 444 - protein, 729 aa, Artificial Sequence
  source: /note="Description of Artificial Sequence: Synthetic polypeptide"
MAADGYLPDWLEDNLSEGIREWWDLKPGAPKPKANQQKQDDGRGLVLPGYKYLGPFNGLDKGEPVNAADAAALEHDKAYDQQLKAGDNPYLRYNHADAEFQERLQEDTSFGGNLGRAVFQAKKRVLEPLGLVEEGAKTAPGKKRPIDSPDSSTGIGKKGQQPAKKKLNFGQTGDSESVPDPQPLGEPPAAPSSVGSGTMAAGGGAPTADNNEGADGVGNASGNWHCDSTWLGDRVITTSTRTWALPTYNNHLYKQISSSSSGATNDNHYFGYSTPWGYFDFNRFHCHFSPRDWQRLINNNWGFRPKKLRFKLFNIQVKEVTTNDGVTTIANNLTSTVQVFSDSEYQLPYVLGSAHQGCLPPFPADVFMIPQYGYLTLNNGSQSVGRSSFYCLEYFPSQMLRTGNNFEFSYSFEDVPFHSSYAHSQSLDRLMNPLIDQYLYYLARTQSTTGSTRELQFHQAGPNTMAEQSKNWLPGPCYRQQRLSKNLDFNNNSNFAWTAATKYHLNGRNSLTNPGIPMATNKDDEDQFFPINGVLVFGKTGAANKTTLENVLMTSEEEIKTTNPVATEEYGVVSSNLQSSTAGPQSQTINSQGALPGMVWQNRDVYLQGPIWAKIPHTDGNFHPSPLMGGFGLKHPPPQILIKNTPVPANPPEVFTPAKFASFITQYSTGQVSVEIEWELQKENSKRWNPEIQYTSNYAKSNNVEFAVNPDGVYTEPRPIGTRYLTRNL

SEQ ID NO: 445 - protein, 729 aa, Artificial Sequence
  source: /note="Description of Artificial Sequence: Synthetic polypeptide"
MAADGYLPDWLEDNLSEGIREWWDLKPGAPKPKANQQKQDDGRGLVLPGYKYLGPFNGLDKGEPVNAADAAALEHDKAYDQQLKAGDNPYLRYNHADAEFQERLQEDTSFGGNLGRAVFQAKKRVLEPLGLVEEGAKTAPGKKRPIDSPDSSTGIGKKGQQPAKKKLNFGQTGDSESVPDPQPLGEPPAAPSSVGSGTMAAGGGAPMADNNEGADGVGNASGNWHCDSTWLGDRVITTSTRTWALPTYNNHLYKQISSSSSGATNDNHYFGYSTPWGYFDFNRFHCHFSPRDWQRLINNNWGFRPKKLRFKLFNIQVKEVTTNDGVTTIANNLTSTVQVFSDSEYQLPYVLGSAHQGCLPPFPADVFMIPQYGYLTLNNGSQSVGRSSFYCLEYFPSQMLRTGNNFEFSYSFEDVPFHSSYAHSQSLDRLMNPLIDQYLYYLARTQSTTGSTRELQFHQAGPNTMAEQSKNWLPGPCYRQQRLSKNLDFNNNSNFAWTAATKYHLNGRNSLTNPGIPMATNKDDEDQFFPINGVLVFGKTGAANKTTLENVLMTSEEEIKTTNPVATEEYGVVSSNLQSSTAGPQSQTINSQGALPGMVWQNRDVYLQGPIWAKIPHTDGNFHPSPLMGGFGLKHPPPQILIKNTPVPANPPEVFTPAKFASFITQYSTGQVSVEIEWELQKENSKRWNPEIQYTSNYAKSNNVEFAVNPDGVYTEPRPIGTRYLTRNL

SEQ ID NO: 446 - DNA, 2217 bp, Artificial Sequence
  source: /note="Description of Artificial Sequence: Synthetic polynucleotide"
atggctgctgacggttatcttccagattggctcgaggacaacctctctgagggcattcgcgagtggtgggacctgaaacctggagcccccaagcccaaggccaaccagcagaagcaggacgacggccggggtctggtgcttcctggctacaagtacctcggacccttcaacggactcgacaagggggagcccgtcaacgcggcggacgcagcggccctcgagcacgacaaggcctacgaccagcagctcaaagcgggtgacaatccgtacctgcggtataaccacgccgacgccgagtttcaggagcgtctacaagaagatacgtcttttgggggcaacctcgggcgagcagtcttccaggccaagaagcgggttctcgaacctctcggtctggttgaggaagctgctaagacggctcctggaaagaagagaccggtagaaccgtcacctcagcgttcccccgactcctccacgggcatcggcaagaaaggccagcggcccgctaaaaagagactgaactttggtcagactggcgactcagagtcagtccccgaccctcaaccaatcggagaaccaccagcaggcccctctggtctgggatctggtacaatggctgcaggcggtggcgctccaatggcagacaataacgaaggcgccgacggagtgggtagttcctcaggaaattggcattgcgattccacatggctgggcgacagagtcatcaccaccagcacccgaacctgggccctgcccacctacaacaaccacctctacaagcaaatatccaatgggacatcgggaggaagcaccaacgacaacacctacttcggctacagcaccccctgggggtattttgacttcaacagattccactgccacttctcaccacgtgactggcagcgactcatcaacaacaactggggattccggccaaaaagactcagcttcaagcccttcaacatccaggtcaaggaggtcacgcagaatgaaggcaccaagaccatcgccaataaccttaccagcacgattcaggtatttacggactcggaataccagctgccgtacgtcctcggctccgcgcaccagggctgcctgcctccgttcccggcggacgtcttcatgattccccagtacggctaccttacactgaacaatggaagtcaagccgtaggccgttcctccttctactgcctggaatattttccatctcaaatgctgcgaactggaaacaattttgaattcagctacaccttcgaggacgtgcctttccacagcagctacgcacacagccagagcttggaccgactgatgaatcctctcatcgaccagtacctgcactacttatccagaactcagtccacaggaggaactcaaggtacccagcaattgttattttctcaagctgggcctgcaaacatgtcggctcaggctaagaactggctacctggaccttgctaccggcagcagcgagtctctacgacactgtcgcaaaacaacaacagcaactttgcttggactggtgccaccaaatatcacctgaacggaagagactctttggtaaatcccggtgtcgccatggcaacccacaaggacgacgaggaacgcttcttcccgtcgagtggagtcctgatgtttggaaaacagggtgctggaagagacaatgtggactacagcagcgttatgctaaccagcgaagaagaaattaaaaccactaaccctgtagccacagaacaatacggtgtggtggctgacaacttgcagcaaaccaatacagggcctattgtgggaaatgtcaacagccaaggagccttacctggcatggtctggcagaaccgagacgtgtacctgcagggtcccatctgggccaagattcctcacacggacggcaacttccacccttcaccgctaatgggaggatttggactgaagcacccacctcctcagatcctgatcaagaacacgccggtacctgcggatcctccaacaacgttcagccaggcgaaattggcttccttcattacgcagtacagcaccggacaggtcagcgtggaaatcgagtgggagctgcagaaggagaacagcaaacgctggaacccagagattcagtacacttcaaactactacaaatctacaaatgtggactttgctgtcaatacagagggaacttattctgagcctcgccccattggtactcgctacctcacccgtaatctgtaa

SEQ ID NO: 447 - protein, 738 aa, Artificial Sequence
  source: /note="Description of Artificial Sequence: Synthetic polypeptide"
MAADGYLPDWLEDNLSEGIREWWDLKPGAPKPKANQQKQDDGRGLVLPGYKYLGPFNGLDKGEPVNAADAAALEHDKAYDQQLKAGDNPYLRYNHADAEFQERLQEDTSFGGNLGRAVFQAKKRVLEPLGLVEEAAKTAPGKKRPVEPSPQRSPDSSTGIGKKGQRPAKKRLNFGQTGDSESVPDPQPIGEPPAGPSGLGSGTMAAGGGAPMADNNEGADGVGSSSGNWHCDSTWLGDRVITTSTRTWALPTYNNHLYKQISNGTSGGSTNDNTYFGYSTPWGYFDFNRFHCHFSPRDWQRLINNNWGFRPKRLSFKPFNIQVKEVTQNEGTKTIANNLTSTIQVFTDSEYQLPYVLGSAHQGCLPPFPADVFMIPQYGYLTLNNGSQAVGRSSFYCLEYFPSQMLRTGNNFEFSYTFEDVPFHSSYAHSQSLDRLMNPLIDQYLHYLSRTQSTGGTQGTQQLLFSQAGPANMSAQAKNWLPGPCYRQQRVSTTLSQNNNSNFAWTGATKYHLNGRDSLVNPGVAMATHKDDEERFFPSSGVLMFGKQGAGRDNVDYSSVMLTSEEEIKTTNPVATEQYGVVADNLQQTNTGPIVGNVNSQGALPGMVWQNRDVYLQGPIWAKIPHTDGNFHPSPLMGGFGLKHPPPQILIKNTPVPADPPTTFSQAKLASFITQYSTGQVSVEIEWELQKENSKRWNPEIQYTSNYYKSTNVDFAVNTEGTYSEPRPIGTRYLTRNL

SEQ ID NO: 448 - DNA, 2217 bp, Artificial Sequence
  source: /note="Description of Artificial Sequence: Synthetic polynucleotide"
atggctgctgacggttatcttccagattggctcgaggacaacctctctgagggcattcgcgagtggtgggacctgaaacctggagcccccaagcccaaggccaaccagcagaagcaggacgacggccggggtctggtgcttcctggctacaagtacctcggacccttcaacggactcgacaagggggagcccgtcaacgcggcggacgcagcggccctcgagcacgacaaggcctacgaccagcagctcaaagcgggtgacaatccgtacctgcggtataaccacgccgacgccgagtttcaggagcgtctgcaagaagatacgtcttttgggggcaacctcgggcgagcagtcttccaggccaagaagcgggttctcgaacctctcggtctggttgaggaagctgctaagacggctcctggaaagaagagaccggtagaaccgtcacctcagcgttcccccgactcctccacgggcatcggcaagaaaggccagcagcccgctaaaaagagactgaactttggtcagactggcgactcagagtcagtccccgaccctcaaccaatcggagaaccaccagcaggcccctctggtctgggatctggtacaatggctgcaggcggtggcgctccaatggcagacaataacgaaggcgccgacggagtgggtagttcctcaggaaattggcattgcgattccacatggctgggcgacagagtcatcaccaccagcacccgaacctgggccctgcccacctacaacaaccacctctacaagcaaatatccaatgggacatcgggaggaagcaccaacgacaacacctacttcggctacagcaccccctgggggtattttgacttcaacagattccactgccacttctcaccacgtgactggcagcgactcatcaacaacaactggggattccggccaaaaagactcagcttcaagctcttcaacatccaggtcaaggaggtcacgcagaatgaaggcaccaagaccatcgccaataaccttaccagcacgattcaggtatttacggactcggaataccagctgccgtacgtcctcggctccgcgcaccagggctgcctgcctccgttcccggcggacgtcttcatgattccccagtacggctaccttacactgaacaatggaagtcaagccgtaggccgttcctccttctactgcctggaatattttccatctcaaatgctgcgaactggaaacaattttgaattcagctacaccttcgaggacgtgcctttccacagcagctacgcacacagccagagcttggaccgactgatgaatcctctcatcgaccagtacctgtactacttatccagaactcagtccacaggaggaactcaaggtacccagcaattgttattttctcaagctgggcctgcaaacatgtcggctcaggctaagaactggctacctggaccttgctaccggcagcagcgagtctctacgacactgtcgcaaaacaacaacagcaactttgcttggactggtgccaccaaatatcacctgaacggaagagactctttggtaaatcccggtgtcgccatggcaacccacaaggacgacgaggaacgcttcttcccgtcgagtggagtcctgatgtttggaaaacagggtgctggaagagacaatgtggactacagcagcgttatgctaaccagcgaagaagaaattaaaaccactaaccctgtagccacagaacaatacggtgtggtggctgataacttgcagcaaaccaatacggggcctattgtgggaaatgtcaacagccaaggagccttacctggcatggtctggcagaaccgagacgtgtacctgcagggtcccatctgggccaagattcctcacacggacggcaacttccacccttcaccgctaatgggaggatttggactgaagcacccacctcctcagatcctgatcaagaacacgccggtacctgcggatcctccaacaacgttcagccaggcgaaattggcttccttcattacgcagtacagcaccggacaggtcagcgtggaaatcgagtgggagctgcagaaggagaacagcaaacgctggaacccagagattcagtacacttcaaactactacaaatctacaaatgtggactttgctgtcaatacagagggaacttattctgagcctcgccccattggtactcgttacctcacccgtaatctgtaa

SEQ ID NO: 449 - protein, 738 aa, Artificial Sequence; identical to SEQ ID NO: 101
  source: /note="Description of Artificial Sequence: Synthetic polypeptide"

SEQ ID NO: 450 - protein, 738 aa, Artificial Sequence
  source: /note="Description of Artificial Sequence: Synthetic polypeptide"
MAADGYLPDWLEDNLSEGIREWWDLKPGAPKPKANQQKQDDGRGLVLPGYKYLGPFNGLDKGEPVNAADAAALEHDKAYDQQLKAGDNPYLRYNHADAEFQERLQEDTSFGGNLGRAVFQAKKRVLEPLGLVEEAAKTAPGKKRPVEPSPQRSPDSSTGIGKKGQQPAKKRLNFGQTGDSESVPDPQPIGEPPAGPSGLGSGTMAAGGGAPMADNNEGADGVGSSSGNWHCDSTWLGDRVITTSTRTWALPTYNNHLYKQISNGTSGGSTNDNTYFGYSTPWGYFDFNRFHCHFSPRDWQRLINNNWGFRPKRLSFKLFNIQVKEVTQDEGTKTIANNLTSTIQVFTDSEYQLPYVLGSAHQGCLPPFPADVFMIPQYGYLTLNNGSQAVGRSSFYCLEYFPSQMLRTGNNFEFSYTFEDVPFHSSYAHSQSLDRLMNPLIDQYLYYLSRTQSTGGTQGTQQLLFSQAGPANMSARAKNWLPGPCYRQQRVSTTLSQNNNSNFAWTGATKYHLNGRDSLVNPGVAMATHKDDEERFFPSSGVLMFGKQGAGRDNVDYSSVMLTSEEEIKTTNPVATEQYGVVADNLQQANTGPIVGNVNSQGALPGMVWQNRDVYLQGPIWAKIPHTDGNFHPSPLMGGFGLKHPPPQILIKNTPVPADPPTTFSQAKLASFITQYSTGQVSVEIEWELQKENSKRWNPEIQYTSNYYKSTNVDFAVNSEGTYSEPRPIGTRYLTRNL

SEQ ID NO: 451 - DNA, 2217 bp, Artificial Sequence
  source: /note="Description of Artificial Sequence: Synthetic polynucleotide"
atggctgctgacggttatcttccagattggctcgaggacaacctctctgagggcattcgcgagtggtgggacctgaaacctggagcccccaagcccaaggccaaccagcagaagcaggacgacggccggggtctggtgcttcctggctacaagtacctcggacccttcaacggactcgacaagggggagcccgtcaacgcggcggacgcagcggccctcgagcacgacaaggcctacgaccagcagctcaaagcgggtgacaatccgtacctgcggtataaccacgccgacgccgagtttcaggagcgtctgcaagaagatacgtcttttgggggcaacctcgggcgagcagtcttccaggccaagaagcgggttctcgaacctctcggtctggttgaggaagctgctaagacggctcctggaaagaagagaccggtagaaccgtcacctcagcgttcccccgactcctccacgggcatcggcaagaaaggccagcagcccgctaaaaagagactgaactttggtcagactggcgactcagagtcagtccccgaccctcaaccaatcggagaaccaccagcaggcccctctggtctgggatctggtacaatggctgcaggcggtggcgctccaatggcagacaataacgaaggcgccgacggagtgggtagttcctcaggaaattggcattgcgattccacatggctgggcgacagagtcatcaccaccagcacccgaacctgggccctgcccacctacaacaaccacctctacaagcaaatatccaatgggacatcgggaggaagcaccaacgacaacacctacttcggctacagcaccccctgggggtattttgacttcaacagattccactgccacttctcaccacgtgactggcagcgactcatcaacaacaactggggattccggccaaaaagactcagcttcaagctcttcaacatccaggtcaaggaggtcacgcaggatgaaggcaccaagaccatcgccaataaccttaccagcacgattcaggtatttacggactcggaataccagctgccgtacgtcctcggctccgcgcaccagggctgcctgcctccgttcccggcggacgtcttcatgattccccagtacggctaccttacactgaacaatggaagtcaagccgtaggccgttcctccttctactgcctggaatattttccatctcaaatgctgcgaactggaaacaattttgaattcagctacaccttcgaggacgtgcctttccacagcagctacgcacacagccagagcttggaccgactgatgaatcctctcatcgaccagtacctgtactacttatccagaactcagtccacaggaggaactcaaggtacccagcaattgttattttctcaagctgggcctgcaaacatgtcggctcgggctaagaactggctacctggaccttgctaccggcagcagcgagtctctacgacactgtcgcaaaacaacaacagcaactttgcttggactggtgccaccaaatatcacctgaacggaagagactctttggtaaatcccggtgttgctatggcaacgcataaggacgacgaggaacgtttctttccatcgagcggagtcctgatgtttggaaaacagggtgctggaagagacaatgtggactatagcagcgttatgctaaccagcgaggaagaaattaaaaccactaaccctgtagccacagaacaatacggtgtggtggctgacaacttgcagcaagccaatacagggcctattgtgggaaatgtcaacagccaaggagccttacctggcatggtctggcagaaccgagacgtgtacctgcagggtcccatctgggccaaaattcctcacacggacggcaattttcacccgtctcctctgatgggcggctttggactgaagcacccacctccccagatcctgatcaagaatacgccggtacctgcggatcctccaacgacgttcagccaggcaaaattggcttccttcatcacgcagtacagcaccggccaggtcagcgtggagatcgagtgggagctgcagaaggagaacagcaagcgatggaacccagaaattcagtacacttccaactactacaaatctacaaatgtggactttgctgtcaattctgagggtacatattcagagcctcgccccattggtactcgttatctgacacgtaatctgtaa

SEQ ID NO: 452 - DNA, 2211 bp, Artificial Sequence
  source: /note="Description of Artificial Sequence: Synthetic polynucleotide"
atggctgccgatggttatcttccagattggctcgaggacaacctctctgagggcattcgcgagtggtgggacttgaaacctggagccccgaaacccaaagccaaccagcaaaagcaggacgacggccggggcctggtgcttcctggctacaagtacctcggacccttcaacggactcgacaagggggagcccgtcaacgcggcggacgcagcggccctcgagcacgacaaggcctacgaccagcagctcgaagcgggtgacaatccgtacctgcggtataaccacgccgacgccgagtttcaggagcgtctgcaagaagatacgtcttttgggggcaacctcgggcgagcagtcttccaggccaagaagcgggttctcgaacctctcggtctggttgaggaaggcgctaagacggctcctggaaagaagagaccagtagagcagtcaccccaagaaccagactcctcctcgggcatcggcaagaaaggccaacagcccgccagaaaaagactcaattttggccagactggcgactcagagtcagttccagaccctcaacctctcggagaacctccagcagcgccctctggtgtgggacctaatacaatggctgcaggcggtggcgcaccaatggcagacaataacgaaggcgccgacggagtgggtagttcctcgggaaattggcattgcgattccacatggctgggcgacagagtcatcaccaccagcacccgaacctgggccctgcccacctacaacaaccacctctacaagcaaatctccaacgggacatcgggaggagccaccaacgacaacacctacttcggctacagcaccccctgggggtattttgactttaacagattccactgccacttttcaccacgtgactggcagcgactcatcaacaacaactggggattccggcccaagagactcagcttcaagctcttcaacatccaggtcaaggaggtcacgcagaatgaaggcaccaagaccatcgccaataacctcaccagcaccatccaggtgtttacggactcggagtaccagctgccgtacgttctcggctctgcccaccagggctgcctgcctccgttcccggcggacgtgttcatgattccccagtacggctacctaacactcaacaacggtagtcaggccgtgggacgctcctccttctactgcctggaatactttccttcgcagatgctgagaaccggcaacaacttccagtttacttacaccttcgaggacgtgcctttccacagcagctacgcccacagccagagcttggaccggctgatgaatcctctgattgaccagtacctgtactacttgtctcggactcaaacaacaggaggcacggcaaatacgcagactctgggcttcagccaaggtgggcctaatacaatggccaatcaggcaaagaactggctgccaggaccctgttaccgccaacaacgcgtctcaacgacaaccgggcaaaacaacaatagcaactttgcctggactgctgggaccaaataccatctgaatggaagaaattcattggctaatcctggcatcgctatggcaacacacaaagacgacgaggagcgttttttcccagtaacgggatcctgtttttggcaacaaaatgctgccagagacaatgcggattacagcgatgtcatgctcaccagcgaggaagaaatcaaaaccactaaccctgtggctacagaggaatacggtatcgtggcagataacttgcagcagcaaaacacggctcctcaaattggaactgtcaacagccagggggccttacccggtatggtctggcagaaccgggacgtgtacctgcagggtcccatctgggccaagattcctcacacggacggcaacttccacccgtctccgctgatgggcggctttggcctgaaacatcctccgcctcagatcctgatcaagaacacgcctgtacctgcggatcctccgaccaccttcaaccagtcaaagctgaactctttcatcacgcaatacagcaccggacaggtcagcgtggaaattgaatgggagctacagaaggaaaacagcaagcgctggaaccccgagatccagtacacctccaactactacaaatctacaagtgtggactttgctgttaatacagaaggcgtgtactctgaaccccgccccattggcacccgttacctcacccgtaatctgtaa

SEQ ID NO: 453 - protein, 736 aa, Artificial Sequence
  source: /note="Description of Artificial Sequence: Synthetic polypeptide"
MAADGYLPDWLEDNLSEGIREWWDLKPGAPKPKANQQKQDDGRGLVLPGYKYLGPFNGLDKGEPVNAADAAALEHDKAYDQQLEAGDNPYLRYNHADAEFQERLQEDTSFGGNLGRAVFQAKKRVLEPLGLVEEGAKTAPGKKRPVEQSPQEPDSSSGIGKKGQQPARKRLNFGQTGDSESVPDPQPLGEPPAAPSGVGPNTMAAGGGAPMADNNEGADGVGSSSGNWHCDSTWLGDRVITTSTRTWALPTYNNHLYKQISNGTSGGATNDNTYFGYSTPWGYFDFNRFHCHFSPRDWQRLINNNWGFRPKRLSFKLFNIQVKEVTQNEGTKTIANNLTSTIQVFTDSEYQLPYVLGSAHQGCLPPFPADVFMIPQYGYLTLNNGSQAVGRSSFYCLEYFPSQMLRTGNNFQFTYTFEDVPFHSSYAHSQSLDRLMNPLIDQYLYYLSRTQTTGGTANTQTLGFSQGGPNTMANQAKNWLPGPCYRQQRVSTTTGQNNNSNFAWTAGTKYHLNGRNSLANPGIAMATHKDDEERFFPVTGSCFWQQNAARDNADYSDVMLTSEEEIKTTNPVATEEYGIVADNLQQQNTAPQIGTVNSQGALPGMVWQNRDVYLQGPIWAKIPHTDGNFHPSPLMGGFGLKHPPPQILIKNTPVPADPPTTFNQSKLNSFITQYSTGQVSVEIEWELQKENSKRWNPEIQYTSNYYKSTSVDFAVNTEGVYSEPRPIGTRYLTRNL

SEQ ID NO: 454 - DNA, 2214 bp, Artificial Sequence
  source: /note="Description of Artificial Sequence: Synthetic polynucleotide"
atggctgctgacggttatcttccagattggctcgaggacaacctctctgagggcattcgcgagtggtgggacctgaaacctggagcccccaagcccaaggccaaccagcagaagcaggacgacggccggggtctggtgcttcctggctacaagtacctcggacccttcaacggactcgacaagggggagcccgtcagcgcggcggacgcagcggccctcgagcacgacaaggcctgcgaccagcggctcaaagcgggtgacaatccgtacctgcggtataaccacgccgacgccgagtttcaggagcgtctgcaagaagatacgtcttttgggggcaacctcgggcgagcagtcttccaggccaagaagcgggttctcgaacctctcggtctggttgaggaagctgctaagacggctcctggaaagaagggaccggtagaaccgtcacctcagcgttcccccgactcctccacgggcatcggcaagaaaggccagcagcccgctagaaagagactgaactttgggcagactggcgactcagagtcagtccccgaccctcaaccaatcggagaaccaccagcaggcccctctggtctgggatctggtacaatggctgcaggcggtggcgcaccaatggctgacaataacgagggcgccgacggagtgggtaatgcctcaggaaattggcattgcgattccacatggctgggcgacagagtcatcaccaccagcacccgaacctgggctttgcccacctacaacaatcacctctacaagcaaatctccagtcagtcagcaggtagcaccaacgacaacgtctacttcggctacagcaccccctgggggtattttgacttcaacagattccactgtcacttctcaccacgtgactggcagcggctcatcaacaacaactggggattccggcccaagaagctcaacttcaagctgttcaacatccaggtcaaggaggtcacaacgaatgacggcgtcacgaccatcgccaataaccttaccagcacggttcaggtcttttcggactcggaataccagctgccctacgtcctcggctccgcacaccagggctgcctgcctccgttcccggcggacgtcttcatgattccccagtacggctacctgactctgaacaatggcagccaatcggtgggtcgttcctctttctactgcctggaatatttcccttctcaaatgctgagaacgggcaacaacttcaccttcagctacaccttcgaggacgttcccttccacagcagctacgcacacagccagagcctggaccggctgatgaatcctcttatcgaccagtacctgtattacctggccagaacacagagcaacgcaggaggcacagctggcaatcgggaactgcagttttatcagggcgggcctaccaccatggccgaacaagccaaaaactggctgcctggaccttgcttccggcaacaaagagtctccaagacgctggatcaaaacaacaacagcaactttgcttggactggtgccaccaaataccatctaaatggaagaaattcattggttaatcccggtgtcgccatggcaacccacaaggacgacgaggaacgcttcttcccttcgagcggagtcctgatttttggaaaaactggagcagctaataagactacactggaaaatgtgttaatgacaaatgaagaggaaattcgtcctaccaacccggtagccaccgaggaatacgggactgttagcagcaacctgcaggcggctaacactgcagcccagacacaagttgtcaacaaccagggagccttacctggtatggtctggcagaaccgggacgtgtacctgcagggtcccatctgggccaagattcctcacacggacggcaactttcacccgtctccgctgatgggcggctttggactgaagcatccgcctcctcagatcctgatcaaaaacactcctgttcctgctaatcccccggaggtgtttacgcctgccaagtttgcttctttcatcacacagtacagcaccggccaggtcagcgtggagatcgagtgggagctgcagaaggagaacagcaagcgctggaacccagagattcagtatacctccaattttgacgaacagactggtgtggactttgccgttgacagccagggtgtttattctgagcctcgccccattggtactcgttacctcacccgtaatctgtaa

SEQ ID NO: 455 - protein, 737 aa, Artificial Sequence
  source: /note="Description of Artificial Sequence: Synthetic polypeptide"
MAADGYLPDWLEDNLSEGIREWWDLKPGAPKPKANQQKQDDGRGLVLPGYKYLGPFNGLDKGEPVSAADAAALEHDKACDQRLKAGDNPYLRYNHADAEFQERLQEDTSFGGNLGRAVFQAKKRVLEPLGLVEEAAKTAPGKKGPVEPSPQRSPDSSTGIGKKGQQPARKRLNFGQTGDSESVPDPQPIGEPPAGPSGLGSGTMAAGGGAPMADNNEGADGVGNASGNWHCDSTWLGDRVITTSTRTWALPTYNNHLYKQISSQSAGSTNDNVYFGYSTPWGYFDFNRFHCHFSPRDWQRLINNNWGFRPKKLNFKLFNIQVKEVTTNDGVTTIANNLTSTVQVFSDSEYQLPYVLGSAHQGCLPPFPADVFMIPQYGYLTLNNGSQSVGRSSFYCLEYFPSQMLRTGNNFTFSYTFEDVPFHSSYAHSQSLDRLMNPLIDQYLYYLARTQSNAGGTAGNRELQFYQGGPTTMAEQAKNWLPGPCFRQQRVSKTLDQNNNSNFAWTGATKYHLNGRNSLVNPGVAMATHKDDEERFFPSSGVLIFGKTGAANKTTLENVLMTNEEEIRPTNPVATEEYGTVSSNLQAANTAAQTQVVNNQGALPGMVWQNRDVYLQGPIWAKIPHTDGNFHPSPLMGGFGLKHPPPQILIKNTPVPANPPEVFTPAKFASFITQYSTGQVSVEIEWELQKENSKRWNPEIQYTSNFDEQTGVDFAVDSQGVYSEPRPIGTRYLTRNL

SEQ ID NO: 456 - DNA, 2214 bp, Artificial Sequence
  source: /note="Description of Artificial Sequence: Synthetic polynucleotide"
atggctgccgatggttatcttccagattggctcgaggacaacctctctgagggcattcgcgagtggtgggacctgaaacctggagccccgaaacccaaagccaaccagcaaaagcaggacgacggccggggtctggtgcttcctggctacaagtacctcggacccttcaacggactcgacaagggggagcccgtcaacgcggcggacgcagcggccctcgagcacgacaaggcctacgaccagcagctcaaagcgggtgacaatccgtacctgcggtataaccacgccgacgccgagtttcaggagcgtctgcaagaagatacgtcttttgggggcaacctcgggcgagcagtcttccaggccaagaagcgggttctcgaacctctcggtctggttgaggaagctgctaagacggctcctggaaagaagagaccggtagaaccgtcacctcagcgttcccccgactcctccacgggcatcggcaagaaaggccagcagcccgctagaaagagactgaactttgggcagactggcgactcagagtcagtccccgaccctcaaccaatcggagaaccaccagcaggcccctctggtctgggatctggtacaatggctgcaggcggtggcgctccaatggcagacaataacgaaggcgccgacggagtgggtaatgcctcaggaaattggcattgcgattccacatggctgggcgacagagtcatcaccaccagcacccgaacctgggctttgcccacctacaacaaccacctctacaagcaaatctccagtcagtcagcaggtagcaccaacgacaacgtctacttcggctacagcaccccctgggggtattttgacttcaacagattccactgtcacttctcaccacgtgactggcagcggctcatcaacaacaactggggattccggcccaagaagctcaacttcaagctgttcaacatccaggtcaaggaggtcacaacgaatgacggcgtcacgaccatcgccaataaccttaccagcacggttcaggtcttttcggactcggaataccagctgccctacgtcctcggctccgcacaccagggctgcctgcctccgttcccggcggacgtcttcatgattcctcagtacggctacctgactctcaacaacggtagtcaggccgtgggacgttcctccttctactgcctggagtacttcccctctcagatgctgagaacgggcaacaacttttccttcagctacactttcgaggacgtgcctttccacagcagctacgcgcacagccagagtttggacaggctgatgaatcctctcatcgaccagtacctgtactacctgtcaagaacccagtctacgggaggcacagcgggaacccagcagttgctgttttctcaggccgggcctagcaacatgtcgactcaggccagaaactggctgcctggaccctgctacagacagcagcgcgtctccacgacactgtcgcaaaacaacaacagcaactttgcctggactggtgccaccaagtatcatctgaacggcagagactctctggtgaatccgggcgtcgccatggcaaccaacaaggacgacgaggaccgcttcttcccatccagcggcatcctcatgtttggcaagcagggagctggaaaagacaacgtggactatagcaacgtgatgctaaccagcgaggaagaaatcaagaccaccaaccccgtggccacagaacagtatggcgtggtggctgataacctacagcagcaaaacaccgctcctattgtgggggccgtcaacagccagggagccttacctggcatggtctggcagaaccgggacgtgtacctgcagggtcctatttgggccaagattcctcacacagatggcaactttcacccgtctcctttaatgggcggctttggacttaaacatccgcctcctcagatccttatcaaaaacactcctgttcctgcggatcctccaacagcgttcaaccaggccaagctgaattctttcatcacgcagtacagcaccggacaagtcagcgtggagatcgagtgggagctgcagaaggagaacagcaagcgctggaacccagagattcagtatacttccaactactacaaatctacaaatgtggactttgctgttaatactgagggtgcttactctgagcctcgccccattggcactcgttacctcacccgtaatctgtaa

SEQ ID NO: 457 - protein, 737 aa, Artificial Sequence
  source: /note="Description of Artificial Sequence: Synthetic polypeptide"
MAADGYLPDWLEDNLSEGIREWWDLKPGAPKPKANQQKQDDGRGLVLPGYKYLGPFNGLDKGEPVNAADAAALEHDKAYDQQLKAGDNPYLRYNHADAEFQERLQEDTSFGGNLGRAVFQAKKRVLEPLGLVEEAAKTAPGKKRPVEPSPQRSPDSSTGIGKKGQQPARKRLNFGQTGDSESVPDPQPIGEPPAGPSGLGSGTMAAGGGAPMADNNEGADGVGNASGNWHCDSTWLGDRVITTSTRTWALPTYNNHLYKQISSQSAGSTNDNVYFGYSTPWGYFDFNRFHCHFSPRDWQRLINNNWGFRPKKLNFKLFNIQVKEVTTNDGVTTIANNLTSTVQVFSDSEYQLPYVLGSAHQGCLPPFPADVFMIPQYGYLTLNNGSQAVGRSSFYCLEYFPSQMLRTGNNFSFSYTFEDVPFHSSYAHSQSLDRLMNPLIDQYLYYLSRTQSTGGTAGTQQLLFSQAGPSNMSTQARNWLPGPCYRQQRVSTTLSQNNNSNFAWTGATKYHLNGRDSLVNPGVAMATNKDDEDRFFPSSGILMFGKQGAGKDNVDYSNVMLTSEEEIKTTNPVATEQYGVVADNLQQQNTAPIVGAVNSQGALPGMVWQNRDVYLQGPIWAKIPHTDGNFHPSPLMGGFGLKHPPPQILIKNTPVPADPPTAFNQAKLNSFITQYSTGQVSVEIEWELQKENSKRWNPEIQYTSNYYKSTNVDFAVNTEGAYSEPRPIGTRYLTRNL

SEQ ID NO: 458 - DNA, 2217 bp, Artificial Sequence
  source: /note="Description of Artificial Sequence: Synthetic polynucleotide"
atggctgccgatggttatcttccagattggctcgaggacaacctctctgagggcattcgcgagtggtgggacctgaaacctggagccccgaaacccaaagccaaccagcaaaagcaggacgacggccggggtctggtgcttcctggctacaagtacctcggacccttcaacggactcgacaagggggagcccgtcaacgcggcggacgcagcggccctcgagcacgacaaggcctacgaccagcagctcaaagcgggtgacaatccgtacctgcggtataatcacgccgacgccgagtttcaggagcgtctgcaagaagatacgtcttttgggggcaacctcgggcgagcagtcttccaggccaagaagcgggttctcgaacctctcggtctggttgaggaaggcgctaagacggctcctggaaagaagagaccggtagagccgtcaccacagcgttcccccgactcctccacgggcatcggcaagaaaggccagcagcccgccagaaagagactcaatttcggtcagactggcgactcagagtcagtccccgaccctcaacctatcggagaacctccagcagcgccctctagtgtgggatctggtacaatggctgcaggcggtggcgcaccaatggcagacaataacgaaggtgccgacggagtgggtagttcctcgggaaattggcattgcgattccacatggctgggcgacagagtcatcaccaccagcacccgaacctgggccctgcccacctacaacaaccacctctacaagcaaatctccaacgggacctcgggaggcagcaccaacgacaacacctactttggctacagcaccccctgggggtattttgactttaacagattccactgccacttctcaccacgtgactggcagcgactcatcaacaacaactggggattccggcccaagagactcagcttcaagctcttcaacatccaggtcaaagaggtcacgcagaatgaaggcaccaagaccatcgccaataacctcaccagcaccatccaggtgtttacggactcggaataccagctgccgtacgtcctcggctctgcccaccagggctgcctgcctccgttcccggcggacgtcttcatgattcctcagtacggctacctgactctcaacaacggtagtcaggccgtgggacgttcctccttctactgcctggagtacttcccctctcagatgctgagaacgggcaacaacttttccttcagctacactttcgaggacgtgcctttccacagcagctacgcgcacagccagagtttggacaggctgatgaatcctctcatcgaccagtacctgtactacctgtcaagaacccagtctacgggaggcacagcgggaacccagcagttgctgttttctcaggccgggcctagcaacatgtcggctcaggccagaaactggctgcctggaccctgctacagacagcagcgcgtctccacgacactgtcgcaaaacaacaacagcaactttgcctggactggtgccaccaagtatcatctgaacggcagagactctctggtgaatccgggcgtcgccatggcaaccaacaaggacgacgaggaccgcttcttcccatccagcggcatcctcatgtttggcaagcagggagctggaaaagacaacgtggactatagcaacgtgatgctaaccagcgaggaagaaatcaaggccaccaaccccgtggccacagaacagtatggcgtggtggctgataacctacagcagcaaaacaccgctcctattgtgggggccgtcaacagccagggagccttacctggcatggtctggcagaaccgggacgtgtacctgcagggtcctatttgggccaagattcctcacacagatggcaactttcacccgtctcctttaatgggcggctttggacttaaacatccgcctcctcagatcctcatcaaaaacactcctgttcctgcggatcctccaacagcgttcaaccaggccaagctgaattctttcatcacgcagtacagcaccggacaagtcagcgtggagatcgagtgggagctgcagaaggagaacagcaagcgctggaacccagagattcagtatacttccaactactacaaatctacaaatgtggactttgctgttaatactgagggtgtttactctgagcctcgccccattggcactcgttacctcacccgtaatctgtaa

SEQ ID NO: 459 - protein, 738 aa, Artificial Sequence
  source: /note="Description of Artificial Sequence: Synthetic polypeptide"
MAADGYLPDWLEDNLSEGIREWWDLKPGAPKPKANQQKQDDGRGLVLPGYKYLGPFNGLDKGEPVNAADAAALEHDKAYDQQLKAGDNPYLRYNHADAEFQERLQEDTSFGGNLGRAVFQAKKRVLEPLGLVEEGAKTAPGKKRPVEPSPQRSPDSSTGIGKKGQQPARKRLNFGQTGDSESVPDPQPIGEPPAAPSSVGSGTMAAGGGAPMADNNEGADGVGSSSGNWHCDSTWLGDRVITTSTRTWALPTYNNHLYKQISNGTSGGSTNDNTYFGYSTPWGYFDFNRFHCHFSPRDWQRLINNNWGFRPKRLSFKLFNIQVKEVTQNEGTKTIANNLTSTIQVFTDSEYQLPYVLGSAHQGCLPPFPADVFMIPQYGYLTLNNGSQAVGRSSFYCLEYFPSQMLRTGNNFSFSYTFEDVPFHSSYAHSQSLDRLMNPLIDQYLYYLSRTQSTGGTAGTQQLLFSQAGPSNMSAQARNWLPGPCYRQQRVSTTLSQNNNSNFAWTGATKYHLNGRDSLVNPGVAMATNKDDEDRFFPSSGILMFGKQGAGKDNVDYSNVMLTSEEEIKATNPVATEQYGVVADNLQQQNTAPIVGAVNSQGALPGMVWQNRDVYLQGPIWAKIPHTDGNFHPSPLMGGFGLKHPPPQILIKNTPVPADPPTAFNQAKLNSFITQYSTGQVSVEIEWELQKENSKRWNPEIQYTSNYYKSTNVDFAVNTEGVYSEPRPIGTRYLTRNL

SEQ ID NO: 460 - DNA, 2217 bp, Artificial Sequence
  source: /note="Description of Artificial Sequence: Synthetic polynucleotide"
atggctgccgatggttatcttccagattggctcgaggacaacctctctgagggcattcgcgagtggtgggacctgaaacctggagccccgaaacccaaagccaaccagcaaaagcaggacgacggccggggtctggtgcttcctggctacaagcacctcggacccttcaacggactcgacaagggggagcccgtcaacgcggcggacgcagcggccctcgagcacgacaaggcctacgaccagcagctcaaagcgggtgacaatccgtacctgcggtataatcacgctgacgccgagtttcaggagcgtctgcaagaagatacgtcttttgggggcaacctcgggcgagcagtcttccaggccaagaagcgggttctcgaacctctcggtctggttgaggaaggcgctaagacggctcctggaaagaagagaccggtagagccgtcaccacagcgttcccccgactcctccacgggcatcggcaagaaaggccagcagcccgccagaaagagactcaatttcggtcagactggcgactcagagtcagtccccgaccctcaacctatcggagaacctccagcagcgccctctagtgtgggatctggtacaatggctgcaggcggtggcgcaccaatggcagacaataacgaaggtgccgacggagtgggtagttcctcgggaaattggcattgcgattccacatggctgggcgacagagtcatcaccaccagcacccgaacctgggccctgcccacctacaacaaccacctctacaagcaaatctccaacgggacctcgggaggcagcaccaacgacaacacctactttggctacagcaccccctgggggtattttgactttaacagattccactgccacttctcaccacgtgactggcagcgactcatcaacaacaactggggattccggcccaagagactcagcttcaagctcttcaacatccaggtcaaagaggtcacgcagaatgaaggcaccaagaccatcgccaataaccttaccagcacggttcaggtcttttcggactcggaataccagctgccctacgtcctcggctccgcacaccagggctgcctgcctccgttcccggcggacgtcttcatgattccccagtacggctacctgactctgaacaatggcagccaatcggtgggtcgttcctctttctactgcctggaatatttcccttctcaaatgctgagaacgggcaacaacttcaccttcagctacaccttcgaggacgttcccttccacagcagctacgcacacagccagagcctggaccggctgatgaatcctcttatcgaccagtacctgtattacctggccagaacacagagcaacgcaggaggcacagctggcaatcgggaactgcagttttatcagggcgggcctaccaccatggccgaacaagccaaaaactggctgcctggaccttgcttccggcaacaaagagtctccaagacgctggatcaaaacaacaacagcaactttgcttggactggtgccaccaaataccatctaaatggaagaaattcattggttaatcccggtgtcgccatggcaacccacaaggacgacgaggaacgcttcttcccttcgagcggagtcctgatttttggaaaaactggagcagctaataagactacactggaaaatgtgttaatgacaaatgaagaggaaattcgtcctaccaacccggtagccaccgaggaatacgggactgttagcagcaacctgcaggcggctaacactgcagcccagacacaagttgtcaacaaccagggagccttacctggtatggtctggcagaaccgggacgtgtacctgcagggtcccatctgggccaagattcctcacacggacggcaactttcacccgtctccgctgatgggcggctttggactgaagcatccgcctcctcagatcctgatcaaaaacactcctgttcctgctaatcccccggaggtgtttacgcctgccaagtttgcttctttcatcacacagtacagcaccggccaggtcagcgtggagatcgagtgggagctgcagaaggagaacagcaagcgctggaacccagagattcagtatacctccaattttgacaaacagactggtgtggactttgccgttgacagccagggtgtttattctgagcctcgccccattggtactcgttacctcacccgtaatctgtaa

SEQ ID NO: 461 - protein, 738 aa, Artificial Sequence
  source: /note="Description of Artificial Sequence: Synthetic polypeptide"
MAADGYLPDWLEDNLSEGIREWWDLKPGAPKPKANQQKQDDGRGLVLPGYKHLGPFNGLDKGEPVNAADAAALEHDKAYDQQLKAGDNPYLRYNHADAEFQERLQEDTSFGGNLGRAVFQAKKRVLEPLGLVEEGAKTAPGKKRPVEPSPQRSPDSSTGIGKKGQQPARKRLNFGQTGDSESVPDPQPIGEPPAAPSSVGSGTMAAGGGAPMADNNEGADGVGSSSGNWHCDSTWLGDRVITTSTRTWALPTYNNHLYKQISNGTSGGSTNDNTYFGYSTPWGYFDFNRFHCHFSPRDWQRLINNNWGFRPKRLSFKLFNIQVKEVTQNEGTKTIANNLTSTVQVFSDSEYQLPYVLGSAHQGCLPPFPADVFMIPQYGYLTLNNGSQSVGRSSFYCLEYFPSQMLRTGNNFTFSYTFEDVPFHSSYAHSQSLDRLMNPLIDQYLYYLARTQSNAGGTAGNRELQFYQGGPTTMAEQAKNWLPGPCFRQQRVSKTLDQNNNSNFAWTGATKYHLNGRNSLVNPGVAMATHKDDEERFFPSSGVLIFGKTGAANKTTLENVLMTNEEEIRPTNPVATEEYGTVSSNLQAANTAAQTQVVNNQGALPGMVWQNRDVYLQGPIWAKIPHTDGNFHPSPLMGGFGLKHPPPQILIKNTPVPANPPEVFTPAKFASFITQYSTGQVSVEIEWELQKENSKRWNPEIQYTSNFDKQTGVDFAVDSQGVYSEPRPIGTRYLTRNL

SEQ ID NO: 462 - protein, 737 aa, Artificial Sequence
  source: /note="Description of Artificial Sequence: Synthetic polypeptide"
MAADGYLPDWLEDNLSEGIREWWDLKPGAPKPKANQQKQDDGRGLVLPGYKYLGPFNGLDKGEPVNAADAAALEHDKAYDQQLKAGDNPYLRYNHADAEFQERLQEDTSFGGNLGRAVFQAKKRVLEPLGLVEEAAKTAPGKKRPVEPSPQRSPDSSTGIGKKGQQPARKRLNFGQTGDSESVPDPQPIGEPPAGPSGLGSGTMAAGGGAPMADNNKGADGVGNASGNWHCDSTWLGDRVITTSTRTWALPTYNNHLYKQISSQSAGSTNDNVYFGYSTPWGYFDFNRFHCHFSPRDWQRLINSNWGFRPKKLNFKLFNIQVKEVTTNDGVTTIANNLTSTVQVFSDSEYQLPYVLGSAHQGCLPPFPADVFMIPQYGYLTLNNGSQSVGRSSFYCLEYFPSQMLRTGNNFTFSYTFEDVPFHSSYAHSQSLDRLMNPLIDQYLYYLARTQSNAGGTAGNRELQFYQGGPTTMAEQAKNWLPGPCFRQQRVSKTLDQNNNSNFAWTGATKYHLNGRNSLVNPGVAMATHKDDEERFFPSSGVLIFGKTGAANKTTLENVLMTNEEEIRPTNPVATEEYGTVSSNLQAANTAAQTQVVNNQGALPGMVWQNRDVYLQGPIWAKIPHTDGNFHPSPLMGGFGLKHPPPQILIKNTPVPANPPEVFTPAKFASFITQYSTGQVSVEIEWELQKENSKRWNPEIQYTSNFDKQTGVDFAVDSQGVYSEPRPIGTRYLTRNL

SEQ ID NO: 463 - protein, 737 aa, Artificial Sequence
  source: /note="Description of Artificial Sequence: Synthetic polypeptide"
MAADGYLPDWLEDNLSEGIREWWDLKPGAPKPKANQQKQDDGRGLVLPGYKYLGPFNGLDKGEPVNAADAAALEHDKAYDQQLKAGDNPYLRYNHADAEFQERLQEDTSFGGNLGRAVFQAKKRVLEPLGLVEEAAKTAPGKKRPVEPSPQRSPDSSTGIGKKGQQPARKRLNFGQTGDSESVPDPQPIGEPPAGPSGLGSGTMAAGGGAPMADNNEGADGVGNASGNWHCDSTWLGDRVITTSTRTWALPTYNNHLYKQISSQSAGSTNDNVYFGYSTPWGYFDFNRFHCHFSPRDWQRLINSNWGFRPKKLNFKLFNIQVKEVTTNDGVTTIANNLTSTVQVFSDSEYQLPYVLGSAHQGCLPPFPADVFMIPQYGYLTLNNGSQSVGRSSFYCLEYFPSQMLRTGNNFTFSYTFEDVPFHSSYAHSQSLDRLMNPLIDQYLYYLARTQSNAGGTAGNRELQFYQGGPTTMAEQAKNWLPGPCFRQQRVSKTLDQNNNSNFAWTGATKYHLNGRNSLVNPGVAMATHKDDEERFFPSSGVLIFGKTGAANKTTLENVLMTNEEEIRPTNPVATEEYGTVSSNLQAANTAAQTQVVNNQGALPGMVWQNRDVYLQGPIWAKIPHTDGNFHPSPLMGGFGLKHPPPQILIKNTPVPANPPEVFTPAKFASFITQYSTGQVSVEIEWELQKENSKRWNPEIQYTSNFDKQTGVDFAVDSQGVYSEPRPIGTRYLTRNL

SEQ ID NO: 464 - protein, 737 aa, Artificial Sequence
  source: /note="Description of Artificial Sequence: Synthetic polypeptide"
MAADGYLPDWLEDNLSEGIREWWDLKPGAPKPKANQQKQDDGRGLVLPGYKYLGPFNGLDKGEPVNAADAAALEHDKAYDQQLKAGDNPYLRYNHADAEFQERLQEDTSFGGNLGRAVFQAKKRVLEPLGLVEEAAKTAPGKKRPVEPSPQRSPDSSTGIGKKGQQPARKRLNFGQTGDSESVPDPQPIGEPPAGPSGLGSGTMAAGGGAPMADNNEGADGVGNASGNWHCDSTWLGDRVITTSTRTWALPTYNNHLYKQISSQSAGSTNDNVYFGYSTPWGYFDFNRFHCHFSPRDWQRLINNNWGFRPKKLNFKLFNIQVKEVTTNDGVTTIANNLTSTVQVFSDSEYQLPYVLGSAHQGCLPPFPADVFMIPQYGYLTLNNGSQSVGRSSFYCLEYFPSQMLRTGNNFTFSYTFEDVPFHSSYAHSQSLDRLMNPLIDQYLYYLARTQSNAGGTAGNRELQFYQGGPTTMAEQAKNWLPGPCFRQQRVSKTLDQNNNSNFAWTGATKYHLNGRNSLVNPGVAMATHKDDEERFFPSSGVLIFGKTGAANKTTLENVLMTNEEEIRPTNPVATEEYGTVSSNLQAANTAAQTQVVNNQGALPGMVWQNRDVYLQGPIWAKIPHTDGNFHPSPLMGGFGLKHPPPQILIKNTPVPANPPEVFTPAKFASFITQYSTGQVSVEIEWELQKENSKRWNPEIQYTSNFDKQTGVDFAVDSQGVYSEPRPIGTRYLTRNL

SEQ ID NO: 465 - protein, 737 aa, Artificial Sequence
  source: /note="Description of Artificial Sequence: Synthetic polypeptide"
MAADGYLPDWLEDNLSEGIREWWDLKPGAPKPKANQQKQDDGRGLVLPGYKYLGPFNGLDKGEPVNAADAAALEHDKAYDQQLKAGDNPYLRYNHADAEFQERLQEDTSFGGNLGRAVFQAKKRVLEPLGLVEEAAKTAPGKKRPVEPSPQRSPDSSTGIGKKGQQPARKRLNFGQTGDSESVPDPQPIGEPPAGPSGLGSGTMAAGGGAPMADNNKGADGVGNASGNWHCDSTWLGDRVITTSTRTWALPTYNNHLYKQISSQSAGSTNDNVYFGYSTPWGYFDFNRFHCHFSPRDWQRLINNNWGFRPKKLNFKLFNIQVKEVTTNDGVTTIANNLTSTVQVFSDSEYQLPYVLGSAHQGCLPPFPADVFMIPQYGYLTLNNGSQSVGRSSFYCLEYFPSQMLRTGNNFTFSYTFEDVPFHSSYAHSQSLDRLMNPLIDQYLYYLARTQSNAGGTAGNRELQFYQGGPTTMAEQAKNWLPGPCFRQQRVSKTLDQNNNSNFAWTGATKYHLNGRNSLVNPGVAMATHKDDEERFFPSSGVLIFGKTGAANKTTLENVLMTNEEEIRPTNPVATEEYGTVSSNLQAANTAAQTQVVNNQGALPGMVWQNRDVYLQGPIWAKIPHTDGNFHPSPLMGGFGLKHPPPQILIKNTPVPANPPEVFTPAKFASFITQYSTGQVSVEIEWELQKENSKRWNPEIQYTSNFDKQTGVDFAVDSQGVYSEPRPIGTRYLTRNL

SEQ ID NO: 466 - DNA, 2214 bp, Artificial Sequence
  source: /note="Description of Artificial Sequence: Synthetic polynucleotide"
atggctgctgacggttatcttccagattggctcgaggacaacctctctgagggcattcgcgagtggtgggacctgaaacctggagcccccaagcccaaggccaaccagcagaagcaggacgacggccggggtctggtgcttcctggctacaagtacctcggacccttcaacggactcgacaagggggagcccgtcaacgcggcggacgcagcggccctcgagcacgacaaggcctacgaccagcagctcaaagcgggtgacaatccgtacctgcggtataaccacgccgacgccgagtttcaggagcgtctgcaagaagatacgtcttttgggggcaacctcgggcgagcagtcttccaggccaagaagcgggttctcgaacctctcggtctggttgaggaagctgctaagacggctcctggaaagaagagaccggtagaaccgtcacctcagcgttcccccgactcctccacgggcatcggcaagaaaggccagcagcccgctagaaagagactgaactttgggcagactggcgactcagagtcagtccccgaccctcaaccaatcggagaaccaccagcaggcccctctggtctgggatctggtacaatggctgcaggcggtggcgcaccaatggctgacaataacaagggcgccgacggagtgggtaatgcctcaggaaattggcattgcgattccacatggctgggcgacagagtcatcaccaccagcacccgaacctgggctttgcccacctacaacaaccacctctacaagcaaatctccagtcagtcagcaggtagcaccaacgacaacgtctacttcggctacagcaccccctgggggtattttgacttcaacagattccactgtcacttctcaccacgtgactggcagcggctcatcaacagcaactggggattccggcccaagaagctcaacttcaagctgttcaacatccaggtcaaggaggtcacaacgaatgacggcgtcacgaccatcgccaataaccttaccagcacggttcaggtcttttcggactcggaataccagctgccctacgtcctcggctccgcacaccagggctgcctgcctccgttcccggcggacgtcttcatgattccccagtacggctacctgactctgaacaatggcagccaatcggtgggtcgttcctctttctactgcctggaatatttcccttctcaaatgctgagaacgggcaacaacttcaccttcagctacaccttcgaggacgttcccttccacagcagctacgcacacagccagagcctggaccggctgatgaatcctcttatcgaccagtacctgtattacctggccagaacacagagcaacgcaggaggcacagctggcaatcgggaactgcagttttatcagggcgggcctaccaccatggccgaacaagccaaaaactggctgcctggaccttgcttccggcaacaaagagtctccaagacgctggatcaaaacaacaacagcaactttgcttggactggtgccaccaaataccatctaaatggaagaaattcattggttaatcccggtgtcgccatggcaacccacaaggacgacgaggaacgcttcttcccttcgagcggagtcctgatttttggaaaaactggagcagctaataagactacactggaaaatgtgttaatgacaaatgaagaggaaattcgtcctaccaacccggtagccaccgaggaatacgggactgttagcagcaacctgcaggcggctaacactgcagcccagacacaagttgtcaacaaccagggagccttacctggtatggtctggcagaaccgggacgtgtacctgcagggtcccatctgggccaagattcctcacacggacggcaactttcacccgtctccgctgatgggcggctttggactgaagcatccgcctcctcagatcctgatcaaaaacactcctgttcctgctaatcccccggaggtgtttacgcctgccaagtttgcttctttcatcacacagtacagcaccggccaggtcagcgtggagatcgagtgggagctgcagaaggagaacagcaagcgctggaacccagagattcagtatacctccaattttgacaaacagactggtgtggactttgccgttgacagccagggtgtttattctgagcctcgccccattggtactcgttacctcacccgtaatctgtaa

SEQ ID NO: 467 - DNA, 2217 bp, Artificial Sequence
  source: /note="Description of Artificial Sequence: Synthetic polynucleotide"
atggctgccgatggttatcttccagattggctcgaggacaacctctctgagggcattcgcgagtggtgggacctgaaacctggagccccgaaacccaaagccaaccagcaaaagcaggacgacggccggggtctggtgcttcctggctacaagtacctcggacccttcaacggactcgacaagggggagcccgtcaacgcggcggacgcagcggccctcgagcacgacaaggcctacgaccagcagctcaaagcgggtgacaatccgcacctgcggtataatcacgccgacgccgagtttcaggagcgtctgcaagaagatacgtcttttgggggcaacctcgggcgagcagtcttccaggccaagaagcgggttctcgaacctctcggtctggttgaggaaggcgctaagacggctcctggaaagaagagaccggtagagccgtcaccacagcgttcccccgactcctccacgggcatcggcaagaaaggccagcagcccgccagaaagagactcaatttcggtcagactggcgactcagagtcagtccccgaccctcaacttatcggagaacctccagcagcgccctctagtgtgggatctggtacaatggctgcaggcggtggcgcaccaatggcagacaataacgaaggtgccgacggagtgggtagttcctcgggaaattggcattgcgattccacatggctgggcgacagagtcatcaccaccagcacccgaacctgggccctgcccacctacaacaaccacctctacaagcaaatctccaacgggacctcgggaggcagcaccaacgacaacacctactttggctacagcaccccctgggggtattttgactttaacagattccactgccacttctcaccacgtgactggcagcgactcatcaacaacaactggggattccggcccaagagactcagcttcaagctcttcaacatccaggtcaaagaggtcacgcagaatgaaggcaccaagaccatcgccaataacctcaccagcaccatccaggtgtttacggactcggagtaccagctgccgtacgtcctcggctctgcccaccagggctgcctgcctccgttcccggcggacgtcttcatgattcctcagtacggcaacctgactctcaacaacggtagtcaggccgtgggacgttcctccttctactgcctggagtacttcccctctcagatgctgagaacgggcaacaacttttccttcagctacactttcgaggacgtgcctttccacagcagctacgcgcacagccagagtttggacaggctgatgaatcctctcatcgaccagtacctgtactacctgtcaagaacccagtctacgggaggcacagcgggaacccagcagttgctgttttctcaggccgggcctagcaacatgtcggctcaggccagaaactggctgcctggaccctgctacagacagcagcgcgtctccacgacactgtcgcaaaacaacaacagcaactttgcctggactggtgccaccaagtatcatctgaacggcagagactctctggtgaatccgggcgtcgccatggcaaccaacaaggacgacgaggaccgcttcttcccatccagcggcatcctcatgtttggcaagcagggagctggaaaagacaacatgggctatagcaacgtgatgctaaccagcgaggaagaaatcaagaccaccaaccccgtggccacagaacagtatggcgtggtggctgataacctacagcagcaaaacaccgctcctattgtgggggccgtcaacagccagggagccttacctggcatggtctggcagaaccgggacgtgtacctgcagggtcctatttgggccaagattcctcacacagatggcaactttcacccgtctcctttaatgggcggctttggacttaaacatccgcctcctcagatcctcatcaaaaacactcctgttcctgcggatcctccaacagcgttcaaccaggccaagctgaattctttcatcacgcagtacggcaccggacaagtcagcgtggagatcgagtgggagctgcagaaggagaacagcaagcgctggaacccagagattcagtatacttccaactactacaaatctacaaatgtggactttgctgttaatactgagggtgtttactctgagcctcgccccattggcactcgttacctcacccgtaatctgtaa

SEQ ID NO: 468 - protein, 738 aa, Artificial Sequence
  source: /note="Description of Artificial Sequence: Synthetic polypeptide"
MAADGYLPDWLEDNLSEGIREWWDLKPGAPKPKANQQKQDDGRGLVLPGYKYLGPFNGLDKGEPVNAADAAALEHDKAYDQQLKAGDNPHLRYNHADAEFQERLQEDTSFGGNLGRAVFQAKKRVLEPLGLVEEGAKTAPGKKRPVEPSPQRSPDSSTGIGKKGQQPARKRLNFGQTGDSESVPDPQLIGEPPAAPSSVGSGTMAAGGGAPMADNNEGADGVGSSSGNWHCDSTWLGDRVITTSTRTWALPTYNNHLYKQISNGTSGGSTNDNTYFGYSTPWGYFDFNRFHCHFSPRDWQRLINNNWGFRPKRLSFKLFNIQVKEVTQNEGTKTIANNLTSTIQVFTDSEYQLPYVLGSAHQGCLPPFPADVFMIPQYGNLTLNNGSQAVGRSSFYCLEYFPSQMLRTGNNFSFSYTFEDVPFHSSYAHSQSLDRLMNPLIDQYLYYLSRTQSTGGTAGTQQLLFSQAGPSNMSAQARNWLPGPCYRQQRVSTTLSQNNNSNFAWTGATKYHLNGRDSLVNPGVAMATNKDDEDRFFPSSGILMFGKQGAGKDNMGYSNVMLTSEEEIKTTNPVATEQYGVVADNLQQQNTAPIVGAVNSQGALPGMVWQNRDVYLQGPIWAKIPHTDGNFHPSPLMGGFGLKHPPPQILIKNTPVPADPPTAFNQAKLNSFITQYGTGQVSVEIEWELQKENSKRWNPEIQYTSNYYKSTNVDFAVNTEGVYSEPRPIGTRYLTRNL

SEQ ID NO: 469 - DNA, 2217 bp, Artificial Sequence
  source: /note="Description of Artificial Sequence: Synthetic polynucleotide"
atggctgccgatggttatcttccagattggctcgaggacaacctctctgagggcattcgcgagtggtgggacctgaaacctggagccccgaaacccaaagccaaccagcaaaagcaggacgacggccggggtctggtgcttcctggctacaagtacctcggacccttcaacggactcgacaagggggagcccgtcaacgcggcggacgcagcggccctcgagcacgacaaggcctacgaccagcagctcaaagcgggtgacaatccgtacctgcggtataatcacgccgacgccgagtttcaggagcgtctgcaagaagatacgtcttttgggggcaacctcgggcgagcagtcttccaggccaagaagcgggttctcgaacctctcggtctggttgaggaaggcgctaagacggctcctggaaagaagagaccggtagagccgtcaccacagcgttcccccgactcctccacgggcatcggcaagaaaggccagcagcccgccggaaagagactcaatttcggtcagactggcgactcagagtcagtccccgaccctcaacctatcggagaacctccagcagcgccctctagtgtgggatctggtacaatggctgcaggcggtggcgcaccaatggcagacaataacgaaggtgccgacggagtgggtagttcctcgggaaattggcattgcgattccacatggctgggcgacagagtcatcaccaccagcacccgaacctgggccctgcccacctacaacaaccacctctacaagcaaatctccaacgggacctcgggaggcagcaccaacgacaacacctactttggctacagcaccccctgggggtattttgactttaacagattccactgccacttctcaccacgtgactggcagcgactcatcaacaacaactggggattccggcccaagagactcagcttcaagctcttcaacatccaggtcaaagaggtcacgcagaatgaaggcaccaagaccatcgccaataacctcaccagcaccatccaggtgtttacggactcggaataccagctgccgtacgtcctcggctctgcccaccagggctgcctgcctccgttcccggcggacgtcttcatgattcctcagtacggctacctgactctcaacaacggtagtcaggccgtgggacgttcctccttctactgcctggagtacttcccctctcagatgctgagaacgggcaacaacttttccttcagctacactttcgaggacgtgcctttccacagcagctacgcgcacagccagagtttggacaggctgatgaatcctctcgtcgaccagtacctgtactacctgtcaagaacccagtctacgggaggcacagcgggaacccagcagttgctgttttctcaggccgggcctagcaacatgtcggctcaggccagaaactggctgcctggaccctgctacagacagcagcgcgtctccacgacactgtcgcaaaacaacaacagcaactttgcctggactggtgccaccaagtatcatctgaacggcagagactctctggtgaatccgggcgtcgccatggcaaccaacaaggacgacgaggaccgcttcttcccatccagcggcatcctcatgtttggcaagcagggagctggaaaagacaacgtggactatagcaacgtgatgctaaccagcgaggaagaaatcaagaccaccaaccccgtggccacagaacagtatggcgtggtggctgataacctacagcagcaaaacaccgctcctattgtgggggccgtcaacagccagggagccttacctggcatggtctggcagaaccgggacgtgtacctgcagggtcctatttgggccaagattcctcacacagatggcaactttcacccgtctcctttaatgggcggctttggacttaaacatccgcctcctcagatcctcatcaaaaacactcctgttcctgcggatcctccaacagcgttcaaccaggccaagctgaattctttcatcacgcagtacagcaccggacaagtcagcgtggagatcgagtgggagctgcagaaggagaacagcaagcgctggagcccagagattcagtatacttccaactactacaaatctacaaatgtggactttgctgttaatactgagggtgtttactctgagcctcgccccattggcactcgttacctcacccgtaatctgtaa

SEQ ID NO: 470 - protein, 738 aa, Artificial Sequence
  source: /note="Description of Artificial Sequence: Synthetic polypeptide"
MAADGYLPDWLEDNLSEGIREWWDLKPGAPKPKANQQKQDDGRGLVLPGYKYLGPFNGLDKGEPVNAADAAALEHDKAYDQQLKAGDNPYLRYNHADAEFQERLQEDTSFGGNLGRAVFQAKKRVLEPLGLVEEGAKTAPGKKRPVEPSPQRSPDSSTGIGKKGQQPAGKRLNFGQTGDSESVPDPQPIGEPPAAPSSVGSGTMAAGGGAPMADNNEGADGVGSSSGNWHCDSTWLGDRVITTSTRTWALPTYNNHLYKQISNGTSGGSTNDNTYFGYSTPWGYFDFNRFHCHFSPRDWQRLINNNWGFRPKRLSFKLFNIQVKEVTQNEGTKTIANNLTSTIQVFTDSEYQLPYVLGSAHQGCLPPFPADVFMIPQYGYLTLNNGSQAVGRSSFYCLEYFPSQMLRTGNNFSFSYTFEDVPFHSSYAHSQSLDRLMNPLVDQYLYYLSRTQSTGGTAGTQQLLFSQAGPSNMSAQARNWLPGPCYRQQRVSTTLSQNNNSNFAWTGATKYHLNGRDSLVNPGVAMATNKDDEDRFFPSSGILMFGKQGAGKDNVDYSNVMLTSEEEIKTTNPVATEQYGVVADNLQQQNTAPIVGAVNSQGALPGMVWQNRDVYLQGPIWAKIPHTDGNFHPSPLMGGFGLKHPPPQILIKNTPVPADPPTAFNQAKLNSFITQYSTGQVSVEIEWELQKENSKRWSPEIQYTSNYYKSTNVDFAVNTEGVYSEPRPIGTRYLTRNL

SEQ ID NO: 471 - DNA, 2217 bp, Artificial Sequence
  source: /note="Description of Artificial Sequence: Synthetic polynucleotide"
atggttgccgatggttatcttccagattggctcgaggacaacctctctgagggcattcgcgagtggtgggacctgaaacctggagccccgaaacccaaagccaaccagcaaaagcagggcgacggccggggtctggtgcttcctggctacaagtacctcggacccttcaacggactcgacaagggggagcccgtcaacgcggcggacgcagcggccctcgagcacgacaaggcctacgaccagcagcttaaagcgggtgacaatccgtacctgcggtataatcacgccgacgccgagcttcaggagcgtctgcaagaagatacgtcttttgggggcaacctcgggcgagcagtcttccaggccaagaagcgggttctcgaacctctcggtctggttgaggaaggcgctaagacggctcctggaaagaagagaccggtagagccgtcaccacagcgttcccccgactcctccacgggcatcggcaagaaaggccagcagcccgccagaaagagactcaatttcggtcagactggcgactcagagtcagtccccgaccctcaacctatcggagaacctccagcagcgccctctagtgtgggatctggtacaatggctgcaggcggtggcgcgccaatggcagacaataacgaaggtgccgacggagtgggtagttcctcgggaaattggcattgcgattccacatggctgggcgacagagtcatcaccaccagcacccgaacctgggccctgcccacctacaacaaccacctctacaagcaaatctccaacgggacctcgggaggcagcaccaacgacaacacctactttggctacagcaccccctgggggtattttgactttaacagattccactgccacttctcaccacgtgactggcagcgactcatcaacaacaactggggattccggcccaagagactcagcttcaagctcttcaacatccaggtcaaagaggtcacgcagaatgaaggcaccaagaccatcgccaataacctcaccagcaccatccaggtgtttacggactcggaataccagctgccgtacgtcctcggctctgcccaccagggctgccagcctccgttcccggcggacgtcttcatgattcctcagtacggctacctgactctcaacaacggtagtcaggccgtgggacgttcctccttctactgcctggagtacttcccctctcagatgctgagaacgggcaacaacttttccttcagctacactttcgaggacgtgcctttccacagcagctacgcgcacagccagagtttggacaggctgatgaatcctctcatcgaccagtacctgtactacctgtcaagaacccagtctacgggaggcacagcgggaacccagcagttgctgttttctcaggccgggcctagcaacatgtcggctcaggccagaaactggctgcctggaccctgctacagacagcagcgcgtctccacgacactgtcgcaaaacaacaacagcaactttgcctggactggtgccaccaagtatcatctgaacggcagagactctctggtgaatccgggcgtcgccatggcaaccaacaaggacgacgaggaccgcttcttcccatccagcggcatcctcatgtttggcaagcagggagctggaaaagacaacgtggactatagcaacgtgatgctaaccagcgaggaagaaatcaagaccaccaaccccgtggccacagaacagtatggcgtggtggctgataacctacagcagcaaaacaccgctcctattgtgggggccgtcaacagccagggagccttacctggcatggtctggcagaaccgggacgtgtacctgcagggtcctatttgggccaagattcctcacacagatggcaactttcacccgtctcctttaatgggcggctttggacttaaacatccgcctcctcagatcctcatcaaaaacactcctgttcctgcggatcctccaacagcgttcaaccaggccaagctgaattctttcatcacgcagtacagcaccggacaagtcagcgtggagatcgagtgggagccgcagaaggagaacagcaagcgctggaacccagagattcagtatacttccaactactacaaatctacaaatgtggactttgctgttaatactgagggtgtttactctgagcctcgccccattggcactcgttacctcacccgtaatctgtaa

SEQ ID NO: 472 - protein, 738 aa, Artificial Sequence
  source: /note="Description of Artificial Sequence: Synthetic polypeptide"
MVADGYLPDWLEDNLSEGIREWWDLKPGAPKPKANQQKQGDGRGLVLPGYKYLGPFNGLDKGEPVNAADAAALEHDKAYDQQLKAGDNPYLRYNHADAELQERLQEDTSFGGNLGRAVFQAKKRVLEPLGLVEEGAKTAPGKKRPVEPSPQRSPDSSTGIGKKGQQPARKRLNFGQTGDSESVPDPQPIGEPPAAPSSVGSGTMAAGGGAPMADNNEGADGVGSSSGNWHCDSTWLGDRVITTSTRTWALPTYNNHLYKQISNGTSGGSTNDNTYFGYSTPWGYFDFNRFHCHFSPRDWQRLINNNWGFRPKRLSFKLFNIQVKEVTQNEGTKTIANNLTSTIQVFTDSEYQLPYVLGSAHQGCQPPFPADVFMIPQYGYLTLNNGSQAVGRSSFYCLEYFPSQMLRTGNNFSFSYTFEDVPFHSSYAHSQSLDRLMNPLIDQYLYYLSRTQSTGGTAGTQQLLFSQAGPSNMSAQARNWLPGPCYRQQRVSTTLSQNNNSNFAWTGATKYHLNGRDSLVNPGVAMATNKDDEDRFFPSSGILMFGKQGAGKDNVDYSNVMLTSEEEIKTTNPVATEQYGVVADNLQQQNTAPIVGAVNSQGALPGMVWQNRDVYLQGPIWAKIPHTDGNFHPSPLMGGFGLKHPPPQILIKNTPVPADPPTAFNQAKLNSFITQYSTGQVSVEIEWEPQKENSKRWNPEIQYTSNYYKSTNVDFAVNTEGVYSEPRPIGTRYLTRNL

SEQ ID NO: 473 - DNA, 2217 bp, Artificial Sequence
  source: /note="Description of Artificial Sequence: Synthetic polynucleotide"
atggctgccgatggttatcttccagattggctcgaggacaacctctctgagggcattcgcgagtggtgggacctgaaacctggagccccgaaacccaaagccaaccagcaaaagcaggacgacggccggggtctggtgcttcctggctacaagtacctcggacccttcaacggactcgacaagggggagcccgtcaacgcggcggacgcagcggccctcgagcacgacaaggcctacgaccagcagctcaaagcgggtgacaatccgtacctgcggtataatcacgccgacgccgagtttcaggagcgtctgcaagaagatacgtcttttgggggcaacctcgggcgagcagtcttccaggccaagaagcgggttctcgaacctctcggtctggttgaggaaggcgctaagacggctcctggaaagaagagaccggtagagccgtcaccacagcgttcccccgactcctccacgggcatcggcaagaaaggccagcagcccgccagaaagagactcaatttcggtcagactggcgactcagagtcagtccccgaccctcaacctatcggagaacctccagcagcgccctctagtgtgggatctggtacaatggctgcaggcggtggcgcaccaatggcagacaataacgaaggtgccgacggagtgggtagttcctcgggaaattggcattgcgattccacatggctgggcgacagagtcatcaccaccagcacccgaacctgggccctgcccacctacaacaaccacctctacaagcaaatctccaacgggacctcgggaggcagcaccaacgacaacacctactttggctacagcaccccctgggggtattttgactttaacagattccactgccacttctcaccacgtgactggcagcgactcatcaacaacaactggggattccggcccaagagactcagcttcaagctcttcaacatccaggtcaaagaggtcacgcagaatgaaggcaccaagaccatcgccaatagcctcaccagcaccatccaggtgtttacggactcggaataccagctgccgtacgtcctcggctctgcccaccagggctgcctgcctccgttcccggcggacgtcttcatgattcctcagtacggctacctgactcccaacaacggtagtcaggccgtgggacgttcctccttctactgcctggagtacttcccctctcagatgctgagaacgggcaacaacttttccttcagctacactttcgaggacgtgcctttccacagcagctacgcgcacagccagagtttggacaggctgatgaatcctctcatcgaccagtacctgtactacctgtcaagaacccagtctacgggaggcacagcgggaacccagcagttgctgtcttctcaggccgggcctagcaacatgtcggctcaggccagaaactggctgcctggaccctgctacagacagcagcgcgtctccacgacactgtcgcaaaacaacaacagcaactttgcctggactggtgccaccaagtatcatctgaacggcagagactctctggtgaatccgggcgtcgccatggcaaccaacaaggacgacgaggaccgcttcttcccatccagcggcatcctcatgtttggcaagcagggagctggaaaagacaacgtggactatagcaacgtgatgctaaccagcgaggaagaaatcaagaccaccaaccccgtggccacagaacagtatggcgtggtggctgataacctacagcagcaaaacaccgctcctattgtgggggccgtcaacagccagggagccttacctggcatggtctggcagaaccgggacgtgtacttgcagggtcctatttgggccaagattcctcacacagatggcaactttcacccgtctcctttaatgggcggctttggacttaaacatccgcctcctcagatcctcatcaaaaacactcctgttcctgcggatcctccaacagcgttcaaccaggccaagctgaattctttcatcacgcagtacagcaccggacaagtcagcgtggagatcgagtgggagctgcagaaggagaacagcaagcgctggaacccagagattcagtatacttccaactactacaaatctacaaatgtggactttgctgttaatactgagggtgtttactctgagcctcgccccattggcactcgttacctcacccgtaatctgtaa

SEQ ID NO: 474 - protein, 738 aa, Artificial Sequence
  source: /note="Description of Artificial Sequence: Synthetic polypeptide"
MAADGYLPDWLEDNLSEGIREWWDLKPGAPKPKANQQKQDDGRGLVLPGYKYLGPFNGLDKGEPVNAADAAALEHDKAYDQQLKAGDNPYLRYNHADAEFQERLQEDTSFGGNLGRAVFQAKKRVLEPLGLVEEGAKTAPGKKRPVEPSPQRSPDSSTGIGKKGQQPARKRLNFGQTGDSESVPDPQPIGEPPAAPSSVGSGTMAAGGGAPMADNNEGADGVGSSSGNWHCDSTWLGDRVITTSTRTWALPTYNNHLYKQISNGTSGGSTNDNTYFGYSTPWGYFDFNRFHCHFSPRDWQRLINNNWGFRPKRLSFKLFNIQVKEVTQNEGTKTIANSLTSTIQVFTDSEYQLPYVLGSAHQGCLPPFPADVFMIPQYGYLTPNNGSQAVGRSSFYCLEYFPSQMLRTGNNFSFSYTFEDVPFHSSYAHSQSLDRLMNPLIDQYLYYLSRTQSTGGTAGTQQLLSSQAGPSNMSAQARNWLPGPCYRQQRVSTTLSQNNNSNFAWTGATKYHLNGRDSLVNPGVAMATNKDDEDRFFPSSGILMFGKQGAGKDNVDYSNVMLTSEEEIKTTNPVATEQYGVVADNLQQQNTAPIVGAVNSQGALPGMVWQNRDVYLQGPIWAKIPHTDGNFHPSPLMGGFGLKHPPPQILIKNTPVPADPPTAFNQAKLNSFITQYSTGQVSVEIEWELQKENSKRWNPEIQYTSNYYKSTNVDFAVNTEGVYSEPRPIGTRYLTRNL

SEQ ID NO: 475 - protein, 738 aa, Artificial Sequence
  source: /note="Description of Artificial Sequence: Synthetic polypeptide"
MAADGYLPDWLEDNLSEGIREWWDLKPGAPKPKANQQKQDDGRGLVLPGYKYLGPFNGLDKGEPVNAADAAALEHDKAYDQQLKAGDNPYLRYNHADAEFQERLQEDTSFGGNLGRAVFQAKKRVLEPLGLVEEGAKTAPGKKRPVEPSPQRSPDSSTGIGKKGQQPARKRLNFGQTGDSESVPDPQPIGEPPAAPSSVGSGTMAAGGGAPMADNNEGADGVGSSSGNWHCDSTWLGDRVITTSTRTWALPTYNNHLYKQISNGTSGGSTNDNTYFGYSTPWGYFDFNRFHCHFSPRDWQRLINNNWGFRPKRLSFKLFNIQVKEVTQNEGTKTIANNLTSTIQVFTDSEYQLPYVLGSAHQGCLPPFPADVFMIPQYGYLTLNNGSQAVGRSSFYCLEYFPSQMLRTGNNFSFSYTFEDVPFHSSYVHSQSLDRLMNPLIDQYLYYLSRTQSTGGTAGTQQLLFSQAGPSNMSAQARNWLPGPCYRQQRVSTTLSQNNNSNFAWTGATKYHLNGRDSLVNSGVAMATNKDDEDRFFPSSGILMFGKQGAGKDNVDYSNVMLTSEEEIKTTNPVATEQYGVVADNLQQQNTAPIVGAVNSQGALPGMVWQNRDVYLQGPIWAKIPHTDGNFHPSPLMGGFGLKHPPPQILIKNTPVPADPPTAFNQAKLNSFITQYSTGQVSVEIEWELQKENSKRWNPEIQYTSNYYKSTNVDFAVNTEGVYSEPRPIGTRYPTRNL

SEQ ID NO: 476 - DNA, 2217 bp, Artificial Sequence
  source: /note="Description of Artificial Sequence: Synthetic polynucleotide"
atggctgccgatggttatcttccagattggctcgaggacaacctctctgagggcattcgcgagtggtgggacctgaaacctggagccccgaaacccaaagccaaccagcaaaagcaggacgacggccggggtctggtgcttcctggctacaagtacctcggacccttcaacggactcgacaagggggagcccgtcaacgcggcggacgcagcggccctcgagcacgacaaggcctacgaccagcagctcaaagcgggtgacaatccgtacctgcggtataatcacgccgacgccgagtttcaggagcgtctgcaagaagatacgtcttttgggggcaacctcgggcgagcagtcttccaggccaagaagcgggttctcgaacctctcggtctggttgaggaaggcgctaagacggctcctggaaagaagagaccggtagagccgtcaccacagcgttcccccgactcctccacgggcatcggcaagaaaggccagcagcccgccagaaagagactcaatttcggtcagactggcgactcagagtcagtccccgaccctcaacctatcggagaacctccagcagcgccctctagtgtgggatctggtacaatggctgcaggcggtggcgcaccaatggcagacaataacgaaggtgccgacggagtgggtagttcctcgggaaattggcattgcgattccacatggctgggcgacagagtcatcaccaccagcacccgaacctgggccctgcccacctacaacaaccacctctacaagcaaatctccaacgggacctcgggaggcagcaccaacgacaacacctactttggctacagcaccccctgggggtattttgactttaacagattccactgccacttctcaccacgtgactggcagcgactcatcaacaacaactggggattccggcccaagagactcagcttcaagctcttcaacatccaggtcaaagaggtcacgcagaatgaaggcaccaagaccatcgccaataacctcaccagcaccatccaggtgtttacggactcggaataccagctgccgtacgtcctcggctctgcccaccagggctgcctgcctccgttcccggcggacgtcttcatgattcctcagtacggctacctgactctcaacaacggtagtcaggccgtgggacgttcctccttctactgcctggagtacttcccctctcagatgctgagaacgggcaacaacttttccttcagctacactttcgaggacgtgcctttccacagcagctacgtgcacagccagagtttggacaggctgatgaatcctctcatcgaccagtacctgtactacctgtcaagaacccagtctacgggaggcacagcgggaacccagcagttgctgttttctcaggccgggcctagcaacatgtcggctcaggccagaaactggctgcctggaccctgctacagacagcagcgcgtctccacgacactgtcgcaaaacaacaacagcaactttgcctggactggtgccaccaagtatcatctgaacggcagagactctctggtgaattcgggcgtcgccatggcaaccaacaaggacgacgaggaccgcttcttcccatccagcggcatcctcatgtttggcaagcagggagctggaaaagacaacgtggactatagcaacgtgatgctaaccagcgaggaagaaatcaagaccaccaaccccgtggccacagaacagtatggcgtggtggctgataacctacagcagcaaaacaccgctcctattgtgggggccgtcaacagccagggagccttacctggcatggtctggcagaaccgggacgtgtacctgcagggtcctatttgggccaagattcctcacacagatggcaactttcacccgtctcctttaatgggcggctttggacttaaacatccgcctcctcagatcctcatcaaaaacactcctgttcctgcggatcctccaacagcgttcaaccaggccaagctgaattctttcatcacgcagtacagcaccggacaagtcagcgtggagatcgagtgggagctgcagaaggagaacagcaagcgctggaacccagagattcagtatacttccaactactacaaatctacaaatgtggactttgctgttaatactgagggtgtttactctgagcctcgccccattggcactcgttaccccacccgtaatctgtaa

SEQ ID NO: 477 - protein, 734 aa, Artificial Sequence; identical to SEQ ID NO: 302
  source: /note="Description of Artificial Sequence: Synthetic polypeptide"

SEQ ID NO: 478 - DNA, 2214 bp, Artificial Sequence
  source: /note="Description of Artificial Sequence: Synthetic polynucleotide"
atggctgctgacggttatcttccagattggctcgaggacaacctctctgagggcattcgcgagtggtgggacctgaaacctggagccccgaaacccaaagccaaccagcagaagcaggacgacggccggggtctggtgcttcctggctacaagtacctcggacccttcaacggactcgacaagggggagcccgtcaacgcggcggacgcagcggccctcgagcacgacaaggcctacgaccagcagctcaaagcgggtgacaatccgtacctgcggtataaccacgccgacgccgagtttcaggagcgtctgcaagaagatacgtcttttgggggcaacctcgggcgagcagtcttccaggccaagaagcgggttctcgaacctctcggtctggttgaggaagctgctaagacggctcctggaaagaagagaccggtagaaccgtcacctcagcgttcccccgactcctccacgggcatcggcaagaaaggccagcagcccgctagaaagagactgaactttgggcagactggcgactcagagtcagtccccgaccctcaacctctcggagaaccaccagcaggcccctctggtctgggatctggtacaatggctgcaggcggtggcgctccaatggcagacaataacgaaggcgccgacggagtgggtaatgcctcaggaaattggcattgcgattccacatggctgggcgacagagtcatcaccaccagcacccgaacctgggctttgcccacctacaacaaccacctctacaagcaaatctccagtcagtcagcaggtagcaccaacgacaacgtctacttcggctacagcaccccctgggggtattttgacttcaacagattccactgtcacttctcaccacgtgactggcagcgactcatcaacaacaactggggattccggcccaagaagctcaacttcaagctcttcaacatccaagtcaaggaggtcacgacgaatgacggcgtcacgaccatcgctaataaccttaccagcacggttcaggtcttttcggactcggagtaccagctgccgtacgtcctcggctctgcccaccagggctgcctgcctccgttcccggcggacgtcttcatgattcctcagtacggctacctgactctgaacaatggcagccaatcggtgggacgttcatccttctactgcctggaatacttcccttctcaggtgctgagaacgggtaacaacttcaccttcagttacaccttcgaggacgtgcctttccacagcagctacgcgcacagccagagcctagaccggctgatgaatcccctcatcgaccagtacctgtattacctggctagaacacagagtaacccaggaggcacatctggcaatcgggaactgcagttttaccagggcgggccttccaccatggccgaacaagccaagaactggttacctggaccttgcttccggcaacaaagagtttccaaaacactggatcaaaacaacaacagcaactttgcttggactggtgccaccaaatatcacctgaacggcagaaactcattggtgaatcctggtgtcgccatggcaactcacaaggacgacgaggaccgctttttcccatccagcggagtcctgatttttggaaaaactggagcaaccaacaagactacattggaaaacgtgttaatgacaaatgaagaagaaattcgtcctactaatcctgtggccacagaagaatacgggatagtcagcagcaatttacaagcggccaatactgcagcccagacacaagttgtcaacaaccagggagccttacctggcatggtctggcagaaccgggacgtgtacctgcagggtcccatctgggccaaaattcctcacacagacggcaactttcacccgtctccgctgatgggcggctttggactgaagcatccgcctcctcagatcctgatcaaaaacactcctgttcctgctaatcccccggaggtgtttacgcctgccaagtttgcttctttcatcacacagtacagcaccggccaggtcagcgtggagatcgagtgggagctgcagaaggagaacagcaagcgctggaacccagagattcagtatacctccaattttgacaaacagactggtgtggactttgccgttgacagccagggtgtttattctgagcctcgccccattggtactcgttacctcacccgtaatctgtaa

SEQ ID NO: 479 - protein, 737 aa, Artificial Sequence
  source: /note="Description of Artificial Sequence: Synthetic polypeptide"
MAADGYLPDWLEDNLSEGIREWWDLKPGAPKPKANQQKQDDGRGLVLPGYKYLGPFNGLDKGEPVNAADAAALEHDKAYDQQLKAGDNPYLRYNHADAEFQERLQEDTSFGGNLGRAVFQAKKRVLEPLGLVEEAAKTAPGKKRPVEPSPQRSPDSSTGIGKKGQQPARKRLNFGQTGDSESVPDPQPLGEPPAGPSGLGSGTMAAGGGAPMADNNEGADGVGNASGNWHCDSTWLGDRVITTSTRTWALPTYNNHLYKQISSQSAGSTNDNVYFGYSTPWGYFDFNRFHCHFSPRDWQRLINNNWGFRPKKLNFKLFNIQVKEVTTNDGVTTIANNLTSTVQVFSDSEYQLPYVLGSAHQGCLPPFPADVFMIPQYGYLTLNNGSQSVGRSSFYCLEYFPSQVLRTGNNFTFSYTFEDVPFHSSYAHSQSLDRLMNPLIDQYLYYLARTQSNPGGTSGNRELQFYQGGPSTMAEQAKNWLPGPCFRQQRVSKTLDQNNNSNFAWTGATKYHLNGRNSLVNPGVAMATHKDDEDRFFPSSGVLIFGKTGATNKTTLENVLMTNEEEIRPTNPVATEEYGIVSSNLQAANTAAQTQVVNNQGALPGMVWQNRDVYLQGPIWAKIPHTDGNFHPSPLMGGFGLKHPPPQILIKNTPVPANPPEVFTPAKFASFITQYSTGQVSVEIEWELQKENSKRWNPEIQYTSNFDKQTGVDFAVDSQGVYSEPRPIGTRYLTRNL

SEQ ID NO: 480 - DNA, 2214 bp, Artificial Sequence
  source: /note="Description of Artificial Sequence: Synthetic polynucleotide"
atggctgccgatggttatcttccagattggctcgaggacaacctctctgagggcattcgcgagtggtgggacctgaaacctggagccccgaaacccaaagccaaccagcaaaagcaggacgacggccggggtctggtgcttcctggctacaagtacctcggacccttcaacggactcgacaagggggagcccgtcaacgcggcggacgcagcggccctcgagcacgacaaggcctacgaccagcagctcaaagcgggtgacaatccgtacctgcggtataatcacgccgacgccgagtttcaggagcgtctgcaagaagatacgtcttttgggggcaacctcgggcgagcagtcttccaggccaagaagcgggttctcgaacctctcggtctggttgaggaaggcgctaagacggctcctggaaagaagagaccggtagagccgtcaccacagcgttcccccgactcctccacgggcatcggcaagaaaggccagcagcccgccagaaagagactcaatttcggtcagactggcgactcagagtcagtccccgaccctcaacctatcggagaacctccagcagcgccctctagtgtgggatctggtacaatggctgcaggcggtggcgcaccaatggcagacaataacgaaggtgccgacggagtgggtagttcctcgggaaattggcattgcgattccacacggctgggcgacagagtcatcaccaccagcacccggacctgggctttgcccacctacaacaaccacctctacaagcaaatctccagtcagtcagcaggtagcaccaacgacaacgtctacttcggctacagcaccccctgggggtattttgacttcaacagattccactgtcacttctcaccacgtgactggcagcggctcatcaacaacaactggggattccggcccaagaagctcaacttcaagctgttcaacatccaggtcaaggaggtcacaacgaatgacggcgtcacgaccatcgccaataaccttaccagcacggttcaggtcttttcggactcggaataccagctgccctacgtcctcggctccgcacaccagggctgcctgcctccgttcccggcggacgtcttcatgattccccagtacggctacctgactctgaacaatggcagccaatcggtgggtcgttcctctttctactgcctggaatatttcccttctcaaatgctgagaacgggcaacaacttcaccttcagctacaccttcgaggacgttcccttccacagcagctacgcacacagccagagcctggaccggctgatgaatcctcttatcgaccagtacctgtattacctggccagaacacagagcaacgcaggaggcacagctggcaatcgggaactgcagttttatcagggcgggcctaccaccatggccgaacaagccaaaaactggctgcctggaccttgcttccggcaacgaagagtctccaagacgctggatcaaaacaacaacagcaactttgcttggactggtgccaccaaataccatctaaatggaagaaattcattggttaatcccggtgtcgccatggcaacccacaaggacgacgaggaacgcttcttcccttcgagcggagtcctgatttttggaaaaactggagcagctaataagactacactggaaaatgtgttaatgacaaatgaagaggaaattcgtcctaccaacccggtagccaccgaggaatacgggactgttagcagcaacctgcaggcggctaacactgcagcccagacacaagttgtcaacaaccagggagccttacctggtatggtctggcagaaccgggacgtgtacctgcagggtcccatctgggccaagattcctcacacggacggcaactttcacccgtctccgctgatgggcggctttggactgaagcatccgcctcctcagatcctgatcaaaaacactcctgttcctgctaatcccccggaggtgtttacgcctgccaagtttgcttctttcatcacacagtacagcaccggccaggtcagcgtggagatcgagtgggagctgcagaaggagaacagcaagcgctggaacccagagattcagtatacctccaattttgacaaacagactggtgtggactttgccgttgacagccagggtgtttattctgagcctcgccccattggtactcgttacctcacccgtaatctgtaa

SEQ ID NO: 481 - protein, 737 aa, Artificial Sequence
  source: /note="Description of Artificial Sequence: Synthetic polypeptide"
MAADGYLPDWLEDNLSEGIREWWDLKPGAPKPKANQQKQDDGRGLVLPGYKYLGPFNGLDKGEPVNAADAAALEHDKAYDQQLKAGDNPYLRYNHADAEFQERLQEDTSFGGNLGRAVFQAKKRVLEPLGLVEEGAKTAPGKKRPVEPSPQRSPDSSTGIGKKGQQPARKRLNFGQTGDSESVPDPQPIGEPPAAPSSVGSGTMAAGGGAPMADNNEGADGVGSSSGNWHCDSTRLGDRVITTSTRTWALPTYNNHLYKQISSQSAGSTNDNVYFGYSTPWGYFDFNRFHCHFSPRDWQRLINNNWGFRPKKLNFKLFNIQVKEVTTNDGVTTIANNLTSTVQVFSDSEYQLPYVLGSAHQGCLPPFPADVFMIPQYGYLTLNNGSQSVGRSSFYCLEYFPSQMLRTGNNFTFSYTFEDVPFHSSYAHSQSLDRLMNPLIDQYLYYLARTQSNAGGTAGNRELQFYQGGPTTMAEQAKNWLPGPCFRQRRVSKTLDQNNNSNFAWTGATKYHLNGRNSLVNPGVAMATHKDDEERFFPSSGVLIFGKTGAANKTTLENVLMTNEEEIRPTNPVATEEYGTVSSNLQAANTAAQTQVVNNQGALPGMVWQNRDVYLQGPIWAKIPHTDGNFHPSPLMGGFGLKHPPPQILIKNTPVPANPPEVFTPAKFASFITQYSTGQVSVEIEWELQKENSKRWNPEIQYTSNFDKQTGVDFAVDSQGVYSEPRPIGTRYLTRNL

SEQ ID NO: 482 - DNA, 2208 bp, Artificial Sequence
  source: /note="Description of Artificial Sequence: Synthetic polynucleotide"
atggctgccgatggttatcttccagattggctcgaggacactctctctgaaggaataagacagtggtggaagctcaaacctggcccaccaccaccaaagcccgcagagcggcataaggacgacagcaggggtcttgtgcttcctgggtacaagtacctcggacccttcaacggactcgacaagggggagccggtcaacgaggcagacgccgcggccctcgagcacgacaaggcctacgaccggcagctcgacagcggagacaacccgtacctcaagtacaaccacgccgacgcggagtttcaggagcgtcttaaagaagatacgtcttttgggggcaacctcggacgagcagtcttccaggcgaaaaagagggttcttgaacctctgggcctggttgaggaacctgttaagacggctccgggaaaaaagaggccggtagagcactctcctgcggagccagactcctcctcgggaaccggaaaagcgggccagcagcctgcaagaaaaagattgaattttggtcagactggagacgcagactccgtacctgacccccagcctctcggacagccaccagcagccccctctggtttgggatctactacaatggctacaggcagtggcgcaccaatggcagacaataacgagggtgccgatggagtgggtaattcttcaggaaattggcattgcgattcccaatggctgggcgacagagtcatcaccaccagcacccgaacctgggcccagcccacctacaacaaccacctctacaagcaaatctcaagccaatcaggagcctcaaacgacaaccactactttggctacagcaccccttgggggtattttgacttcaacagattccactgccacttttcaccacgtgactggcaaagactcatcaacaacaactggggattccgacccaagagactcaacttcaagctctttaacattcaagtcaaagaggtcacgcagaatgacggtacgacgacgattgccaataaccttaccagcacggttcaggtgtttactgactcggagtaccagctcccgtacgtcctcgggtcggcgcatcaaggatgcctcccgccgtttccagcggacgtcttcatggtcccacagtatggatacctcaccctgaacaacgggagtcaggcggtaggacgctcttccttttactgcctggagtactttccttctcagatgcttcgtactggaaacaactttcagttcagctacacctttgaagacgttcctttccacagcagctacgctcacagccagagtctggatcggctgatgaatcctctgatcgaccagtacctgtattatctgaacaaaacacaatcaaatagtggagctcttcagcagtctcggctactgtttagtcaagctggacccaccagcatgtctcttcaagctaaaaactggctacctggaccttgctacagacagcagcgtctgtcaaagcaggcaaacgacaacaacaacagcaactttccctggactgcggctacaaagtaccacctaaatggccgggactcgttggttaatccaggaccagctatggccagtcacaaagacgatgaagaaaagtttttccccatgcatggaaccctgatatttggtaaacaaggaacaaatgctaacgacgcggatttggacaatgtcatgattacagatgaagaagaaatccgcaccaccaatcccgtggctacggagcagtacggatatgtgtcaaataatttgcaaaactcaaatactggtccaactactggaactgtcaatcaccgaggagcgttacctggcatggtgtggcaggatcgagacgtgtacctgcagggacccatttgggccaagattcctcacaccgatggacactttcatccttctccactgatgggaggttttgggctcaaacacccgcctcctcagatcatgatcaaaaacactcccgttccagccaatcctcccacaaacttcagttctgccaagtttgcttctttcatcacacagtattccacggggcaggtcagcgtggagatcgagtgggagctgcagaaagagaacagcaaacgctggaatcccgaaattcagtacacttccaactacaacaaatctgttaatgtggactttactgtggacactaatggcgtgtattcagagcctcgccccattggcaccagatacctgactcgtaatctgtaa

SEQ ID NO: 483 - protein, 735 aa, Artificial Sequence
  source: /note="Description of Artificial Sequence: Synthetic polypeptide"
MAADGYLPDWLEDTLSEGIRQWWKLKPGPPPPKPAERHKDDSRGLVLPGYKYLGPFNGLDKGEPVNEADAAALEHDKAYDRQLDSGDNPYLKYNHADAEFQERLKEDTSFGGNLGRAVFQAKKRVLEPLGLVEEPVKTAPGKKRPVEHSPAEPDSSSGTGKAGQQPARKRLNFGQTGDADSVPDPQPLGQPPAAPSGLGSTTMATGSGAPMADNNEGADGVGNSSGNWHCDSQWLGDRVITTSTRTWAQPTYNNHLYKQISSQSGASNDNHYFGYSTPWGYFDFNRFHCHFSPRDWQRLINNNWGFRPKRLNFKLFNIQVKEVTQNDGTTTIANNLTSTVQVFTDSEYQLPYVLGSAHQGCLPPFPADVFMVPQYGYLTLNNGSQAVGRSSFYCLEYFPSQMLRTGNNFQFSYTFEDVPFHSSYAHSQSLDRLMNPLIDQYLYYLNKTQSNSGALQQSRLLFSQAGPTSMSLQAKNWLPGPCYRQQRLSKQANDNNNSNFPWTAATKYHLNGRDSLVNPGPAMASHKDDEEKFFPMHGTLIFGKQGTNANDADLDNVMITDEEEIRTTNPVATEQYGYVSNNLQNSNTGPTTGTVNHRGALPGMVWQDRDVYLQGPIWAKIPHTDGHFHPSPLMGGFGLKHPPPQIMIKNTPVPANPPTNFSSAKFASFITQYSTGQVSVEIEWELQKENSKRWNPEIQYTSNYNKSVNVDFTVDTNGVYSEPRPIGTRYLTRNL

SEQ ID NO: 484 - DNA, 2217 bp, Artificial Sequence
  source: /note="Description of Artificial Sequence: Synthetic polynucleotide"
atggctgccgatggttatcttccagattggctcgaggacaacctctctgagggcattcgcgagtggtgggcgctgaaacctggagccccgaagcccaaagccaaccagcaaaagcaggacgacggccggggtctggtgcttcctggctacaagtacctcggacccttcaacggactcgacaagggggagcccgtcaacgcggcggacgcagcggccctcgagcacgacaaggcctacgaccagcagctgcaggcgggtgacaatccgtacctgcggtataatcacgccgacgccgagtttcaggagcgtctgcaagaagatacgtcttttgggggcaacctcgggcgagcagtcttccaggccaagaagcgggttctcgaacctctcggtctggttgaggaaggcgctaagacggctcctggaaagaagagaccggtagagccgtcaccacagcgttcccccgactcctccacgggcatcggcaagaaaggccagcagcccgccagaaagagactcaatttcggtcagactggcgactcagagtcagtccccgaccctcaacctatcggagaacctccagcagcgccctctagtgtgggatctggtacaatggctgcaggcggtggcgcgccaatggcagacaataacgaaggtgccgacggagtgggtagttcctcgggaaattggcattgcgattccacatggctgggcgacagagtcatcaccaccagcacccgaacctgggccctgcccacctacaacaaccacctctacaagcaaacctccaacgggacctcgggaggcagcaccaacgacaacacctactttggctacagcaccccctgggggtattttgactttaacagattccactgccacttctcaccacgtgactggcagcgactcatcaacaacaactggggattccggcccaagagactcagcttcaagctcttcaacatccaggtcaaagaggtcacgcagaatgaaggcaccaagaccatcgccaataacctcaccagcaccatccaggtgtttacggactcggaataccagctgccgtacgtcctcggctctgcccaccagggctgcctgcctccgttcccggcggacgtcttcatgattcctcagtacggctacctgactctcaacaacggtagtcaggccgtgggacgttcctccttctactgcctggagtacttcccctctcagatgctgagaacgggcaacaacttttccttcagctacactttcgaggacgtgcctttccacagcagctacgcgcacagccagagtttggacaggctgatgaatcctctcatcgaccagtacctgtactacctgtcaagaacccagtctacgggaggcacagcgggaacccagcagttgctgttttctcaggccgggcctagcaacatgtcggctcaggccagaaactggctgcctggaccctgctacagacagcagcgcgtctccacgacactgtcgcaaaacaacaacagcaactttgcctggactggtgccaccaagtatcatctgaacggcagagactctctggtgaatccgggcgtcgccatggcaaccaacaaggacgacgaggaccgcttcttcccatccagcggcatcctcatgtttggcaagcagggagctggaaaagacaacgtggactatagcaacgtgatgctaaccagcgaggaagaaatcaagaccaccaaccccgtggccacagaacagtatggcgtggtggctgataacctacagcagcaaaacaccgctcctattgtgggggccgtcaacagccagggagccttacctggcatggtctggcagaaccgggacgtgtacctgcagggtcctatttgggccaagattcctcacacagatggcaactttcacccgtctcctttaatgggcggctttggacttaaacatccgcctcctcagatcctcatcaaaaacactcctgttcctgcggatcctccaacagcgttcaaccaggccaagctgaattctttcatcacgcagtacagcaccggacaagtcagcgcggagatcgagtgggagctgcagaaggagaacagcaagcgctggaacccagagattcagtatacttccaactactacaaatctacaaatgtggactttgctgttaatactgagggtgtttactctgagcctcgccccattggcactcgttacctcacccgtaatctgtaa

SEQ ID NO: 485 - protein, 738 aa, Artificial Sequence
  source: /note="Description of Artificial Sequence: Synthetic polypeptide"
MAADGYLPDWLEDNLSEGIREWWALKPGAPKPKANQQKQDDGRGLVLPGYKYLGPFNGLDKGEPVNAADAAALEHDKAYDQQLQAGDNPYLRYNHADAEFQERLQEDTSFGGNLGRAVFQAKKRVLEPLGLVEEGAKTAPGKKRPVEPSPQRSPDSSTGIGKKGQQPARKRLNFGQTGDSESVPDPQPIGEPPAAPSSVGSGTMAAGGGAPMADNNEGADGVGSSSGNWHCDSTWLGDRVITTSTRTWALPTYNNHLYKQTSNGTSGGSTNDNTYFGYSTPWGYFDFNRFHCHFSPRDWQRLINNNWGFRPKRLSFKLFNIQVKEVTQNEGTKTIANNLTSTIQVFTDSEYQLPYVLGSAHQGCLPPFPADVFMIPQYGYLTLNNGSQAVGRSSFYCLEYFPSQMLRTGNNFSFSYTFEDVPFHSSYAHSQSLDRLMNPLIDQYLYYLSRTQSTGGTAGTQQLLFSQAGPSNMSAQARNWLPGPCYRQQRVSTTLSQNNNSNFAWTGATKYHLNGRDSLVNPGVAMATNKDDEDRFFPSSGILMFGKQGAGKDNVDYSNVMLTSEEEIKTTNPVATEQYGVVADNLQQQNTAPIVGAVNSQGALPGMVWQNRDVYLQGPIWAKIPHTDGNFHPSPLMGGFGLKHPPPQILIKNTPVPADPPTAFNQAKLNSFITQYSTGQVSAEIEWELQKENSKRWNPEIQYTSNYYKSTNVDFAVNTEGVYSEPRPIGTRYLTRNL

SEQ ID NO: 486 - DNA, 2217 bp, Artificial Sequence
  source: /note="Description of Artificial Sequence: Synthetic polynucleotide"
atggctgctgacggttatcttccagattggctcgaggacaacctctctgagggcattcgcgagtggtgggacctgaaacctggagcccccaagcccaaggccaaccagcagaagcaggacgacggccggggtctggtgcttcctggctacaagtacctcggacccttcaacggactcgacaagggggagcccgtcaacgcggcggacgcagcggccctcgagcacgacaaggcctacgaccagcagctcaaagcgggtgacaatccgtacctgcggtataatcacgccgacgccgagtttcaggagcgtctgcaagaagatacgtcttttgggggcaacctcgggcgagcagtcttccaggccaagaagcgggttctcgaacctctcggtctggttgaggaagctgctaagacggctcctggaaagaagagaccggtagaaccgtcacctcagcgttcccccgactcctccacgggcatcggcaagaaaggccagcagcccgctagaaagagactgaactttgggcagactggcgactcagagtcagtccccgaccctcaaccaatcggagaacctccagcagcgccctctagtgtgggatctggtacaatggccgcaggcggtggcgcaccaatggcagacaataacgaaggtgccgacggagtgggtagttcctcgggaaattggcattgcgattccacatggctgggcgacagagtcatcaccaccagcacccgaacctgggccctgcccacctacaacaaccacctctacaagcaaatctccaacgggacctcgggaggcagcaccaacgacaacacctactttggctacagcaccccctgggggtattttgactttaacagattccactgccacttctcaccacgtgactggcagcgactcatcaacaacaactggggattccggcccaagagactcagcttcaagctcttcaacatccaggtcaaagaggtcacgcagaatgaaggcaccaagaccatcgccaataacctcaccagcaccatccaggtgtttacggactcggaataccagctgccgtacgtcctcggctctgcccaccagggctgcctgcctccgttcccggcggacgtcttcatgattcctcagtacggctacctgactctcaacaacggtagtcaggccgtgggacgttcctccttctactgcctggagtacttcccctctcagatgctgagaacgggcaacaacttttccttcagctacactttcgaggacgtgcctttccacagcagctacgcgcacagccagagtttggacaggctgatgaatcctctcatcgaccagtacctgtactacctgtcaagaacccagtctacgggaggcacagcgggaacccagcagctgctgttttctcaggccgggcctagcaacatgtcggctcaggccagaaactggctgcctggaccctgctacagacagcagcgcgtctccacgacactgtcgcaaaacaacaacagcaactttgcctggactggtgccaccaagtatcatctgaacggcagagactctctggtgaatccgggcgtcgccatggcaaccaacaaggacgacgaggaccgcttcttcccatccagcggcatcctcatgtttggcaagcagggagctggaaaagacaacgtggactatagcaacgtgatgctaaccagcgaggaagaaatcaagaccaccaaccccgtggccacagaacagtatggcgtggtggctgataacctacagcagcaaaacaccgctcctattgtgggggccgtcaacagccagggagccttacctggcatggtctggcagaaccgggacgtgtacctgcagggtcctatttgggccaagattcctcacacagatggcaactttcacccgtctcctttaatgggcggctttggacttaaacatccgcctcctcagatcctcatcaaaagcactcctgttcctgcggatcctccaacagcgttcaaccaggccaagctgaattctttcatcacgcagtacagcaccggacaagtcagcgtggagatcgagtgggagctgcagaaggagaacagcaagtgctggaacccagagattcagtatacttccaactactacaaatctacaaatgtggactttgctgttaatactgagggtgtttactctgagcctcgccccattggcactcgttacctcacccgtaatctgtaa

SEQ ID NO: 487 - protein, 738 aa, Artificial Sequence
  source: /note="Description of Artificial Sequence: Synthetic polypeptide"
MAADGYLPDWLEDNLSEGIREWWDLKPGAPKPKANQQKQDDGRGLVLPGYKYLGPFNGLDKGEPVNAADAAALEHDKAYDQQLKAGDNPYLRYNHADAEFQERLQEDTSFGGNLGRAVFQAKKRVLEPLGLVEEAAKTAPGKKRPVEPSPQRSPDSSTGIGKKGQQPARKRLNFGQTGDSESVPDPQPIGEPPAAPSSVGSGTMAAGGGAPMADNNEGADGVGSSSGNWHCDSTWLGDRVITTSTRTWALPTYNNHLYKQISNGTSGGSTNDNTYFGYSTPWGYFDFNRFHCHFSPRDWQRLINNNWGFRPKRLSFKLFNIQVKEVTQNEGTKTIANNLTSTIQVFTDSEYQLPYVLGSAHQGCLPPFPADVFMIPQYGYLTLNNGSQAVGRSSFYCLEYFPSQMLRTGNNFSFSYTFEDVPFHSSYAHSQSLDRLMNPLIDQYLYYLSRTQSTGGTAGTQQLLFSQAGPSNMSAQARNWLPGPCYRQQRVSTTLSQNNNSNFAWTGATKYHLNGRDSLVNPGVAMATNKDDEDRFFPSSGILMFGKQGAGKDNVDYSNVMLTSEEEIKTTNPVATEQYGVVADNLQQQNTAPIVGAVNSQGALPGMVWQNRDVYLQGPIWAKIPHTDGNFHPSPLMGGFGLKHPPPQILIKSTPVPADPPTAFNQAKLNSFITQYSTGQVSVEIEWELQKENSKCWNPEIQYTSNYYKSTNVDFAVNTEGVYSEPRPIGTRYLTRNL

SEQ ID NO: 488 - protein, 738 aa, Artificial Sequence
  source: /note="Description of Artificial Sequence: Synthetic polypeptide"
MAADGYLPDWLEDNLSEGIREWWDLKPGAPKPKANQQKQDDGRGLVLPGYKYLGPFNGLDKGEPVNAADAAALEHDKAYDQQLKAGDNPYLRYNHADAEFQERLQEDTSFGGNLGRAVFQAKKRVLEPLGLVEEAAKTAPGKKRPVEPSPQRSPDSSTGIGKKGQQPARKRLNFGQTGDSESVPDPQPIGEPPAAPSSVGSGTMAAGGGAPMADNNEGADGVGSSSGNWHCDSTWLGDRVITTSTRTWALPTYNNHLYKQISNGTSGGSTNDNTYFGYSTPWGYFDFNRFHCHFSPRDWQRLINNNWGFRPKRLSFKLFNIQVKEVTQNEGTKTIANNLTSTIQVFTDSEYQLPYVLGSAHQGCLPPFPADVFMIPQYGYLTLNNGSQAVGRSSFYCLEYFPSQMLRTGNNFSFSYTFEDVPFHSSYAHSQSLDRLMNPLIDQYLYYLSRTQSTGGTAGTQQLLFSQAGPSNMSAQARNWLPGPCYRQQRVSTTLSQNNNSNFAWTGATKYHLNGRDSLVNPGVAMATNKDDEDRFFPSSGILMFGKQGAGKDNVDYSNVMLTSEEEIKTTNPVATEQYGVVADNLQQQNTAPIVGAVNSQGALPGMVWQNRDVYLQGPIWAKIPHTDGNFHPSPLMGGFGLKHPPPQILIKSTPVPADPPTAFNQAKLNSFITQYSTGQVSVEIEWELQKENSKRWNPEIQYTSNYYKSTNVDFAVNTEGVYSEPRPIGTRYLTRNL

SEQ ID NO: 489 - DNA, 2217 bp, Artificial Sequence
  source: /note="Description of Artificial Sequence: Synthetic polynucleotide"
atggctgctgacggttatcttccagattggctcgaggacaacctctctgagggcattcgcgagtggtgggacctgaaacctggagcccccaagcccaaggccaaccagcagaagcaggacgacggccggggtctggtgcttcctggctacaagtacctcggacccttcaacggactcgacaagggggagcccgtcaacgcggcggacgcagcggccctcgagcacgacaaggcctacgaccagcagctcaaagcgggtgacaatccgtacctgcggtataaccacgccgacgccgagtttcaggagcgtctgcaagaagatacgtcttttgggggcaacctcgggcgagcagtcttccaggccaagaagcgggttctcgaacctctcggtctggttgaggaagctgctaagacggctcctggaaagaagagaccggtagaaccgtcacctcagcgttcccccgactcctccacgggcatcggcaagaaaggccagcagcccgctagaaagagactgaactttgggcagactggcgactcagagtcagtccccgaccctcaaccaatcggagaaccaccagcaggcccctctggtctgggatctggtacaatggctgcaggcggtggcgcaccaatggctgacaataacgagggcgccgacggagtgggtaatgcctcaggaaattggcattgcgattccacatggctgggcgacagagtcatcaccaccagcacccgaacctgggctttgcccacctacaacaaccacctctacaagcaaatctccagtcagtcagcaggtagcaccaacgacaacgtctacttcggctacagcaccccctgggggtattttgacttcaacagattccactgtcacttctcaccacgtgactggcagcggctcatcaacaacaactggggattccggcccaagaagctcaacttcaagctgttcaacatccaggtcaaggaggtcacaacgaatgacggcgtcacgaccatcgccaataaccctaccagcacggttcaggtcttttcggactcggaataccagctgccctacgtcctcggctccgcacaccagggctgcctgcctccgttcccggcggacgtcttcatgattccccagtacggctacctgactctgaacaatggcagccaatcggtgggtcgttcctctttctactgcctggaatatttcccttctcaaatgctgagaacgggcaacaacttcaccttcagctacaccttcgaggacgttcccttccacagcagctacgcacacagccagagcctggaccggctgatgaatcctcttatcgaccagtacctgtattacctggccagaacacagagcaacgcaggaggcacagctggcaatcgggaactgcagttttatcagggcgggcctaccaccatggccgaacaagccaaaaactggctgcctggaccctgctacagacagcagcgcgtctccacgacactgtcgcaaaacaacaacagcaactttgcctggactggtgccaccaagtatcatctgaacggcagagactctctggtgaatccgggcgtcgccatggcaaccaacaaggacgacgaggaccgcttcttcccatccagcggcatcctcatgtttggcaagcagggagctggaaaagacaacgtggactatagcaacgtgatgctaaccagcgaggaagaaatcaagaccaccaaccccgtggccacagaacagtatggcgtggtggctgataacctacagcagcaaaacaccgctcctattgtgggggccgtcaacagccagggagccttacctggcatggtctggcagaaccgggacgtgtacctgcagggtcctatttgggccaagattcctcacacagatggcaactttcacccgtctcctttaatgggcggctttggacttaaacatccgcctcctcagatcctcatcaaaaacactcctgttcctgcggatcctccaacagcgttcaaccaggccaagctgaattctttcatcacgcagtacagcaccggacaagtcagcgtggagatcgagtgggagctgcagaaggagaacagcaagcgctggaacccagagattcagtatacttccaactactacaaatctacaaatgtggactttgctgttaatactgagggtgtttactctgagcctcgccccattggcactcgttacctcacccgtaatctgtaa

SEQ ID NO: 490 - protein, 738 aa, Artificial Sequence
  source: /note="Description of Artificial Sequence: Synthetic polypeptide"
MAADGYLPDWLEDNLSEGIREWWDLKPGAPKPKANQQKQDDGRGLVLPGYKYLGPFNGLDKGEPVNAADAAALEHDKAYDQQLKAGDNPYLRYNHADAEFQERLQEDTSFGGNLGRAVFQAKKRVLEPLGLVEEAAKTAPGKKRPVEPSPQRSPDSSTGIGKKGQQPARKRLNFGQTGDSESVPDPQPIGEPPAGPSGLGSGTMAAGGGAPMADNNEGADGVGNASGNWHCDSTWLGDRVITTSTRTWALPTYNNHLYKQISSQSAGSTNDNVYFGYSTPWGYFDFNRFHCHFSPRDWQRLINNNWGFRPKKLNFKLFNIQVKEVTTNDGVTTIANNPTSTVQVFSDSEYQLPYVLGSAHQGCLPPFPADVFMIPQYGYLTLNNGSQSVGRSSFYCLEYFPSQMLRTGNNFTFSYTFEDVPFHSSYAHSQSLDRLMNPLIDQYLYYLARTQSNAGGTAGNRELQFYQGGPTTMAEQAKNWLPGPCYRQQRVSTTLSQNNNSNFAWTGATKYHLNGRDSLVNPGVAMATNKDDEDRFFPSSGILMFGKQGAGKDNVDYSNVMLTSEEEIKTTNPVATEQYGVVADNLQQQNTAPIVGAVNSQGALPGMVWQNRDVYLQGPIWAKIPHTDGNFHPSPLMGGFGLKHPPPQILIKNTPVPADPPTAFNQAKLNSFITQYSTGQVSVEIEWELQKENSKRWNPEIQYTSNYYKSTNVDFAVNTEGVYSEPRPIGTRYLTRNL

SEQ ID NO: 491 - DNA, 2208 bp, Artificial Sequence
  source: /note="Description of Artificial Sequence: Synthetic polynucleotide"
atggctgccgatggttatcttccagattggctcgaggacaacctctctgagggcattcacgagtggtgggacccgaaacctggagccccgaaacccaaagccaaccagcaaaagcaggacgacggccggggtctggtgcttcctggctacaagtacctcggacccttcaacggactcgacaagggggagcccgtcaacgcggcggacgcagcggccctcgagcacgacaaggcctacgaccagcagctcaaagcgggtgacaatccgtacctgcggtataatcacgccgacgccgagtttcaggagcgtctgcaagaagatacgtcttttgggggcaacctcgggcgagcagtcttccaggccaagaagcgggttctcgaacctctcggtctggttgaggaaggcgctaagacggctcctggaaagaagagaccggtagagccgtcaccacagcgttcccccgactcctccacgggcatcggcaagaaaggccagcagcccgccagaaagagactcaatttcggtcagactggcgactcagagtcagtccccgaccctcaacctatcggagaacctccagcagcgccctctagtgtgggatctggtacaatggctgcaggcggtggcgcaccaatggcagacaataacgaaggtgccgacggagtgggtagttcctcgggaaattggcattgcgattccacatggctgggcgacagagtcatcaccaccagcacccgaacctgggccctgcccacccacaacaaccacctctacaagcaaatctccaacgggacctcgggaggcagcaccaacgacaacgtctacttcggctacagcaccccctgggggtattttgacttcaacagattccactgtcacttctcaccacgtgaccggcagcgactcatcaacaacaactggggattccggcccaagagactcagcttcaagctcttcaacatccaggtcaaagaggtcacgcagaatgaaggcaccaagaccatcgccaataacctcaccagcaccatccaggtgtttacggactcggaataccagctgccgtacgtcctcggctctgcccaccagggctgcctgcctccgttcccggcggacgtcttcatgattcctcagtacggctacctgactctcaacaacggtagtcaggccgtgggacgttcctccttctactgcctggagtacttcccctctcagatgctgagaacgggcaacaacttttccttcagctacactttcgaggacgtgcctttccacagcagctacgcgcacagccagagtttggacaggctgatgaatcctctcatcgaccagtacctgtactacctgtcaagaacccagtctacggaaggcacagcgggaacccagcagttgctgttttctcaggccgggcctagcaacatgtcggctcaggccagaaactggctgcctggaccctgctacagacagcagcgcgtctccacgacactgtcgcaaaacaacaacagcaactttgcctggactggtgccaccaagtatcatctgaacggcagagactctctggtgaatccgggcgtcgccatggcaacccacaaggacgacgaggaacgcttcttcccttcgagcggagtcctgatttttggaaaaactggagcagctaataagactacactggaaaatgtgttaatgacaaatgaagaggaaattcgtcctaccaacccggtagccaccgaggaatacgggactgttagcagcaacctgcaggcggctaacactgcagcccagacacaagttgtcaacaaccagggagccttacctggtatggtctggcagaaccgggacgtgtacctgcagggtcccatctgggccaagattcctcacacggacggcaactttcacccgtctccgctgatgggcggctttggactgaagcatcctcagatcctgatcaaaaacactcctgttcctgctaatcccccggaggtgtttacgcctgccaagtttgcttctttcatcacacagtacagcaccggccaggtcagcgtggagatcgagtgggagctgcagaaggagaacagcaagcgctggaacccagagattcagtatacctccaattttgacaaacagactggtgtggactttgccgttgacagccagggtgtttattctgagcctcgccccattggtactcgttacctcacccgtaatctgtaa

SEQ ID NO: 492 - protein, 735 aa, Artificial Sequence
  source: /note="Description of Artificial Sequence: Synthetic polypeptide"
MAADGYLPDWLEDNLSEGIHEWWDPKPGAPKPKANQQKQDDGRGLVLPGYKYLGPFNGLDKGEPVNAADAAALEHDKAYDQQLKAGDNPYLRYNHADAEFQERLQEDTSFGGNLGRAVFQAKKRVLEPLGLVEEGAKTAPGKKRPVEPSPQRSPDSSTGIGKKGQQPARKRLNFGQTGDSESVPDPQPIGEPPAAPSSVGSGTMAAGGGAPMADNNEGADGVGSSSGNWHCDSTWLGDRVITTSTRTWALPTHNNHLYKQISNGTSGGSTNDNVYFGYSTPWGYFDFNRFHCHFSPRDRQRLINNNWGFRPKRLSFKLFNIQVKEVTQNEGTKTIANNLTSTIQVFTDSEYQLPYVLGSAHQGCLPPFPADVFMIPQYGYLTLNNGSQAVGRSSFYCLEYFPSQMLRTGNNFSFSYTFEDVPFHSSYAHSQSLDRLMNPLIDQYLYYLSRTQSTEGTAGTQQLLFSQAGPSNMSAQARNWLPGPCYRQQRVSTTLSQNNNSNFAWTGATKYHLNGRDSLVNPGVAMATHKDDEERFFPSSGVLIFGKTGAANKTTLENVLMTNEEEIRPTNPVATEEYGTVSSNLQAANTAAQTQVVNNQGALPGMVWQNRDVYLQGPIWAKIPHTDGNFHPSPLMGGFGLKHPQILIKNTPVPANPPEVFTPAKFASFITQYSTGQVSVEIEWELQKENSKRWNPEIQYTSNFDKQTGVDFAVDSQGVYSEPRPIGTRYLTRNL

SEQ ID NO: 493 - protein, 738 aa, Artificial Sequence
  source: /note="Description of Artificial Sequence: Synthetic polypeptide"
MAADGYLPDWLEDNLSEGIREWWDLKPGAPKPKANQQKQDDGRGLVLPGYKYLGPFNGLDKGEPVNAADAAALEHDKAYDQQLKAGDNPYLRYNHADAEFQERLQEDTSFGGNLGRAVFQAKKRVLEPLGLVEEGAKTAPGKKRPVEPSPQRSPDSSTGIGKKGQQPARKRLNFGQTGDSESVPDPQPIGEPPAAPSSVGSGTMAAGGGAPMADNNEGADGVGSSSGNWHCDSTWLGDRVITTSTRTWALPTYNNHLYKQISNGTSGGSTNDNTYFGYSTPWGYFDFNRFHCHFSPRDWQRPINNNWGFRPKRLSFKLFNIQVKEVTQNEGTKTIANNLTSTIQVFTDSEYQLPYVLGSAHQGCLPPFPADVFMIPQYGYLTLNNGSQAVGRSSFYCLEYFPSQMLRTGNNFSFSYPFEDVPFHSSYAHSQSLDRLMNPLIDQYLYYLSRTQSTGGTAGTQQLLFSQAGPSNMSAQARNWLPGPCYRQQRVSTTLSQNNNSNFAWTGATKYHLNGRDSLVNPGVAMATNKDDEDRFFPSSGILMFGKQGAGKDNVDYSNVMLTSEEEIKTTNPVATEQYGVVADNLQQQDTAPIVGAVNSQGALPGMVWQNRDVYLQGPIWAKIPHTDGNFHPSPLMGGFGLKHPPPQVLIKNTPVPADPPTAFNQAKLNSFITQYSTGQVSVEIEWELQKENSKRWNPEIQYTSNYYKSTNVDFAVNTEGVYSEPRPIGTRYLTRNL

SEQ ID NO: 494 - DNA, 2217 bp, Artificial Sequence
  source: /note="Description of Artificial Sequence: Synthetic polynucleotide"
atggctgccgatggttatcttccagattggctcgaggacaacctctctgagggcattcgcgagtggtgggacctgaaacctggagccccgaaacccaaggccaaccagcaaaagcaggacgacggccggggtctggtgcttcctggctacaagtacctcggacccttcaacggactcgacaagggggagcccgtcaacgcggcggacgcagcggccctcgagcacgacaaggcctacgaccagcagctcaaagcgggtgacaatccgtacctgcggtataatcacgccgacgccgagtttcaggagcgtctgcaagaagatacgtcttttgggggcaacctcgggcgagcagtcttccaggccaagaagcgggttctcgaacctctcggtctggttgaggaaggcgctaagacggctcctggaaagaagagaccggtagagccgtcaccacagcgttcccccgactcctccacgggcatcggcaagaaaggccagcagcccgccagaaagagactcaatttcggtcagactggcgactcagagtcagtccccgaccctcaacctatcggagaacctccagcagcgccctctagtgtgggatctggtacaatggctgcaggcggtggcgcaccaatggcagacaataacgaaggtgccgacggagtgggtagttcctcgggaaattggcattgcgattccacatggctgggcgacagagtcatcaccaccagcacccgaacctgggccctgcccacctacaacaaccacctctacaagcaaatctccaacgggacctcgggaggcagcaccaacgacaacacctactttggctacagcaccccctgggggtattttgactttaacagattccactgccacttctcaccacgtgactggcagcgacccatcaacaacaactggggattccggcccaagagactcagcttcaagctcttcaacatccaggtcaaagaggtcacgcagaatgaaggcaccaagaccatcgccaataacctcaccagcaccatccaggtgtttacggactcggaataccagctgccgtacgtcctcggctctgcccaccagggctgcctgcctccgttcccggcggacgtcttcatgattcctcagtacggctacctgactctcaacaacggtagtcaggccgtgggacgttcctccttctactgcctggagtacttcccctctcagatgctgagaacgggcaacaacttttccttcagctaccctttcgaggacgtgcctttccacagcagctacgcgcacagccagagtttggacaggctgatgaatcctctcatcgaccagtacctgtactacctgtcaagaacccagtctacgggaggcacagcgggaacccagcagttgctgttttctcaggccgggcctagcaacatgtcggctcaggccagaaactggctgcctggaccctgctacagacagcagcgcgtctccacgacactgtcgcaaaacaacaacagcaactttgcctggactggtgccaccaagtatcatctgaacggcagagactctctggtgaatccgggcgtcgccatggcaaccaacaaggacgacgaggaccgcttcttcccatccagcggcatcctcatgtttggcaagcagggagctggaaaagacaacgtggactatagcaacgtgatgctaaccagcgaggaagaaatcaagaccaccaaccccgtggccacagaacagtatggcgtggtggctgataacctacagcagcaagacaccgctcctattgtgggggccgtcaacagccagggagccttacctggcatggtctggcagaaccgggacgtgtacctgcagggtcctatttgggccaagattcctcacacagatggcaactttcacccgtctcctttaatgggcggctttggacttaaacatccgcctcctcaggtcctcatcaaaaacactcctgttcctgcggatcctccaacagcgttcaaccaggccaagctgaattctttcatcacgcagtacagcaccggacaagtcagcgtggagatcgagtgggagctgcagaaggagaacagcaagcgctggaacccagagattcagtatacttccaactactacaaatctacaaatgtggactttgctgttaatactgagggtgtttactctgagcctcgccccattggcactcgttacctcacccgtaatctgtaa

SEQ ID NO: 495 - DNA, 2214 bp, Artificial Sequence
  source: /note="Description of Artificial Sequence: Synthetic polynucleotide"
atggctgctgacggttatcttccagattggctcgaggacaacctctctgagggcattcgcgagtggtgggacctgaaacctggagcccccaagcccaaggccaaccagcagaagcaggacgacggccggggtctggtgcttcctggctacaagtacctcggacccttcaacggactcgacaagggggagcccgtcaacgcggcggacgcagcggccctcgagcacgacaaggcctacgaccagcagctcaaagcgggtgacaatccgtacctgcggtataaccacgccgacgccgagttccaggagcgtctgcaagaagatacgtcttttgggggcaacctcgggcgagcagtcttccaggccaagaagcgggttctcgaacctctcggtctggctgaggaagctgctaagacggctcctggaaagaagagaccggtagaaccgtcacctcagcgttcccccgactcctccacgggcatcggcaagaaaggccagcagcccgctagaaagagactgaactttgggcagactggcgactcagagtcagtccccgaccctcaaccaatcggagagccaccagcaggcccctctggtctgggatctggtacaatggctgcaggcggtggcgcaccaatggctgacaataacaagggcgccgacggagtgggtaatgcctcaggaaattggcattgcgattccacatggctgggcgacagagtcatcaccaccagcacccgaacctgggctttgcccacctacaacaaccacctctacaagcaaatctccagtcagtcagcaggtagcaccaacgacaacgtctacttcggctacagcaccccctgggggtattttgacttcaacagattccactgtcacttctcaccacgtgactggcagcggctcatcaacaacaactggggattccggcccaagaagctcaacttcaagctgttcaacatccaggtcaaggaggtcacaacgggtgacggcgtcacgaccatcgccaataaccttaccagcacggttcaggtcttttcggactcggaataccagctgccctacgtcctcggctccgcacaccagggctgcctgcctccgttcccggcggacgtcttcatgattccccagtacggctacctgactctgaacaatgacagccaatcggtgggtcgttcctctttctactgcctggaatatttcccttctcaaatgctgagaacgggcaacaacttcaccttcagctacaccttcgaggacgttcccttccacagcagctacgcacacagccagagcctggaccggctgatgaatcctcttatcgaccagtacctgtattacctggccagaacacagagcaacgcaggaggcacagctggcaatcgggaactgcagttttatcagggcgggcctaccaccatggccgaacaagccaaaaactggctgcctggaccttgcttccggcaacaaagagtctccaagacgctggatcaaaacaacaacagcaactttgcttggactggtgccaccaaataccatctaaatggaagaaattcattggttaatcccggtgtcgccatggcaacccacaaggacgacgaggaacgcttcttcccttcgagcggagtcctgatttttggaaaaactggagcagctaataagactacactggaaaatgtgttaatgacaaatgaagaggaaattcgtcctaccaacccggtagccaccgaggaatacgggactgttagcagcaacctgcaggcggctaacactgcagcccagacacaagttgtcaacaaccagggagccttacctggtatggtctggcagaaccgggacgtgtacctgcagggtcccatctgggccaagattcctcacacggacggcaactttcacccgtctccgctgatgggcggctttggactgaagcatccgcctcctcagatcctgatcaaaaacactcctgttcctgctaatcccccggaggtgtttacgcctgccaagtttgcttctttcatcacacagtacagcaccggccaggtcagcgtggagatcgagtgggagctgcagaaggagaacagcaagcgctggaacccagagattcagtatacctccaattttgacaaacagactggtgtggactttgccgttgacagccagggtgtttattctgagcctcgccccattggtactcgttacctcacccgtaatctgtaa

SEQ ID NO: 496 - protein, 737 aa, Artificial Sequence
  source: /note="Description of Artificial Sequence: Synthetic polypeptide"
MAADGYLPDWLEDNLSEGIREWWDLKPGAPKPKANQQKQDDGRGLVLPGYKYLGPFNGLDKGEPVNAADAAALEHDKAYDQQLKAGDNPYLRYNHADAEFQERLQEDTSFGGNLGRAVFQAKKRVLEPLGLAEEAAKTAPGKKRPVEPSPQRSPDSSTGIGKKGQQPARKRLNFGQTGDSESVPDPQPIGEPPAGPSGLGSGTMAAGGGAPMADNNKGADGVGNASGNWHCDSTWLGDRVITTSTRTWALPTYNNHLYKQISSQSAGSTNDNVYFGYSTPWGYFDFNRFHCHFSPRDWQRLINNNWGFRPKKLNFKLFNIQVKEVTTGDGVTTIANNLTSTVQVFSDSEYQLPYVLGSAHQGCLPPFPADVFMIPQYGYLTLNNDSQSVGRSSFYCLEYFPSQMLRTGNNFTFSYTFEDVPFHSSYAHSQSLDRLMNPLIDQYLYYLARTQSNAGGTAGNRELQFYQGGPTTMAEQAKNWLPGPCFRQQRVSKTLDQNNNSNFAWTGATKYHLNGRNSLVNPGVAMATHKDDEERFFPSSGVLIFGKTGAANKTTLENVLMTNEEEIRPTNPVATEEYGTVSSNLQAANTAAQTQVVNNQGALPGMVWQNRDVYLQGPIWAKIPHTDGNFHPSPLMGGFGLKHPPPQILIKNTPVPANPPEVFTPAKFASFITQYSTGQVSVEIEWELQKENSKRWNPEIQYTSNFDKQTGVDFAVDSQGVYSEPRPIGTRYLTRNL

SEQ ID NO: 497 - DNA, 2217 bp, Artificial Sequence
  source: /note="Description of Artificial Sequence: Synthetic polynucleotide"
atggctgccgatggttatcttccagattggctcgaggacaacctctctgagggcattcgcgagtggtgggacctgaaacctggagccccgaaacccaaagccaaccagcaaaagcaggacgacggccggggtctggtgcttcctggctacaagtacctcggacccttcaacggactcgacaagggggagcccgtcaacgcggcggacgcagcggccctcgagcacgacaaggcctacgaccagcagctcaaagcgggtgacaatccgtacctgcggtataatcacgccgacgccgagtttcaggagcgtctgcaagaagatacgtcttttgggggcaacctcgggcgagcagtcttccaggccaagaagcgggttctcgaacctctcggtctggttgaggaaggcgctaagacggctcctggaaagaagagaccggtagagccgtcaccacagcgttcccccgactcctccacgggcatcggcaagaaaggccagcagcccgccagaaagagactcaatttcggtcagactggcgactcagagtcagtccccgaccctcaacctatcggagaacctccagcagcgccctctagtgtgggatctggtacaatggctgcaggcggtggcgcaccaatggcagacaataacgaaggtgccgacggagtgggtagttcctcgggaaattggcattgcgattccacatggctgggcgacagagtcatcaccaccagcacccgaacctgggccctgcccacctacaacaaccacctctacaagcaaatctccaacgggacctcgggaggcagcaccaacgacaacacctactttggctacagcaccccctgggggtattttgactttaacagattccactgccacttctcaccacgtgactggcagcgactcatcaacaacaactggggattccggcccaagagactcagcttcaagctcttcaacatccaggtcaaagaggtcacgcagaatgaaggcaccaagaccatcgccaataacctcaccagcaccatccaggtgtttacggactcggaataccagctgccgtacgtcctcggctctgcccaccagggctgcctgcctccgttcccggcggacgtcttcatgattcctcagtacggctacctgactctcaacaacggtagtcaggccgtgggacgttcctccttctactgcctggagtacttcccctctcagatgctgagaacgggcaacaacttttccttcagctacactttcgaggacgtgcctttccacagcagctacgcgcacagccagagtttggacaggctgatgaatcctctcatcgaccagtacctgtactacctgtcaagaacccagtctacgggaggcacagcgggaacccagcagttgctgttttctcaggccgggcctagcaacatgtcggctcaggccagaaactggctgcctggaccctgctacagacagcagcgcgtctccacgacactgtcgcaaaacaacaacagcaactttgcctggactggtgccaccaagtatcatctgaacggcagagactctctggtgaatccgggcgtcgccatggcaaccaacaaggacgacgaggaccgcttcttcccatccagcggcatcctcatgtttggcaagcagggagctggaaaagacaacgtggactatagcaacgtgatgctaaccagcgaggaagaaatcaagaccaccaaccccgtggccacagaacagtatggcgtggtggctgataacctacagcagcaaaacaccgctcctattgtgggggccgtcaacagccagggagccttacctggcatggtctggcagaaccgggacgtgtacctgcagggtcctatttgggccaagattcctcacacagatggcaactttcacccgtctcctttaatgggcggctttggacttaaacatccgcctcctcagatcctcatcaaaaacactcctgttcctgcggatcctccaacagcgttcaaccaggccaagctgaattctttcatcacgcagtacagcaccggacaagtcagcgtggagatcgtgtgggagctgcagaaggagaacagcaagcgcaggaacccagagattcagtatacttccaactactacaaatctacaaatgtggactttgctgttaatactgagggtgtttactctgagcctcgccccattggcactcgttacctcacccgtaatctgtaa

SEQ ID NO: 498 - protein, 738 aa, Artificial Sequence
  source: /note="Description of Artificial Sequence: Synthetic polypeptide"
MAADGYLPDWLEDNLSEGIREWWDLKPGAPKPKANQQKQDDGRGLVLPGYKYLGPFNGLDKGEPVNAADAAALEHDKAYDQQLKAGDNPYLRYNHADAEFQERLQEDTSFGGNLGRAVFQAKKRVLEPLGLVEEGAKTAPGKKRPVEPSPQRSPDSSTGIGKKGQQPARKRLNFGQTGDSESVPDPQPIGEPPAAPSSVGSGTMAAGGGAPMADNNEGADGVGSSSGNWHCDSTWLGDRVITTSTRTWALPTYNNHLYKQISNGTSGGSTNDNTYFGYSTPWGYFDFNRFHCHFSPRDWQRLINNNWGFRPKRLSFKLFNIQVKEVTQNEGTKTIANNLTSTIQVFTDSEYQLPYVLGSAHQGCLPPFPADVFMIPQYGYLTLNNGSQAVGRSSFYCLEYFPSQMLRTGNNFSFSYTFEDVPFHSSYAHSQSLDRLMNPLIDQYLYYLSRTQSTGGTAGTQQLLFSQAGPSNMSAQARNWLPGPCYRQQRVSTTLSQNNNSNFAWTGATKYHLNGRDSLVNPGVAMATNKDDEDRFFPSSGILMFGKQGAGKDNVDYSNVMLTSEEEIKTTNPVATEQYGVVADNLQQQNTAPIVGAVNSQGALPGMVWQNRDVYLQGPIWAKIPHTDGNFHPSPLMGGFGLKHPPPQILIKNTPVPADPPTAFNQAKLNSFITQYSTGQVSVEIVWELQKENSKRRNPEIQYTSNYYKSTNVDFAVNTEGVYSEPRPIGTRYLTRNL

SEQ ID NO: 499 - protein, 738 aa, Artificial Sequence
  source: /note="Description of Artificial Sequence: Synthetic polypeptide"
MAADGYLPDWLEDNLSEGIREWWDLKPGAPKPKANQQKQDDGRGLVLPGYKYLGPFNGLDKGEPVNAADAAALEHDKAYDQQLKAGDNPYLRYNHADAEFQERLQEDTSFGGNLGRAVFQAKKRVLEPLGLVEEGAKTAPGKKRPVEPSPQRSPDSSTGIGKKGQQPARKRLNFGQTGDSESVPDPQPIGEPPAAPSSVGSGTMAAGGGAPMADNNEGADGVGSSSGNWHCDSTWLGDRVITTSTRTWALPTYNNHLYKQISNGTSGGSTNDNTYFGYSTPWGYFDFNRFHCHFSPRDWQRLINNNWGFRPKRLSFKLFNIQVKEVTQNEGTKTIANNLTSTIQVFTDSEYQLPYVLGSAHQGCLPPFPADVFMIPQYGYLTLNNGSQAVGRSSFYCLEYFPSQMLRTGNNFSFSYTFEDVPFHSSYAHSQSLDRLMNPLIDQYLYYLSRTQSTGGTAGTQQLLFSQAGPSNMSAQARNWLPGPCYRQQRVSTTLSQNNNSNFAWTGATKYHLNGRDSLVNPGVAMATNKDDEDRFFPSSGILMFGKQGAGKDNVDYSNVMLTSEEEIKTTNPVATEQYGVVADNLQQQNTAPIVGAVNSQGALPGMVWQNRDVYLQGPIWAKIPHTDGNFHPSPLMGGFGLKHPPPQILIKNTPVPADPPTAFNQAKLNSFITQYSTGQVSVEIEWELQKENSKRWNPEIQYTSNYYKSTNVDFAVNTEGVYSEPRPIGTRYLTRNL

SEQ ID NO: 500 - protein, 738 aa, Artificial Sequence
  source: /note="Description of Artificial Sequence: Synthetic polypeptide"
MAADGYLPDWLEDNLSEGIREWWDLKPGAPKPKANQQKQDDGRGLVLPGYKYLGPFNGLDKGEPVNAADAAALEHDKAYDQQLKAGDNPYLRYNHADAEFQERLQEDTSFGGNLGRAVFQAKKRVLEPLGLVEEGAKTAPGKKRPVEPSPQRSPDSSTGIGKKGQQPARKRLNFGQTGDSESVPDPQPIGEPPAAPSSVGSGTMAAGGGAPMADNNEGADGVGSSSGNWHCDSTWLGDRVITTSTRTWALPTYNNHLYKQISNGTSGGSTNDNTYFGYSTPWGYFDFNRFHCHFSPRDWQRLINNNWGFRPKRLSFKLFNIQVKEVTQNEGTKTIANNLTSTIQVFTDSEYQLPYVLGSAHQGCLPPFPADVFMIPQYGYLTLNNGSQAVGRSSFYCLEYFPSQMLRTGNNFSFSYTFEDVPFHSSYAHSQSLDRLMNPLIDQYLYYLSRTQSTGGTAGTQQLLFSQAGPSNMSAQARNWLPGPCYRQQRVSTTLSQNNNSNFAWTGATKYHLNGRDSLVNPGVAMATNKDDEDRFFPSSGILMFGKQGAGKDNVDYSNVMLTSEEEIKTTNPVATEQYGVVADNLQQQNTAPIVGAVNSQGALPGMVWQNRDVYLQGPIWAKIPHTDGNFHPSPLMGGFGLKHPPPQILIKNTPVPADPPTAFNQAKLNSFITQYSTGQVSVEIVWELQKENSKRWNPEIQYTSNYYKSTNVDFAVNTEGVYSEPRPIGTRYLTRNL

SEQ ID NO: 501 - protein, 738 aa, Artificial Sequence; identical to SEQ ID NO: 499
  source: /note="Description of Artificial Sequence: Synthetic polypeptide"

SEQ ID NO: 502 - DNA, 2214 bp, Artificial Sequence
  source: /note="Description of Artificial Sequence: Synthetic polynucleotide"
atggctgctgacggttatcttccagattggctcgaggacaacctctctgagggcattcgcgagtggtgggacctgaaacctggagcccccaagcccaaggccaaccagcagaagcaggacgacggccggggtctggtgcttcctggctacaagtacctcggacccttcaacggactcgacaagggggagcccgtcaacgcggcggacgcagcggccctcgagcacgacaaggcctacgaccagcagctcaaagcgggtgacaatccgtacctgcggtataaccacgccgacgccgagtttcaggagcgtctgcaagaagatacgtcttttgggggcaacctcgggcgagcagtcttccaggccaagaagcgggttctcgaacctctcggtctggttgaggaagctgctaagacggctcctggaaagaagagaccggtagaaccgtcacctcagcgttcccccgactcctccacgggcatcggcaagaaaggccagcagcccgctagaaagagactgaactttgggcagactggcgactcagagtcagtccccgaccctcaaccaatcggagaaccaccagcaggcccctctggtctgggatctggtacaatggctgcaggcggtggcgctccaatggcagacaataacgaaggcgccgacggagtgggtaatgcctcaggaaattggcattgcgattccacatggctgggcgacagagtcatcaccaccagcacccgaacctgggctttgcccacctacaacaaccacctctacaagcaaatctccagtcagtcagcaggtagcaccaacgacaacgtctacttcggctacagcaccccctgggggtattttgacttcaacagattccactgtcacttctcaccacgtgactggcagcggctcatcaacaacaactggggattccggcccaagaagctcaacttcaagctgttcaacatccaggtcaaggaggtcacaacgaatgacggcgtcacgaccatcgccaataaccttaccagcacggttcaggtcttttcggactcggaataccagctgccctacgtcctcggctccgcacaccagggctgcctgcctccgttcccggcggacgtcttcatgattccccagtacggctacctgactctgaacaatggcagccaatcggtgggtcgttcctctttctactgcctggaatatttcccttctcaaatgctgagaacgggcaacaacttcaccttcagctacaccttcgaggacgttcccttccacagcagctacgcacacagccagagcctggaccggctgatgaatcctcttatcgaccagtacctgtattacctggccagaacacagagcaacgcaggaggcacagctggcaatcgggaactgcagttttatcagggcgggcctaccaccatggccgaacaagccaaaaactggctgcctagaccttgcttccggcaacaaagagtctccaagacgctggatcaaaacaacaacagcaactttgcttggactggtgccaccaaataccatctaaatggaagaaattcattggttaatcccggtgtcgccatggcaacccacaaggacgacgaggaacgcttcttcccttcgagcggagtcctgatttttggaaaaactggagcagctaataagactacactggaaaatgtgttaatgacaaatgaagaggaaattcgtcctaccaacccggtagccaccgaggaatacgggactgttagcagcaacctgcaggcggctaacactgcagcccagacacaagttgtcaacaaccagggagccttacctggtatggtctggcagaaccgggacgtgtacctgcagggtcccatctgggccaagattcctcacacggacggcaactttcacccgtctccgctgatgggcggctttggactgaagcatccgcctcctcagatcctgatcaaaaacactcctgttcctgctaatcccccggaggtgtttacgcctgccaagtttgcttctttcatcacacagtacagcaccggccaggtcagcgtggagatcgagtgggagctgcagaaggagaacagcaagcgctggaacccagagattcagtatacctccaattttgacaaacagactggtgtggactttgccgttgacagccagggtgtttattctgagcctcgccccattggtactcgttacctcacccgtaatctgtaa

SEQ ID NO: 503 - protein, 737 aa, Artificial Sequence
  source: /note="Description of Artificial Sequence: Synthetic polypeptide"
MAADGYLPDWLEDNLSEGIREWWDLKPGAPKPKANQQKQDDGRGLVLPGYKYLGPFNGLDKGEPVNAADAAALEHDKAYDQQLKAGDNPYLRYNHADAEFQERLQEDTSFGGNLGRAVFQAKKRVLEPLGLVEEAAKTAPGKKRPVEPSPQRSPDSSTGIGKKGQQPARKRLNFGQTGDSESVPDPQPIGEPPAGPSGLGSGTMAAGGGAPMADNNEGADGVGNASGNWHCDSTWLGDRVITTSTRTWALPTYNNHLYKQISSQSAGSTNDNVYFGYSTPWGYFDFNRFHCHFSPRDWQRLINNNWGFRPKKLNFKLFNIQVKEVTTNDGVTTIANNLTSTVQVFSDSEYQLPYVLGSAHQGCLPPFPADVFMIPQYGYLTLNNGSQSVGRSSFYCLEYFPSQMLRTGNNFTFSYTFEDVPFHSSYAHSQSLDRLMNPLIDQYLYYLARTQSNAGGTAGNRELQFYQGGPTTMAEQAKNWLPRPCFRQQRVSKTLDQNNNSNFAWTGATKYHLNGRNSLVNPGVAMATHKDDEERFFPSSGVLIFGKTGAANKTTLENVLMTNEEEIRPTNPVATEEYGTVSSNLQAANTAAQTQVVNNQGALPGMVWQNRDVYLQGPIWAKIPHTDGNFHPSPLMGGFGLKHPPPQILIKNTPVPANPPEVFTPAKFASFITQYSTGQVSVEIEWELQKENSKRWNPEIQYTSNFDKQTGVDFAVDSQGVYSEPRPIGTRYLTRNL

SEQ ID NO: 504 - DNA, 2214 bp, Artificial Sequence
  source: /note="Description of Artificial Sequence: Synthetic polynucleotide"
atggctgctgacggttatcttccagattggctcgaggacaacctctctgagggcattcgcgagtggtgggacctgaaacctggagcccccaagcccaaggccaaccagcagaagcaggacgacggccggggtctggtgcttcctggctacaagtacctcggacccttcaacggactcgacaagggggagcccgtcaacgcggcggacgcagcggccctcgagcacgacaaggcctacgaccagcagctcaaagcgggtgacaatccgtacctgcggtataaccatgccgacgccgagtttcaggagcgtctgcaagaagatacgtcttttgggggcaacctcgggcgagcagtcctccaggccaagaagcgggttctcgaacctctcggtctggttgaggaagctgctaagacggctcctggaaagaagagaccggtagaaccgtcacctcagcgttcccccgactcctccacgggcatcggcaagaaaggccagcagcccgctagaaagagactgaactttgggcagactggcgactcagagtcagtccccgaccctcaaccaatcggagaaccaccagcaggcccctctggtctgggatctggtacaatggctgcaggcggtggcgctccaatggcagacaataacgaaggcgccgacggagtgggtaatgcctcaggaaattggcattgcgattccacatggctgggcgacagagtcatcaccaccagcacccgaacctgggctttgcccacctacaacaaccacctctacaagcaaatctccagtcagtcagcaggtagcaccaacgacaacgtctacttcggctacagcaccccctgggggtattttgacttcaacagattccactgtcacttctcaccacgtgactggcagcggctcatcaacaacaactggggattccggcccaagaagctcaacttcaagctgttcaacatccaggtcaaggaggtcacaacgaatgacggcgtcacgaccatcgccaataaccttaccagcacggttcaggtcttttcggactcggaataccagctgccctacgtcctcggctccgcacaccagggctgcctgcctccgttcccggcggacgtcttcatgattccccagtacggctacctgactctgaacaatggcagccaatcggtgggtcgttcctctttctactgcctggaatatttcccttctcaaatgctgagaacgggcaacaacttcaccttcagctacaccttcgaggacgttcccttccacagcagctacgcacacagccagagcctggaccggctgatgaatcctcttatcgaccagtacctgtattacctggccagaacacagagcaacgcaggaggcacagctggcaatcgggaactgcagttttatcagggcgggcctaccaccatggccgaacaagccaaaaactggctgcctggaccttgcttccggcaacaaagagtctccaagacgctggatcaaaacaacaacagcaactttgcttggactggtgccaccaaataccatctaaatggaagaaattcattggttaatcccggtgtcgccatggcaacccacaaggacgacgaggaacgcttcttcccttcgagcggagtcctgatttttggaaaaactggagcagctaataagactacactggaaaatgtgttaatgacaaatgaagaggaaattcgtcctaccaacccggtagccaccgaggaatacgggactgttagcagcaacctgcaggcggctaacactgcagcccagacacaagttgtcaacaaccagggagccttacctggtatggtctggcagaaccgggacgtgtacctgcagggtcccatctgggccaagattcctcacacggacggcaactttcacccgtctccgctgatgggcggctttggactgaagcatccgcctcctcagatcctgatcaaaaacactcctgttcctgctaatcccccggaggtgtttacgcctgccaagtttgcttctttcatcacacagtacagcaccggccaggtcagcgtggagatcgagtgggagctgcagaaggagaacagcaagcgctggaacccagagattcagtatacctccaattttgacaaacagactggtgtggactttgccgttgacagccagggtgtttattctgagcctcgccccattggtactcgttacctcacccgtaatctgtaa

SEQ ID NO: 505 - protein, 737 aa, Artificial Sequence; identical to SEQ ID NO: 464
  source: /note="Description of Artificial Sequence: Synthetic polypeptide"

SEQ ID NO: 506 - protein, 737 aa, Artificial Sequence
  source: /note="Description of Artificial Sequence: Synthetic polypeptide"
MAADGYLPDWLEDNLSEGIREWWDLKPGAPKPKANQQKQDDGRGLVLPGYKYLGPFNGLDKGEPVNAADAAALEHDKAYDQQLKAGDNPYLRYNHADAEFQERLQEDTSFGGNLGRAVLQAKKRVLEPLGLVEEAAKTAPGKKRPVEPSPQRSPDSSTGIGKKGQQPARKRLNFGQTGDSESVPDPQPIGEPPAGPSGLGSGTMAAGGGAPMADNNEGADGVGNASGNWHCDSTWLGDRVITTSTRTWALPTYNNHLYKQISSQSAGSTNDNVYFGYSTPWGYFDFNRFHCHFSPRDWQRLINNNWGFRPKKLNFKLFNIQVKEVTTNDGVTTIANNLTSTVQVFSDSEYQLPYVLGSAHQGCLPPFPADVFMIPQYGYLTLNNGSQSVGRSSFYCLEYFPSQMLRTGNNFTFSYTFEDVPFHSSYAHSQSLDRLMNPLIDQYLYYLARTQSNAGGTAGNRELQFYQGGPTTMAEQAKNWLPGPCFRQQRVSKTLDQNNNSNFAWTGATKYHLNGRNSLVNPGVAMATHKDDEERFFPSSGVLIFGKTGAANKTTLENVLMTNEEEIRPTNPVATEEYGTVSSNLQAANTAAQTQVVNNQGALPGMVWQNRDVYLQGPIWAKIPHTDGNFHPSPLMGGFGLKHPPPQILIKNTPVPANPPEVFTPAKFASFITQYSTGQVSVEIEWELQKENSKRWNPEIQYTSNFDKQTGVDFAVDSQGVYSEPRPIGTRYLTRNL

SEQ ID NO: 507 - DNA, 2217 bp, Artificial Sequence
  source: /note="Description of Artificial Sequence: Synthetic polynucleotide"
atggctgccgatggttatcttccagattggctcgaggacaacctctctgagggcattcgcgagtggtgggacctgaaacctggagccccgaaacccaaagccaaccagcaaaagcaggacgacggccggggtctggtgcttcctggctacaagtacctcggacccttcaacggactcgacaagggggagcccgtcaacgcggcggacgcagcggccctcgagcacgacaaggcctacgaccagcagctcaaagcgggtgacaatccgtacctgcggtataatcacgccgacgccgagtttcaggagcgtctgcaagaagatacgtcttttgggggcaacctcgggcgagcagtcttccaggccaagaagcgggttctcgaacctctcggtctggttgaggaaggcgctaagacggctcctggaaagaagagaccggtagagccgtcaccacagcgttcccccgactcctccacgggcatcggcaagaaaggccagcagcccgccagaaagagactcaatttcggtcagactggcgactcagagtcagtccccgaccctcaacctatcggagaacctccagcagcgccctctagtgtgggatctggtacaatggctgcaggcggtggcgcaccaatggcagacaataacgaaggtgccgacggagtgggtagttcctcgggaaattggcattgcgattccacatggctgggcgacagagtcatcaccaccagcacccgaacctgggccctgcccacctacaacaaccacctctacaagcaaatctccaacgggacctcgggaggcagcaccaacgacaacacctactttggctacagcaccccctgggggtattttgactttaacagattccactgccacttctcaccacgtgactggcagcgactcatcaacaacaactggggattccggcccaagagactcagcttcaagctcttcaacatccaggtcaaagaggtcacgcagaatgaaggcaccaagaccatcgccaataacctcaccagcaccatccaggtgtttacggactcggaataccagctgccgtacgtcctcggctctgcccaccagggctgcctgcctccgttcccggcggacgtcttcatgattcctcagtacggctacctgactctcaacaacggtagtcaggccgtgggacgttcctccttctactgcctggagtacttcccctctcagatgctgagaacgggcaacaacttttccttcagctacactttcgaggacgtgcctttccacagcagctacgcgcacagccagagtttggacaggctgatgaatcctctcatcgaccagtacctgtactacctgtcaagaacccagtctacgggaggcacagcgggaacccagcagttgctgttttctcaggccgggcctagcaacatgtcggctcaggccagaaactggctgcctggaccctgctacagacagcagcgcgtctccacgacactgtcgcaaaacaacaacagcaactttgcctggactggtgccaccaagtatcatctgaacggcagagactctctggtgaatccgggcgtcgccatggcaaccaacaaggacgacgaggaccgcttcttcccacccagcggcatcctcatgtttggcaagcagggagctggaaaagacaacgtggactatagcaacgtgatgctaaccagcgaggaagaaatcaagaccaccaaccccgtggccacagaacagtatggcgtggtggctgataacctacagcagcaaaacaccgctcctattgtgggggccgtcaacagccagggagccttacctggcatggtctggcagaaccgggacgtgtacctgcagggtcctatttgggccaagattcctcacacagatggcaactttcacccgtctcctttaatgggcggctttggacttaaacatccgcctcctcagatcctcatcaaaaacactcctgttcctgcggatcctccaacagcgttcaaccaggccaagctgaattctttcatcacgcagtacagcaccggacaagtcagcgtggtgatcgagtgggagctgcagaaggagaacagcaagcgctggaacccagagattcagtatacttccaactactacaaatctacaaatgtggactttgctgttaatactgagggtgtttactctgagcttcgccccattggcactcgttacctcacccgtaatctgtaa

SEQ ID NO: 508 - protein, 738 aa, Artificial Sequence
  source: /note="Description of Artificial Sequence: Synthetic polypeptide"
MAADGYLPDWLEDNLSEGIREWWDLKPGAPKPKANQQKQDDGRGLVLPGYKYLGPFNGLDKGEPVNAADAAALEHDKAYDQQLKAGDNPYLRYNHADAEFQERLQEDTSFGGNLGRAVFQAKKRVLEPLGLVEEGAKTAPGKKRPVEPSPQRSPDSSTGIGKKGQQPARKRLNFGQTGDSESVPDPQPIGEPPAAPSSVGSGTMAAGGGAPMADNNEGADGVGSSSGNWHCDSTWLGDRVITTSTRTWALPTYNNHLYKQISNGTSGGSTNDNTYFGYSTPWGYFDFNRFHCHFSPRDWQRLINNNWGFRPKRLSFKLFNIQVKEVTQNEGTKTIANNLTSTIQVFTDSEYQLPYVLGSAHQGCLPPFPADVFMIPQYGYLTLNNGSQAVGRSSFYCLEYFPSQMLRTGNNFSFSYTFEDVPFHSSYAHSQSLDRLMNPLIDQYLYYLSRTQSTGGTAGTQQLLFSQAGPSNMSAQARNWLPGPCYRQQRVSTTLSQNNNSNFAWTGATKYHLNGRDSLVNPGVAMATNKDDEDRFFPPSGILMFGKQGAGKDNVDYSNVMLTSEEEIKTTNPVATEQYGVVADNLQQQNTAPIVGAVNSQGALPGMVWQNRDVYLQGPIWAKIPHTDGNFHPSPLMGGFGLKHPPPQILIKNTPVPADPPTAFNQAKLNSFITQYSTGQVSVVIEWELQKENSKRWNPEIQYTSNYYKSTNVDFAVNTEGVYSELRPIGTRYLTRNL

SEQ ID NO: 509 - DNA, 2214 bp, Artificial Sequence
  source: /note="Description of Artificial Sequence: Synthetic polynucleotide"
atggctgctgacggttatcttccagattggctcgaggacaacctctctgagggcattcgcgagtggtgggacctgaaacctggagcccccaagcccaaggccaaccagcagaagcaggacgacggccggggtctggtgcttcctggctacaagtacctcggacccttcaacggactcgacaagggggagcccgtcaacgcggcggacgcagcggccctcgagcacgacaaggcctacgaccagcagctcaaagcgggtgacaatccgtacctgcggtataaccacgccgacgccgagtttcaggagcgtctgcaagaagatacgtcttttgggggcaacctcgggcgagcagtcttccaggccaagaagcgggttctcgaacctctcggtctggttgaggaagctgctaagacggctcctggaaagaagagaccggtagaaccgtcacctcagcgttcccccgactcctccacgggcatcggcaagaaaggccagcagcccgctagaaagagactgaactttgggcagactggcgactcagagtcagtccccgaccctcaaccaatcggagaaccaccagcaggcccctctggtctgggatctggtacaatggctgcaggcggtggcgccccaatggcagacaataacgaaggcgccgacggagtgggtaatgcctcaggaaattggcattgcgattccacatggctgggcgacagagtcatcaccaccagcacccgaacctgggctttgcccacctacaacaaccacctctacaagcaaatctccagtcagtcagcaggtagcaccaacgacaacgtctacttcggctacagcaccccctgggggtattttgacttcaacagattccactgtcacttctcaccacgtgactggcagcggctcatcaacaacaactggggattccggcccaagaagctcaacttcaagctgttcaacatccaggtcaaggaggtcacaacgaatgacggcgtcacgaccatcgccaataaccttaccagcacggttcaggtcttttcggactcggaataccagctgccctacgtcctcggctccgcacaccagggctgcctgcctccgttcccggcggacgtcttcatgattccccagtacggctacctgactctgaacaatggcagccaatcggtgggtcgttcctctttctactgcctggaatatttcccttctcaaatgctgagaacgggcaacaacttcaccatcagctacaccttcgaggacgttcccttccacagcagctacgcacacagccagagcctggaccggctgatgaatcctcttatcgaccagtacctgtattacctggccagaacacagagcaacgcaggaggcacagctggcaatcaggaactgcagttttatcagggcgggcctaccaccatggccgaacaagccaaaaactggctgcctggaccttgcttccggcaacaaagagtctccaagacgctggatcaaaacaacaacagcaactttgcttggactggtgccaccaaataccatctaaatggaagaaattcattggttaatcccggtgtcgccatggcaacccacaaggacgacgaggaacgcttcttcccttcgagcggagtcctgatttttggaaaaactggagcagctaataagactacactggaaaatgtgttaatgacaaatgaagaggaaattcgtcctaccaacccggtagccaccgaggaatacgggactgttagcagcaacctgcaggcggctaacactgcagcccagacacaagttgtcaacaaccagggagccttacctggtatggtctggcagaaccgggacgtgtacctgcagggtcccatctgggccaagattcctcacacagatggcaactttcacccgtctcctttaatgggcggctttggacttaaacatccgcctcctcagatcctcatcaaaaacactcctgttcctgcggatcctccaacagcgttcaaccaggccaagctgaattctttcatcacgcagtacagcaccggacaagtcagcgtggagatcgagtgggagctgcagaaggagaacagcaagcgctggaacccagagattcagtatacttccaactactacaaatctacaaatgtggactttgctgttaatactgagggtgtttactctgagcctcgccccattggcactcgttacctcacccgtaatctgtaa

SEQ ID NO: 510 - protein, 737 aa, Artificial Sequence
  source: /note="Description of Artificial Sequence: Synthetic polypeptide"
MAADGYLPDWLEDNLSEGIREWWDLKPGAPKPKANQQKQDDGRGLVLPGYKYLGPFNGLDKGEPVNAADAAALEHDKAYDQQLKAGDNPYLRYNHADAEFQERLQEDTSFGGNLGRAVFQAKKRVLEPLGLVEEAAKTAPGKKRPVEPSPQRSPDSSTGIGKKGQQPARKRLNFGQTGDSESVPDPQPIGEPPAGPSGLGSGTMAAGGGAPMADNNEGADGVGNASGNWHCDSTWLGDRVITTSTRTWALPTYNNHLYKQISSQSAGSTNDNVYFGYSTPWGYFDFNRFHCHFSPRDWQRLINNNWGFRPKKLNFKLFNIQVKEVTTNDGVTTIANNLTSTVQVFSDSEYQLPYVLGSAHQGCLPPFPADVFMIPQYGYLTLNNGSQSVGRSSFYCLEYFPSQMLRTGNNFTISYTFEDVPFHSSYAHSQSLDRLMNPLIDQYLYYLARTQSNAGGTAGNQELQFYQGGPTTMAEQAKNWLPGPCFRQQRVSKTLDQNNNSNFAWTGATKYHLNGRNSLVNPGVAMATHKDDEERFFPSSGVLIFGKTGAANKTTLENVLMTNEEEIRPTNPVATEEYGTVSSNLQAANTAAQTQVVNNQGALPGMVWQNRDVYLQGPIWAKIPHTDGNFHPSPLMGGFGLKHPPPQILIKNTPVPADPPTAFNQAKLNSFITQYSTGQVSVEIEWELQKENSKRWNPEIQYTSNYYKSTNVDFAVNTEGVYSEPRPIGTRYLTRNL

SEQ ID NO: 511 - DNA, 2217 bp, Artificial Sequence
  source: /note="Description of Artificial Sequence: Synthetic polynucleotide"
atggctgccgatggttatcttccagattggctcgaggacaacctctctgagggcattcgcgagtggtgggacctgaaacctggagccccgaaacccaaagccaaccagcaaaagcaggacgacggccggggtctggtgcttcctggctacaagtacctcggacccttcaacggactcgacaagggggagcccgtcaacgcggcggacgcagcggccctcgagcacgacaaggcctacgaccagcagctcaaagcgggtgacaatccgtacctgcggtataatcacgccgacgccgagtttcaggagcgtctgcaagaagatacgtcttttgggggcaacctcgggcgagcagtcttccaggccaagaagcgggttctcgaacctctcggtctggttgaggaaggcgctaagacggctcctggaaagaagagaccggtagagccgtcaccacagcgttcccccgactcctccacgggcatcggcaagaaaggccagcagcccgccagaaagagactcaatttcggtcagactggcgactcagagtcagtccccgaccctcaacctatcggagaacctccagcagcgccctctagtgtgggatctggtacaatggctgcaggcggtggcgcaccaatggcagacaataacgaaggtgccgacggagtgggtagttcctcgggaaattggcattgcgattccacatggctgggcgacagagtcatcaccaccagcacccgaacctgggccctgcccgcctacaacaaccacctctacaagcaaatctccaacgggacctcgggaggcagcaccaacgacaacacctactttggctacagcaccccctgggggtattttgactttaacagattccactgccacttctcaccacgtgactggcagcgactcatcaacaacaactggggattccggcccaagagactcagcttcaagctcttcaacatccaggtcaaagaggtcacgcagaatgaaggcaccaagaccatcgccaataacctcaccagcaccatccaggtgtttacggactcggaataccagctgccgtacgtcctcggctctgcccaccagggctgcctgcctccgttcccggcggatgtcttcatgattcctcagtacggctacctgactctcaacaacggtagtcaggccgtgggacgttcctccttctactgcctggagtacttcccctctcagatgctgagaacgggcaacaacttttccttcagctacactttcgaggacgtgcctttccacagcagctacgcgcacagccagagtttggacaggctgatgaatcctctcatcgaccagtacctgtactacctgtcaagaacccagtctacgggaggcacagcgggaacccagcagttgctgttttctcaggccgggcctagcaacatgtcggctcaggccagaaactggctgcctggaccctgctacagacagcagcgcgtctccacgacactgtcgcaaaacaacaacagcaactttgcctggactggtgccaccaagtatcatctgagcggcagagactctctggtgaatccgggcgtcgccatggcaaccaacaaggacgacgaggaccgcttcttcccatccagcggcatcctcatgtttggcaagcagggagctggaaaagacaacgtggactatagcaacgtgatgctaaccagcgaggaagaaatcaagaccaccaaccccgtggccacagaacagtatggcgtggtggctgataacctacagcagcaaaacaccgctcctattgtgggggccgtcaacagccagggagccttacctggcatggtctggcagaaccgggacgtgtacctgcagggtcctatttgggccaagattcctcacacagatggcaactttcacccgtctcctttaatgggcggctttggacttaaacatccgcctcctcagatcctcatcaaaaacactcctgttcctgcggatcctccaacagcgttcaaccaggccaagctgaattcttccatcacgcagtacagcaccggacaagtcagcgtggagatcgagtgggagctgcagaaggagaacagcaagcgctggaacccagagattcagtatacttccaactactacaaatctacaaatgtggactttgctgttaatactgagggtgtttactctgagcctcgccccattggcactcgttacctcacccgtaatttgtaa

SEQ ID NO: 512 - protein, 738 aa, Artificial Sequence
  source: /note="Description of Artificial Sequence: Synthetic polypeptide"
MAADGYLPDWLEDNLSEGIREWWDLKPGAPKPKANQQKQDDGRGLVLPGYKYLGPFNGLDKGEPVNAADAAALEHDKAYDQQLKAGDNPYLRYNHADAEFQERLQEDTSFGGNLGRAVFQAKKRVLEPLGLVEEGAKTAPGKKRPVEPSPQRSPDSSTGIGKKGQQPARKRLNFGQTGDSESVPDPQPIGEPPAAPSSVGSGTMAAGGGAPMADNNEGADGVGSSSGNWHCDSTWLGDRVITTSTRTWALPAYNNHLYKQISNGTSGGSTNDNTYFGYSTPWGYFDFNRFHCHFSPRDWQRLINNNWGFRPKRLSFKLFNIQVKEVTQNEGTKTIANNLTSTIQVFTDSEYQLPYVLGSAHQGCLPPFPADVFMIPQYGYLTLNNGSQAVGRSSFYCLEYFPSQMLRTGNNFSFSYTFEDVPFHSSYAHSQSLDRLMNPLIDQYLYYLSRTQSTGGTAGTQQLLFSQAGPSNMSAQARNWLPGPCYRQQRVSTTLSQNNNSNFAWTGATKYHLSGRDSLVNPGVAMATNKDDEDRFFPSSGILMFGKQGAGKDNVDYSNVMLTSEEEIKTTNPVATEQYGVVADNLQQQNTAPIVGAVNSQGALPGMVWQNRDVYLQGPIWAKIPHTDGNFHPSPLMGGFGLKHPPPQILIKNTPVPADPPTAFNQAKLNSSITQYSTGQVSVEIEWELQKENSKRWNPEIQYTSNYYKSTNVDFAVNTEGVYSEPRPIGTRYLTRNL

SEQ ID NO: 513 - protein, 736 aa, Artificial Sequence; identical to SEQ ID NO: 13
  source: /note="Description of Artificial Sequence: Synthetic polypeptide"

SEQ ID NO: 514 - DNA, 2217 bp, Artificial Sequence
  source: /note="Description of Artificial Sequence: Synthetic polynucleotide"
atggctgctgacggttatcttccagattggctcgaggacaacctctctgagggcattcgcgagtggtgggacctgaaacctggagcccccaagcccaaggccaaccagcagaagcaggacgacggccggggtctggtgcttcctggctacaagtacctcggacccttcaacggactcgacaagggggagcccgtcaacgcggcggacgcagcggccctcgagcacgacaaggcctacgaccagcagctcaaagcgggtgacaatccgtacctgcggtataaccacgccgacgccgagtttcaggagcgtctgcaagaagatacgtcttttgggggcaacctcgggcgagcagtcttccaggccaagaagcgggttctcgaacctctcggtctggttgaggaagctgctaagacggctcctggaaagaagagaccggtagaaccgtcacctcagcgttcccccgactcctccacgggcatcggcaagaaaggccagcagcccgctaaaaagagactgaactttggtcagactggcgactcagagtcagtccccgaccctcaaccaatcggagaaccaccagcaggcccctctggtctgggatctggtacaatggctgcaggcggtggcgctccaatggcagacaataacgaaggcgccgacggagtgggtagttcctcaggaaattggcattgcgattccacatggctgggcgacagagtcatcaccaccagcacccgaacctgggccctgcccacctacaacaaccacctctacaagcaaatatccaatgggacatcgggaggaagcaccaacgacaacacctacttcggctacagcaccccctgggggtattttgacttcaacagattccactgccacttctcaccacgtgactggcagcgactcatcaacaacaactggggattccggccaaaaagactcagcttcaagctcttcaacatccaggtcaaggaggtcacgcagaatgaaggcaccaagaccatcgccaataaccttaccagcacgattcaggtatttacggactcggaataccagctgccgtacgtcctcggctccgcgcaccagggctgcctgcctccgttcccggcggacgtcttcatgattccccagtacggctaccttacactgaacaatggaagtcaagccgtaggccgttcctccttctactgcctggaatattttccatctcaaatgctgcgaactggaaacaattttgaattcagctacaccttcgaggacgtgcctttccacagcagctacgcacacagccagagcttggaccgactgatgaatcctctcatcgaccagtacctgtactacttatccagaactcagtccacaggaggaactcaaggtacccagcaattgttattttctcaagctgggcctgcaaacatgtcggctcaggctaagaactggctacctggaccttgctaccggcagcagcgagtctctacgacactgtcgcaaaacaacaacagcaactttgcttggactggtgccaccaaatatcacctgaacggaagagactctttggtaaatcccggtgtcgccatggcaacccacaaggacgacgaggaacgcttcttcccgtcgagtggagtcctgatgtttggaaaacagggtgctggaagagacaatgtggactacagcagcgttatgctaaccagcgaagaagaaattaaaaccactaaccctgtagccacagaacaatacggtgtggtggctgacaacttgcagcaaaccaatacagggcctattgtgggaaatgtcaacagccaaggagccttacctggcatggtctggcagaaccgagacgtgtacctgcagggtcccatctgggccaagattcctcacacggacggcaacttccacccttcaccgctaatgggaggatttggactgaagcacccacctcctcagatcctgatcaagaacacgccggtacctgcggatcctccaacaacgttcagccaggcgaaattggcttccttcattacgcagtacagcaccggacaggtcagcgtggaaatcgagtgggagctgcagaaggagaacagcaaacgctggaacccagagattcagtacacttcaaactactacaaatctacaaatgtggactttgctgtcaatacagagggaacttattctgagcctcgccccattggtactcgttacctcacccgtaatctgtaa

SEQ ID NO: 515 - protein, 738 aa, Artificial Sequence
  source: /note="Description of Artificial Sequence: Synthetic polypeptide"
MAADGYLPDWLEDNLSEGIREWWDLKPGAPKPKANQQKQDDGRGLVLPGYKYLGPFNGLDKGEPVNAADAAALEHDKAYDQQLKAGDNPYLRYNHADAEFQERLQEDTSFGGNLGRAVFQAKKRVLEPLGLVEEGAKTAPGKKRPVEPSPQRSPDSSTGIGKKGQQPARKRLNFGQTGDSESVPDPQPLGEPPAAPSSVGSGTMAAGGGAPMADNNEGADGVGSSSGNWHCDSTWLGDRVITTSTRTWALPTYNNHLYKQISNGTSGGSTNDNTYFGYSTPWGYFDFNRFHCHFSPRDWQRLINNNWGFRPKRLSFKLFNIQVKEVTQNEGTKTIANNLTSTIQVFTDSEYQLPYVLGSAHQGCLPPFPADVFMIPQYGYLTLNNGSQAVGRSSFYCLEYFPSQMLRTGNNFSFSYTFEDVPFHSSYAHSQSLDRLMNPLIDQYLYYLSRTQSTGGTAGTQQLLFSQAGPSNMSAQARNWLPGPCYRQQRVSTTLSQNNNSNFAWTGATKYHLNGRDSLVNPGVAMATNKDDEDRFFPSSGILMFGKQGAGKDNVDYSNVMLTSEEEIKTTNPVATEQYGVVADNLQRQNTAPIVGAVNSQGALPGMVWQNRDVYLQGPIWAKIPHTDGNFHPSPLMGGFGLKHPPPQILIKNTPVPADPPTAFNQAKLNSFITQYSTGQVSVEIEWELQKENSKRWNPEIQYTSNYYKSTNVDFAVNTEGVYSEPRPIGTRYLTRNL

SEQ ID NO: 516 - protein, 736 aa, Artificial Sequence
  source: /note="Description of Artificial Sequence: Synthetic polypeptide"
MAADGYLPDWLEDNLSEGIREWLNLKPGAPQPKANQQKQDNARGLVLPGYKYLGPFNGLDKGDPVNEADAAALEHDKAYGQQLKAGDNPYLKYNHADAEFQERLQKDTSFGGNLGKAVFQAKKRILEPLGLVETPAKTAPGKKRPVDPSPQRSPDSSSGIGKKSPHPARKRLNFGQTGEAESVPDPQPIGEPPSDPSSVGSGTMAAGGGAPMADNNEGADGVGNSSGNWHCDSTWLGDRVITTSTRTWALPTYNNHLYKQISSQSGATNDNHYFGYSTPWGYFDFNRFHCHFSPRDWQRLINNNWGFRPKRLSFKLFNIQVKEVTQNDGTTTIANNLTSTVQVFTDSEYQLPYVLGSAHQGCLPPFPADVFMIPQYGYLTLNNGSQAVGRSSFYCLEYFPSQMLRTGNNFQFSYTFEDVPFHSSYAHSQSLDRLMNPLIDQYLYYLSKTQGTNATVQGAKLQFSQAGPSNMRDQARNWLPGPCYRQQRVSKTANDNNNSEYAWTGATKYHLNGRDSLVNPGPAMASHKDDEEKFFPMNGTLVFGKNGAGNSNVDIENVMITDEEEIRTTNPVATEQYGVVSDNLQSSNTRPITGDVDSQGVLPGMVWQDRDVYLQGPIWAKIPHTDGHFHPSPLMGGFGLKHPPPQILIKNTPVPANPATTFTPGKFASFITQYSTGQVSVQIEWELQKENSKRWNPEIQYTSNYNKSVNVDFTVDTNGVYSEPRPIGTRYLTRNL

SEQ ID NO: 517 - protein, 736 aa, Artificial Sequence; identical to SEQ ID NO: 92
  source: /note="Description of Artificial Sequence: Synthetic polypeptide"

SEQ ID NO: 518 - protein, 736 aa, Artificial Sequence
  source: /note="Description of Artificial Sequence: Synthetic polypeptide"
MAADGYLPDWLEDNLSEGIREWWDLKPGAPKPKANQQKQDDGRGLVLPGYKYLGPFNGLDKGEPVNAADAAALEHDKAYDQQLKAGDNPYLRYNHADAEFQERLQEDTSFGGNLGRAVFQAKKRVLEPLGLVEEGAKTAPGKKRPVEQSPQEPDSSSGIGKTGQQPAKKRLNFGQTGDSESVPDPQPLGEPPAAPSGLGPNTMASGGGAPMADNNEGADGVGNSSGNWHCDSTWLGDRVITTSTRTWALPTYNNHLYKQISNGTSGGSTNDNTYFGYSTPWGYFDFNRFHCHFSPRDWQRLINNNWGFRPKRLNFKLFNIQVKEVTTNEGTKTIANNLTSTVQVFTDSEYQLPYVLGSAHQGCLPPFPADVFMVPQYGYLTLNNGSQALGRSSFYCLEYFPSQMLRTGNNFQFSYTFEDVPFHSSYAHSQSLDRLMNPLIDQYLYYLVRTQTTGTGGTQTLAFSQAGPSSMANQARNWVPGPCYRQQRVSTTTNQNNNSNFAWTGAAKFKLNGRDSLMNPGVAMASHKDDEDRFFPSSGVLIFGKQGAGNDGVDYSQVLITDEEEIKATNPVATEEYGAVAINNQAANTQAQTGLVHNQGVIPGMVWQNRDVYLQGPIWAKIPHTDGNFHPSPLMGGFGLKHPPPQILIKNTPVPADPPLTFNQAKLNSFITQYSTGQVSVEIEWELQKENSKRWNPEIQYTSNYYKSTNVDFAVNTEGVYSEPRPIGTRYLTRNL

SEQ ID NO: 519 - protein, 736 aa, Artificial Sequence; identical to SEQ ID NO: 518
  source: /note="Description of Artificial Sequence: Synthetic polypeptide"

SEQ ID NO: 520 - protein, 736 aa, Artificial Sequence
  source: /note="Description of Artificial Sequence: Synthetic polypeptide"
MAADGYLPDWLEDNLSEGIREWWDLKPGAPKPKANQQKQDDGRGLVLPGYKYLGPFNGLDKGEPVNAADAAALEHDKAYDQQLKAGDNPYLRYNHADAEFQERLQEDTSFGGNLGRAVFQAKKRVLEPLGLVEEGAKTAPGKKRPVEQSPQEPDSSSGIGKTGQQPAKKRLNFGQTGDSESVPDPQPLGEPPAAPSGLGPNTMASGGGAPMADNNEGADGVGNSSGNWHCDSTWLGDRVITTSTRTWALPTYNNHLYKQISNGTSGGSTNDNTYFGYSTPWGYFDFNRFHCHFSPRDWQRLINNNWGFRPKRLNFKLFNIQVKEVTTNEGTKTIANNLTSTVQVFTDSEYQLPYVLGSAHQGCLPPFPADVFMVPQYGYLTLNNGSQALGRSSFYCLEYFPSQMLRTGNNFQFSYTFEDVPFHSSYAHSQSLDRLMNPLIDQYLYYLVRTQTTGTGGTQTLAFSQAGPSSMANQARNWVPGPCYRQQRVSTTTNQNNNSNFAWTGAAKFKLNGRDSLMNPGVAMASHKDDEDRFFPSSGVLIFGKQGAGNDGVDYSQVLITDEEEIKATNPVATEEYGAVAINNQRANTQAQTGLVHNQGVIPGMVWQNRDVYLQGPIWAKIPHTDGNFHPSPLMGGFGLKHPPPQILIKNTPVPADPPLTFNQAKLNSFITQYSTGQVSVEIEWELQKENSKRWNPEIQYTSNYYKSTNVDFAVNTEGVYSEPRPIGTRYLTRNL

SEQ ID NO: 521 - protein, 736 aa, Artificial Sequence
  source: /note="Description of Artificial Sequence: Synthetic polypeptide"
MAADGYLPDWLEDNLSEGIREWWDLKPGAPKPKANQQKQDDGRGLVLPGYKYLGPFNGLDKGEPVNAADAAALEHDKAYDQQLKAGDNPYLRYNHADAEFQERLQEDTSFGGNLGRAVFQAKKRVLEPLGLVEEGAKTAPGKKRPVEQSPQEPDSSSGIGKTGQQPAKKRLNFGQTGDSESVPDPQPLGEPPAAPSGLGPNTMASGGGAPMADNNEGADGVGNSSGNWHCDSTWLGDRVITTSTRTWALPTYNNHLYKQISNGTSGGSTNDNTYFGYSTPWGYFDFNRFHCHFSPRDWQRLINNNWGFRPKRLNFKLFNIQVKEVTTNEGTKTIANNLTSTVQVFTDSEYQLPYVLGSAHQGCLPPFPADVFMVPQYGYLTLNNGSQALGRSSFYCLEYFPSQMLRTGNNFQFSYTFEDVPFHSSYAHSQSLDRLMNPLIDQYLYYLVRTQTTGTGGTQTLAFSQAGPSSMANQARNWVPGPCYRQQRVSTTTNQNNNSNFAWTGAAKFKLNGRDSLMNPGVAMASHKDDEDAFFPSSGVLIFGKQGAGNDGVDYSQVLITDEEEIKATNPVATEEYGAVAINNQAANTQAQTGLVHNQGVIPGMVWQNRDVYLQGPIWAKIPHTDGNFHPSPLMGGFGLKHPPPQILIKNTPVPADPPLTFNQAKLNSFITQYSTGQVSVEIEWELQKENSKRWNPEIQYTSNYYKSTNVDFAVNTEGVYSEPRPIGTRYLTRNL

SEQ ID NO: 522 - DNA, 1803 bp, Bovine adeno-associated virus
acggcgcctgcggcaaaaaagaggcctctagagcagagtcctcaagagccagactcctcgagcggagttggcaagaaaggcaaacagcctgccagaaagagactcaactttgacgacgaacctggagccggagacgggcctcccccagaaggaccatcttccggagctatgtctactgagactgaaatgcgtgcagcagctggcggaaatggtggcgatgcgggacaaggtgccgagggagtgggtaatgcctccggtgattggcattgcgattccacttggtcagagagccacgtcaccaccacctcaacccgcacctgggtcctgccgacctacaacaaccacctgtacctgcggctcggctcgagcaacgccagcgacaccttcaacggattctccaccccctggggatactttgactttaaccgcttccactgccacttctcgccaagagactggcaaaggctcatcaacaaccactggggactgcgccccaaaagcatgcaagtccgcatcttcaacatccaagttaaggaggtcacgacgtctaacggggagacgaccgtatccaacaacctcaccagcacggtccagatctttgcggacagcacgtacgagctcccgtacgtgatggatgcaggtcaggagggcagcttgcctcctttccccaacgacgtgttcatggtgcctcagtacgggtactgcggactggtaaccggaggcagctctcaaaaccagacagacagaaatgccttctactgtctggagtactttcccagccagatgctgagaaccggaaacaactttgagatggtgtacaagtttgaaaacgtgcccttccactccatgtacgctcacagccagagcctggataggctgatgaacccgctgctggaccagtacctgtgggagctccagtctaccacctctggaggaactctcaaccagggcaattcagccaccaactttgccaagctgaccaaaacaaacttttctggctaccgcaaaaactggctcccggggcccatgatgaagcagcagagattctccaagactgccagtcaaaactacaagattccccagggaagaaacaacagtctgctccattatgagaccagaactaccctcgacggaagatggagcaattttgccccgggaacggccatggcaaccgcagccaacgacgccaccgacttctctcaggcccagctcatctttgcggggcccaacatcaccggcaacaccaccacagatgccaataacctgatgttcacttcagaagatgaacttagggccaccaacccccgggacactgacctgtttggccacctggcaaccaaccagcaaaacgccaccaccgttcctaccgtagacgacgtggacggagtcggcgtgtacccgggaatggtgtggcaggacagagacatttactaccaagggcccatttgggccaaaattccacacacggatggacactttcacccgtctcctctcattggcggatttggactgaaaagcccgcctccacaaatattcatcaaaaacactcctgtacccgccaatcccgcaacgaccttctctccggccagaatcaacagcttcatcacccagtacagcaccggacaggtggctgtcaaaatagaatgggaaatccagaaggagcggtccaagagatggaacccagaggtccagttcacgtccaactacggagcacaggactcgcttctctgggctcccgacaacgccggagcctacaaagagcccagggccattggatcccgatacctcaccaaccacctctag

SEQ ID NO: 523 - DNA, 1617 bp, Bovine adeno-associated virus
atgcgtgcagcagctggcggaaatggtggcgatgcgggacaaggtgccgagggagtgggtaatgcctccggtgattggcattgcgattccacttggtcagagagccacgtcaccaccacctcaacccgcacctgggtcctgccgacctacaacaaccacctgtacctgcggctcggctcgagcaacgccagcgacaccttcaacggattctccaccccctggggatactttgactttaaccgcttccactgccacttctcgccaagagactggcaaaggctcatcaacaaccactggggactgcgccccaaaagcatgcaagtccgcatcttcaacatccaagttaaggaggtcacgacgtctaacggggagacgaccgtatccaacaacctcaccagcacggtccagatctttgcggacagcacgtacgagctcccgtacgtgatggatgcaggtcaggagggcagcttgcctcctttccccaacgacgtgttcatggtgcctcagtacgggtactgcggactggtaaccggaggcagctctcaaaaccagacagacagaaatgccttctactgtctggagtactttcccagccagatgctgagaaccggaaacaactttgagatggtgtacaagtttgaaaacgtgcccttccactccatgtacgctcacagccagagcctggataggctgatgaacccgctgctggaccagtacctgtgggagctccagtctaccacctctggaggaactctcaaccagggcaattcagccaccaactttgccaagctgaccaaaacaaacttttctggctaccgcaaaaactggctcccggggcccatgatgaagcagcagagattctccaagactgccagtcaaaactacaagattccccagggaagaaacaacagtctgctccattatgagaccagaactaccctcgacggaagatggagcaattttgccccgggaacggccatggcaaccgcagccaacgacgccaccgacttctctcaggcccagctcatctttgcggggcccaacatcaccggcaacaccaccacagatgccaataacctgatgttcacttcagaagatgaacttagggccaccaacccccgggacactgacctgtttggccacctggcaaccaaccagcaaaacgccaccaccgttcctaccgtagacgacgtggacggagtcggcgtgtacccgggaatggtgtggcaggacagagacatttactaccaagggcccatttgggccaaaattccacacacggatggacactttcacccgtctcctctcattggcggatttggactgaaaagcccgcctccacaaatattcatcaaaaacactcctgtacccgccaatcccgcaacgaccttctctccggccagaatcaacagcttcatcacccagtacagcaccggacaggtggctgtcaaaatagaatgggaaatccagaaggagcggtccaagagatggaacccagaggtccagttcacgtccaactacggagcacaggactcgcttctctgggctcccgacaacgccggagcctacaaagagcccagggccattggatcccgatacctcaccaaccacctctag

SEQ ID NO: 524 - DNA, 1173 bp, Bovine adeno-associated virus
atggcgctggtaagctggctggtggaacatggcatcacttccgagaagcagtggattcaggagaatcaggagagctacctgtccttcaactccacgggaaactctcggagccagattaaagccgcgcttgacaacgcgtcaaaaattatgagtctgaccaaatctgcctcagactatctcgtgggacagactgttccagaggacatttctgaaaacagaatctggcagatttttgatctcaacggctacgacccggcatacgcgggctctgttctctacggctggtgcactcgcgcctttggaaagaggaacaccgtctggctgtatggacccgcgaccaccggaaagaccaacatcgcggaagccatctctcacaccgtgcccttttatggctgtgtgaactggactaatgagaactttccctttaatgactgtgtggaaaaaatgttgatctggtgggaggagggaaagatgaccagcaaggtggtggaacccgccaaggccatcttgggggggtctagagtacgagtggatcaaaaatgtaaatcctctgtacaagtagactctaccccggtgattatcacctccaatactaacatgtgtgtggtggtggatgggaactccacgacctttgaacaccagcagccgctggaagaccgcatgttcagatttgaactcatgcggcggctcccgccagattttggcaagattaccaagcaggaagtcaaagacttttttgcttgggcaaaggtcaaccaggtgccggtgactcacgagtttatggttcccaagaaagtggcgggaactgagagggcggagacttctagaaaacgcccactggatgacgtcaccaataccaactataaaagtccggagaagcgggcccggctctcagttgttcctgagacgcctcgcagttcagacgtgcctgtagagcccgctcctctgcgacctctcaactggtcttccaggtatgaatgcagatgtgactatcatgctaaatttgactctgtaacgggggaatgtgacgagtgtgaatatttgaatcggggcaaaaatggctgtatctttcataatgctacacattgtcaaatttgtcacgctgttcctccatgggaaaaggaaaatgtgtcagattttaatgattttgatgactgtaataaagagcagtaa

SEQ ID NO: 525 - DNA, 1833 bp, Bovine adeno-associated virus
atggctaccttctatgaagtcattgttcgcgttccatttgatgtggaagagcacctgcctggaatttctgacaactttgtagactgggtaactggtcaaatttgggagctgcctcccgagtcagatttgaatttgactctgattgagcagcctcagctgacggtggctgacagaattcgccgcgtgttcctgtacgagtggaacaaattttccaagcaggagagcaaattctttgtgcagtttgaaaagggatctgaatattttcatctgcacacgctcgtggagacctccggcatctcttctatggtccttggccgctacgtgagtcagattcgcgcccagctggtgaaggtggtgttccagaacattgagccgcggattaacgactgggtcgccatcaccaaggtaaagaagggcggagccaataaggtggtggattctgggtatattcccgcctacctgctgccgaaggtccaaccagagcttcagtgggcgtggactaacctcgaagagtataaattggccgccctcaatctggaggagcgcaaacggctcgtcgctcagtttcagcttgagtcctcgcagcgctcgcaagaggcatcttcccagagggacgtttcggctgacccggtcatcaagagcaagacttcccagaaatacatggcgctggtaagctggctggtggaacatggcatcacttccgagaagcagtggattcaggagaatcaggagagctacctgtccttcaactccacgggaaactctcggagccagattaaagccgcgcttgacaacgcgtcaaaaattatgagtctgaccaaatctgcctcagactatctcgtgggacagactgttccagaggacatttctgaaaacagaatctggcagatttttgatctcaacggctacgacccggcatacgcgggctctgttctctacggctggtgcactcgcgcctttggaaagaggaacaccgtctggctgtatggacccgcgaccaccggaaagaccaacatcgcggaagccatctctcacaccgtgcccttttatggctgtgtgaactggactaatgagaactttccctttaatgactgtgtggaaaaaatgttgatctggtgggaggagggaaagatgaccagcaaggtggtggaacccgccaaggccatcttgggggggtctagagtacgagtggatcaaaaatgtaaatcctctgtacaagtagactctaccccggtgattatcacctccaatactaacatgtgtgtggtggtggatgggaactccacgacctttgaacaccagcagccgctggaagaccgcatgttcagatttgaactcatgcggcggctcccgccagattttggcaagattaccaagcaggaagtcaaagacttttttgcttgggcaaaggtcaaccaggtgccggtgactcacgagtttatggttcccaagaaagtggcgggaactgagagggcggagacttctagaaaacgcccactggatgacgtcaccaataccaactataaaagtccggagaagcgggcccggctctcagttgttcctgagacgcctcgcagttcagacgtgcctgtagagcccgctcctctgcgacctctcaactggtcttccaggtatgaatgcagatgtgactatcatgctaaatttgactctgtaacgggggaatgtgacgagtgtgaatatttgaatcggggcaaaaatggctgtatctttcataatgctacacattgtcaaatttgtcacgctgttcctccatgggaaaaggaaaatgtgtcagattttaatgattttgatgactgtaataaagagcagtaa

SEQ ID NO: 526 - DNA, 2211 bp, Bovine adeno-associated virus
atgtcttttgttgaccaccctccagattggttggaatcgatcggcgacggctttcgtgaatttctcggccttgaggcgggtcccccgaaacccaaggccaatcaacagaagcaagataacgctcgaggtcttgtgcttcctgggtacaagtatcttggtcctgggaacggccttgataagggcgatcctgtcaattttgctgacgaggttgcccgagagcacgacctctcctaccagaaacagcttgaggcgggcgataacccttacctcaagtacaaccacgcggacgcagagtttcaggagaaactcgcttctgacacttcttttgggggaaaccttgggaaggctgttttccaggctaaaaagaggattctcgaacctcttggcctggttgagacgccggataaaacggcgcctgcggcaaaaaagaggcctctagagcagagtcctcaagagccagactcctcgagcggagttggcaagaaaggcaaacagcctgccagaaagagactcaactttgacgacgaacctggagccggagacgggcctcccccagaaggaccatcttccggagctatgtctactgagactgaaatgcgtgcagcagctggcggaaatggtggcgatgcgggacaaggtgccgagggagtgggtaatgcctccggtgattggcattgcgattccacttggtcagagagccacgtcaccaccacctcaacccgcacctgggtcctgccgacctacaacaaccacctgtacctgcggctcggctcgagcaacgccagcgacaccttcaacggattctccaccccctggggatactttgactttaaccgcttccactgccacttctcgccaagagactggcaaaggctcatcaacaaccactggggactgcgccccaaaagcatgcaagtccgcatcttcaacatccaagttaaggaggtcacgacgtctaacggggagacgaccgtatccaacaacctcaccagcacggtccagatctttgcggacagcacgtacgagctcccgtacgtgatggatgcaggtcaggagggcagcttgcctcctttccccaacgacgtgttcatggtgcctcagtacgggtactgcggactggtaaccggaggcagctctcaaaaccagacagacagaaatgccttctactgtctggagtactttcccagccagatgctgagaaccggaaacaactttgagatggtgtacaagtttgaaaacgtgcccttccactccatgtacgctcacagccagagcctggataggctgatgaacccgctgctggaccagtacctgtgggagctccagtctaccacctctggaggaactctcaaccagggcaattcagccaccaactttgccaagctgaccaaaacaaacttttctggctaccgcaaaaactggctcccggggcccatgatgaagcagcagagattctccaagactgccagtcaaaactacaagattccccagggaagaaacaacagtctgctccattatgagaccagaactaccctcgacggaagatggagcaattttgccccgggaacggccatggcaaccgcagccaacgacgccaccgacttctctcaggcccagctcatctttgcggggcccaacatcaccggcaacaccaccacagatgccaataacctgatgttcacttcagaagatgaacttagggccaccaacccccgggacactgacctgtttggccacctggcaaccaaccagcaaaacgccaccaccgttcctaccgtagacgacgtggacggagtcggcgtgtacccgggaatggtgtggcaggacagagacatttactaccaagggcccatttgggccaaaattccacacacggatggacactttcacccgtctcctctcattggcggatttggactgaaaagcccgcctccacaaatattcatcaaaaacactcctgtacccgccaatcccgcaacgaccttctctccggccagaatcaacagcttcatcacccagtacagcaccggacaggtggctgtcaaaatagaatgggaaatccagaaggagcggtccaagagatggaacccagaggtccagttcacgtccaactacggagcacaggactcgcttctctgggctcccgacaacgccggagcctacaaagagcccagggccattggatcccgatacctcaccaaccacctctag

SEQ ID NO: 527 - DNA, 4694 bp, Bovine adeno-associated virus
gtggcactcccccccctgtcgcgttcgctcgttcgctggctcgattgggggggtggcagctcaaagagctgccagacgacggccctctgggccgtcgcccccccaatcgagccagcgaacgagcgaacgcgacaggggggggagtgccacactctctagcaagggggttttgtaggtggtgatgtcattgttgatgtcattatagttgtcacgcgatagttaatgattaacagtcatgtgatgtgtgttatccaataggatgaaagcgcgcgaatgagatctcgcgagacttccggggtataaaaggggtgagtgaacgagcccgccgccattctctgctctggactgctagaggaccctcgctgccatggctaccttctatgaagtcattgttcgcgttccatttgatgtggaagagcacctgcctggaatttctgacaactttgtagactgggtaactggtcaaatttgggagctgcctcccgagtcagatttgaatttgactctgattgagcagcctcagctgacggtggctgacagaattcgccgcgtgttcctgtacgagtggaacaaattttccaagcaggagagcaaattctttgtgcagtttgaaaagggatctgaatattttcatctgcacacgctcgtggagacctccggcatctcttctatggtccttggccgctacgtgagtcagattcgcgcccagctggtgaaggtggtgttccagaacattgagccgcggattaacgactgggtcgccatcaccaaggtaaagaagggcggagccaataaggtggtggattctgggtatattcccgcctacctgctgccgaaggtccaaccagagcttcagtgggcgtggactaacctcgaagagtataaattggccgccctcaatctggaggagcgcaaacggctcgtcgctcagtttcagcttgagtcctcgcagcgctcgcaagaggcatcttcccagagggacgtttcggctgacccggtcatcaagagcaagacttcccagaaatacatggcgctggtaagctggctggtggaacatggcatcacttccgagaagcagtggattcaggagaatcaggagagctacctgtccttcaactccacgggaaactctcggagccagattaaagccgcgcttgacaacgcgtcaaaaattatgagtctgaccaaatctgcctcagactatctcgtgggacagactgttccagaggacatttctgaaaacagaatctggcagatttttgatctcaacggctacgacccggcatacgcgggctctgttctctacggctggtgcactcgcgcctttggaaagaggaacaccgtctggctgtatggacccgcgaccaccggaaagaccaacatcgcggaagccatctctcacaccgtgcccttttatggctgtgtgaactggactaatgagaactttccctttaatgactgtgtggaaaaaatgttgatctggtgggaggagggaaagatgaccagcaaggtggtggaacccgccaaggccatcttgggggggtctagagtacgagtggatcaaaaatgtaaatcctctgtacaagtagactctaccccggtgattatcacctccaatactaacatgtgtgtggtggtggatgggaactccacgacctttgaacaccagcagccgctggaagaccgcatgttcagatttgaactcatgcggcggctcccgccagattttggcaagattaccaagcaggaagtcaaagacttttttgcttgggcaaaggtcaaccaggtgccggtgactcacgagtttatggttcccaagaaagtggcgggaactgagagggcggagacttctagaaaacgcccactggatgacgtcaccaataccaactataaaagtccggagaagcgggcccggctctcagttgttcctgagacgcctcgcagttcagacgtgcctgtagagcccgctcctctgcgacctctcaactggtcttccaggtatgaatgcagatgtgactatcatgctaaatttgactctgtaacgggggaatgtgacgagtgtgaatatttgaatcggggcaaaaatggctgtatctttcataatgctacacattgtcaaatttgtcacgctgttcctccatgggaaaaggaaaatgtgtcagattttaatgattttgatgactgtaataaagagcagtaaataaagtgagtagtcatgtcttttgttgaccaccctccagattggttggaatcgatcggcgacggctttcgtgaatttctcggccttgaggcgggtcccccgaaacccaaggccaatcaacagaagcaagataacgctcgaggtcttgtgcttcctgggtacaagtatcttggtcctgggaacggccttgataagggcgatcctgtcaattttgctgacgaggttgcccgagagcacgacctctcctaccagaaacagcttgaggcgggcgataacccttacctcaagtacaaccacgcggacgcagagtttcaggagaaactcgcttctgacacttcttttgggggaaaccttgggaaggctgttttccaggctaaaaagaggattctcgaacctcttggcctggttgagacgccggataaaacggcgcctgcggcaaaaaagaggcctctagagcagagtcctcaagagccagactcctcgagcggagttggcaagaaaggcaaacagcctgccagaaagagactcaactttgacgacgaacctggagccggagacgggcctcccccagaaggaccatcttccggagctatgtctactgagactgaaatgcgtgcagcagctggcggaaatggtggcgatgcgggacaaggtgccgagggagtgggtaatgcctccggtgattggcattgcgattccacttggtcagagagccacgtcaccaccacctcaacccgcacctgggtcctgccgacctacaacaaccacctgtacctgcggctcggctcgagcaacgccagcgacaccttcaacggattctccaccccctggggatactttgactttaaccgcttccactgccacttctcgccaagagactggcaaaggctcatcaacaaccactggggactgcgccccaaaagcatgcaagtccgcatcttcaacatccaagttaaggaggtcacgacgtctaacggggagacgaccgtatccaacaacctcaccagcacggtccagatctttgcggacagcacgtacgagctcccgtacgtgatggatgcaggtcaggagggcagcttgcctcctttccccaacgacgtgttcatggtgcctcagtacgggtactgcggactggtaaccggaggcagctctcaaaaccagacagacagaaatgccttctactgtctggagtactttcccagccagatgctgagaaccggaaacaactttgagatggtgtacaagtttgaaaacgtgcccttccactccatgtacgctcacagccagagcctggataggctgatgaacccgctgctggaccagtacctgtgggagctccagtctaccacctctggaggaactctcaaccagggcaattcagccaccaactttgccaagctgaccaaaacaaacttttctggctaccgcaaaaactggctcccggggcccatgatgaagcagcagagattctccaagactgccagtcaaaactacaagattccccagggaagaaacaacagtctgctccattatgagaccagaactaccctcgacggaagatggagcaattttgccccgggaacggccatggcaaccgcagccaacgacgccaccgacttctctcaggcccagctcatctttgcggggcccaacatcaccggcaacaccaccacagatgccaataacctgatgttcacttcagaagatgaacttagggccaccaacccccgggacactgacctgtttggccacctggcaaccaaccagcaaaacgccaccaccgttcctaccgtagacgacgtggacggagtcggcgtgtacccgggaatggtgtggcaggacagagacatttactaccaagggcccatttgggccaaaattccacacacggatggacactttcacccgtctcctctcattggcggatttggactgaaaagcccgcctccacaaatattcatcaaaaacactcctgtacccgccaatcccgcaacgaccttctctccggccagaatcaacagcttcatcacccagtacagcaccggacaggtggctgtcaaaatagaatgggaaatccagaaggagcggtccaagagatggaacccagaggtccagttcacgtccaactacggagcacaggactcgcttctctgggctcccgacaacgccggagcctacaaagagcccagggccattggatcccgatacctcaccaaccacctctagcccaattctgttgcataccctcaataaaccgtgtattcgtttcagtaaaatactgcctcttgtggtcattcggcgtacaacagcttacaacaacaacaaaacccccttgctagagagtgtggcactcccccccctgtcgcgttcgctcgttcgctggctcgattgggggggtggcagctcaaagagctgccagacgacggccctctgggccgtcgcccccccaatcgagccagcgaacgagcgaacgcgacaggggggggagtgccac

SEQ ID NO: 528 - protein, 390 aa, Bovine adeno-associated virus
MALVSWLVEHGITSEKQWIQENQESYLSFNSTGNSRSQIKAALDNASKIMSLTKSASDYLVGQTVPEDISENRIWQIFDLNGYDPAYAGSVLYGWCTRAFGKRNTVWLYGPATTGKTNIAEAISHTVPFYGCVNWTNENFPFNDCVEKMLIWWEEGKMTSKVVEPAKAILGGSRVRVDQKCKSSVQVDSTPVIITSNTNMCVVVDGNSTTFEHQQPLEDRMFRFELMRRLPPDFGKITKQEVKDFFAWAKVNQVPVTHEFMVPKKVAGTERAETSRKRPLDDVTNTNYKSPEKRARLSVVPETPRSSDVPVEPAPLRPLNWSSRYECRCDYHAKFDSVTGECDECEYLNRGKNGCIFHNATHCQICHAVPPWEKENVSDFNDFDDCNKEQ

SEQ ID NO: 529 - protein, 610 aa, Bovine adeno-associated virus
MATFYEVIVRVPFDVEEHLPGISDNFVDWVTGQIWELPPESDLNLTLIEQPQLTVADRIRRVFLYEWNKFSKQESKFFVQFEKGSEYFHLHTLVETSGISSMVLGRYVSQIRAQLVKVVFQNIEPRINDWVAITKVKKGGANKVVDSGYIPAYLLPKVQPELQWAWTNLEEYKLAALNLEERKRLVAQFQLESSQRSQEASSQRDVSADPVIKSKTSQKYMALVSWLVEHGITSEKQWIQENQESYLSFNSTGNSRSQIKAALDNASKIMSLTKSASDYLVGQTVPEDISENRIWQIFDLNGYDPAYAGSVLYGWCTRAFGKRNTVWLYGPATTGKTNIAEAISHTVPFYGCVNWTNENFPFNDCVEKMLIWWEEGKMTSKVVEPAKAILGGSRVRVDQKCKSSVQVDSTPVIITSNTNMCVVVDGNSTTFEHQQPLEDRMFRFELMRRLPPDFGKITKQEVKDFFAWAKVNQVPVTHEFMVPKKVAGTERAETSRKRPLDDVTNTNYKSPEKRARLSVVPETPRSSDVPVEPAPLRPLNWSSRYECRCDYHAKFDSVTGECDECEYLNRGKNGCIFHNATHCQICHAVPPWEKENVSDFNDFDDCNKEQ

SEQ ID NO: 530 - protein, 538 aa, Bovine adeno-associated virus
MRAAAGGNGGDAGQGAEGVGNASGDWHCDSTWSESHVTTTSTRTWVLPTYNNHLYLRLGSSNASDTFNGFSTPWGYFDFNRFHCHFSPRDWQRLINNHWGLRPKSMQVRIFNIQVKEVTTSNGETTVSNNLTSTVQIFADSTYELPYVMDAGQEGSLPPFPNDVFMVPQYGYCGLVTGGSSQNQTDRNAFYCLEYFPSQMLRTGNNFEMVYKFENVPFHSMYAHSQSLDRLMNPLLDQYLWELQSTTSGGTLNQGNSATNFAKLTKTNFSGYRKNWLPGPMMKQQRFSKTASQNYKIPQGRNNSLLHYETRTTLDGRWSNFAPGTAMATAANDATDFSQAQLIFAGPNITGNTTTDANNLMFTSEDELRATNPRDTDLFGHLATNQQNATTVPTVDDVDGVGVYPGMVWQDRDIYYQGPIWAKIPHTDGHFHPSPLIGGFGLKSPPPQIFIKNTPVPANPATTFSPARINSFITQYSTGQVAVKIEWEIQKERSKRWNPEVQFTSNYGAQDSLLWAPDNAGAYKEPRAIGSRYLTNHL

SEQ ID NO: 531 - protein, 736 aa, Artificial Sequence
  source: /note="Description of Artificial Sequence: Synthetic polypeptide"
MSFVDHPPDWLESIGDGFREFLGLEAGPPKPKANQQKQDNARGLVLPGYKYLGPGNGLDKGDPVNFADEVAREHDLSYQKQLEAGDNPYLKYNHADAEFQEKLASDTSFGGNLGKAVFQAKKRILEPLGLVETPDKTAPAAKKRPLEQSPQEPDSSSGVGKKGKQPARKRLNFDDEPGAGDGPPPEGPSSGAMSTETEMRAAAGGNGGDAGQGAEGVGNASGDWHCDSTWSESHVTTTSTRTWVLPTYNNHLYLRLGSSNASDTFNGFSTPWGYFDFNRFHCHFSPRDWQRLINNHWGLRPKSMQVRIFNIQVKEVTTSNGETTVSNNLTSTVHIFADSTYELPYVMDAGQEGSLPPFPNDVFMVPQYGYCGLVTGGSSQNQTDRNAFYCLEYFPSQMLRTGNNFEMVYKFENVPFHSMYAHSQSLDRLMNPLLDQYLWELQSTTSGGTLNQGNSATNFAKLTNKNFSGYRKNWLPGPMMKQQRFSKTASQNYKIPQGGNNSLLHYETRTTLDRRWSNFAPGTAMATAANDATDFSQAQLIFAGPNITGNTTTDANNLMFTSEDELRATNPRDTDLFGHLATNQQNATTVPTVDDVDGVGVYPGMVWQDRDIYYQGPIWAKIPHTDGHFHPSPLIGGFGLKSPPPQIFIKNTPVPANPATTFSPARINSFITQYSTGQVAVKIEWEIQKERSKRWNPEVQFTSNYGAQDSLLWAPDNAGAYKEPRAIGSRYLTNHL

SEQ ID NO: 532 - protein, 736 aa, Artificial Sequence
  source: /note="Description of Artificial Sequence: Synthetic polypeptide"
MSFVDHPPDWLESIGDGFREFLGLEAGPPKPKANQQKQDNARGLVLPGYKYLGPGNGLDKGDPVNFADEVAREHDLSYQKQLEAGDNPYLKYNHADAEFQEKLASDTSFGGNLGKAVFQAKKRILEPLGLVETPDKTAPAAKKRPLEQSPQEPDSSSGVGKKGKQPARKRLNFDDEPGAGDGPPPEGPSSGAMSTETEMRAAAGGNGGDAGQGAEGVGNASGDWHCDSTWSESHVTTTSTRTWVLPTYNNHLYLRLGSSNASDTFNGFSTPWGYFDFNRFHCHFSPRDWQRLINNHWGLRPKSMQVRIFNIQVKEVTTSNGETTVSNNLTSTVQIFADSTYELPYVMDAGQEGSLPPFPNDVFMVPQYGYCGLVTGGSSQNQTDRNAFYCLEYFPSQMLRTGNNFEMVYKFENVPFHSMYAHSQSLDRLMNPLLDQYLWELQSTTSGGTLNQGNSATNFAKLTKTNFSGYRKNWLPGPMMKQQRFSKTASQNYKIPQGRNNSLLHYETRTTLDGRWSNFAPGTAMATAANDATDFSQAQLIFAGPNITGNTTTDANNLMFTSEDELRATNPRDTDLFGHLATNQQNATTVPTVDDVDGVGVYPGMVWQDRDIYYQGPIWAKIPHTDGHFHPSPLIGGFGLKSPPPQIFIKNTPVPANPATTFSPARINSFITQYSTGQVAVKIEWEIQKERSKRWNPEVQFTSNYGAQDSLLWAPDNAGAYKEPRAIGSRYLTNHL

SEQ ID NO: 533 - protein, 736 aa, Bovine adeno-associated virus; identical to SEQ ID NO: 532

SEQ ID NO: 534 - protein, 600 aa, Bovine adeno-associated virus
TAPAAKKRPLEQSPQEPDSSSGVGKKGKQPARKRLNFDDEPGAGDGPPPEGPSSGAMSTETEMRAAAGGNGGDAGQGAEGVGNASGDWHCDSTWSESHVTTTSTRTWVLPTYNNHLYLRLGSSNASDTFNGFSTPWGYFDFNRFHCHFSPRDWQRLINNHWGLRPKSMQVRIFNIQVKEVTTSNGETTVSNNLTSTVQIFADSTYELPYVMDAGQEGSLPPFPNDVFMVPQYGYCGLVTGGSSQNQTDRNAFYCLEYFPSQMLRTGNNFEMVYKFENVPFHSMYAHSQSLDRLMNPLLDQYLWELQSTTSGGTLNQGNSATNFAKLTKTNFSGYRKNWLPGPMMKQQRFSKTASQNYKIPQGRNNSLLHYETRTTLDGRWSNFAPGTAMATAANDATDFSQAQLIFAGPNITGNTTTDANNLMFTSEDELRATNPRDTDLFGHLATNQQNATTVPTVDDVDGVGVYPGMVWQDRDIYYQGPIWAKIPHTDGHFHPSPLIGGFGLKSPPPQIFIKNTPVPANPATTFSPARINSFITQYSTGQVAVKIEWEIQKERSKRWNPEVQFTSNYGAQDSLLWAPDNAGAYKEPRAIGSRYLTNHL

SEQ ID NO: 535 - DNA, 2214 bp, Artificial Sequence
  source: /note="Description of Artificial Sequence: Synthetic polynucleotide"
atggctgccgatggttatcttccagattggctcgaggacactctctctgaaggaataagacagtggtggaagctcaaacctggcccaccaccaccaaagcccgcagagcggcataaggacgacagcaggggtcttgtgcttcctgggtacaagtacctcggacccttcaacggactcgacaagggagagccggtcaacgaggcagacgccgcggccctcgagcacgacaaagcctacgaccggcagctcgacagcggagacaacccgtacctcaagtacaaccacgccgacgcggagtttcaggagcgccttaaagaagatacgtcttttgggggcaacctcgggcgagcagtcttccaggccaaaaagaggcttcttgaacctcttggtctggttgaggaagcggctaagacggctcctggaaagaagaggcctgtagagcagtctcctcaggaaccggactcctcctcgggcatcggcaagacaggccagcagcccgctaaaaagagactcaatttcggtcagactggcgacacagagtcagtcccagaccctcaaccaatcggagaacctcccgcagccccctcaggtgtgggatctcttacaatggcttcaggtggtggcgcaccagtggcagacaataacgaaggtgccgatggagtgggtagttcctcgggaaattggcattgcgattcccaatggctgggggacagagtcatcaccaccagcacccgaacctgggccctgcccacctacaacaatcacctctacaagcaaatctccaacgggacatcgggaggagccaccaacgacaacacctacttcggctacagcaccccctgggggtattttgactttaacagattccactgccacttttcaccacgtgactggcagcgactcatcaacaacaactggggattccggcccaagagactcagcttcaagctcttcaacatccaggtcaaggaggtcacgcagaatgaaggcaccaagaccatcgccaataaccttaccagcacggtccaggtcttcacggactcggagtaccagctgccgtacgttctcggctctgcccaccagggctgcctgcctccgttcccggcggacgtgttcatgattccccagtacggctacctaacactcaacaacggtagtcaggccgtgggacgctcctccttctactgcctggaatactttccttcgcagatgctgagaaccggcaacaacttccagtttacttacaccttcgaggacgtgcctttccacagcagctacgcccacagccagagcttggaccggctgatgaatcctctgattgaccagtacctgtactacttgtctcggactcaaacaacaggaggcacggcaaatacgcagactctgggcttcagccaaggtgggcctaatacaatggccaatcaggcaaagaactggctgccaggaccctgttaccgccaacaacgcgtctcaacgacaaccgggcaaaacaacaatagcaactttgcctggactgctgggaccaaataccatctgaatggaagaaattcattggctaatcctggcatcgctatggcaacacacaaagacgacaaggagcgtttttttcccagtaacgggatcctgatttttggcaaacaaaatgctgccagagacaatgcggattacagcgatgtcatgctcaccagcgaggaagaaatcaaaaccactaaccctgtggctacagaggaatacggtatcgtggcagataacttgcagcagcaaaacacggctcctcaaattggaactgtcaacagccagggggccttacccggtatggtttggcagaaccgggacgtgtacctgcagggtcccatctgggccaagattcctcacacggacggcaacttccacccgtctccgctgatgggcggctttggcctgaaacatcctccgcctcagatcctgatcaagaacacgcctgtacctgcggatcctccgaccaccttcaaccagtcaaagctgaactctttcatcacgcaatacagcaccggacaggtcagcgtggaaattgaatgggagctgcagaaggaaaacagcaagcgctggaaccccgagatccagtacacctccaactactacaaatctacaagtgtggactttgctgttaatacagaaggcgtgtactctgaaccccaccccattggcacccgttacctcacccgtcccctgtaa

SEQ ID NO: 536 - protein, 737 aa, Artificial Sequence
  source: /note="Description of Artificial Sequence: Synthetic polypeptide"
MAADGYLPDWLEDTLSEGIRQWWKLKPGPPPPKPAERHKDDSRGLVLPGYKYLGPFNGLDKGEPVNEADAAALEHDKAYDRQLDSGDNPYLKYNHADAEFQERLKEDTSFGGNLGRAVFQAKKRLLEPLGLVEEAAKTAPGKKRPVEQSPQEPDSSSGIGKTGQQPAKKRLNFGQTGDTESVPDPQPIGEPPAAPSGVGSLTMASGGGAPVADNNEGADGVGSSSGNWHCDSQWLGDRVITTSTRTWALPTYNNHLYKQISNGTSGGATNDNTYFGYSTPWGYFDFNRFHCHFSPRDWQRLINNNWGFRPKRLSFKLFNIQVKEVTQNEGTKTIANNLTSTVQVFTDSEYQLPYVLGSAHQGCLPPFPADVFMIPQYGYLTLNNGSQAVGRSSFYCLEYFPSQMLRTGNNFQFTYTFEDVPFHSSYAHSQSLDRLMNPLIDQYLYYLSRTQTTGGTANTQTLGFSQGGPNTMANQAKNWLPGPCYRQQRVSTTTGQNNNSNFAWTAGTKYHLNGRNSLANPGIAMATHKDDKERFFPSNGILIFGKQNAARDNADYSDVMLTSEEEIKTTNPVATEEYGIVADNLQQQNTAPQIGTVNSQGALPGMVWQNRDVYLQGPIWAKIPHTDGNFHPSPLMGGFGLKHPPPQILIKNTPVPADPPTTFNQSKLNSFITQYSTGQVSVEIEWELQKENSKRWNPEIQYTSNYYKSTSVDFAVNTEGVYSEPHPIGTRYLTRPL

SEQ ID NO: 537 - protein, 736 aa, Artificial Sequence
  source: /note="Description of Artificial Sequence: Synthetic polypeptide"
MAADGYLPDWLEDNLSEGIREWWDLKPGAPKPKANQQKQDDGRGLVLPGYKYLGPFNGLDKGEPVNAADAAALEHDKAYDQQLKAGDNPYLRYNHADAEFQERLQEDTSFGGNLGRAVFQAKKRVLEPLGLVEEGAKTAPGKKRPVEQSPQEPDSSSGIGKTGQQPAKKRLNFGQTGDTESVPDPQPIGEPPAAPSGVGSLTMASGGGAPVADNNEGADGVGSSSGNWHCDSQWLGDRVITTSTRTWALPTYNNHLYKQISSASTGASNDNHYFGYSTPWGYFDFNRFHCHFSPRDWQRLINNNWGFRPKRLNFKLFNIQVKEVTDNNGVKTIANNLTSTVQVFTDSDYQLPYVLGSAHQGCLPPFPADVFMIPQYGYLTLNNGSQAVGRSSFYCLEYFPSQMLRTGNNFQFTYTFEDVPFHSSYAHSQSLDRLMNPLIDQYLYYLSRTQTTGGTANTQTLGFSQGGPNTMANQAKNWLPGPCYRQQRVSTTTGQNNNSNFAWTAGTKYHLNGRNSLANPGIAMATHKDDKERFFPSNGILIFGKQNAARDNADYSDVMLTSEEEIKTTNPVATEEYGIVADNLQQQNTAPQIGTVNSQGALPGMVWQNRDVYLQGPIWAKIPHTDGNFHPSPLMGGFGLKHPPPQILIKNTPVPADPPTTFNQSKLNSFITQYSTGQVSVEIEWELQKENSKRWNPEIQYTSNYYKSTSVDFAVNTEGVYSEPHPIGTRYLTRPL

SEQ ID NO: 538 - protein, 736 aa, Artificial Sequence
  source: /note="Description of Artificial Sequence: Synthetic polypeptide"
MAADGYLPDWLEDTLSEGIRQWWKLKPGPPPPKPAERHKDDSRGLVLPGYKYLGPFNGLDKGEPVNEADAAALEHDKAYDRQLDSGDNPYLKYNHADAEFQERLQGDTSFGGNLGRAVFQAKKRVLEPLGLVEEGAKTAPGKKRPVEQSPQEPDSSSGIGETGQQPAKKRLNFGQTGDSESVPDPQPLGEPPATPAAVGPTTMASGGGAPMADNNEGADGVGSSSGNWHCDSQWLGDRVITTSTRTWALPTYNNHLYKQISSASTGASNDNHYFGYSTPWGYFDFNRFHCHFSPRDWQRLINNNWGFRPKRLSFKLFNIQVKEVTDNNGVKTIANNLTSTVQVFTDSEYQLPYVLGSAHQGCLPPFPADVFMIPQYGYLTLNNGSQAVGRSSFYCLEYFPSQMLRTGNNFTFSYTFEDVPFHSSYAHSQSLDRLMNPLIDQYLYYLSRTQTTGGTANTQTLGFSQGGPNTMANQAKNWLPGPCYRQQRVSTTTGQNNNSNFAWTAGTKYHLNGRNSLANPGIAMATHKDDKERFFPSNGILIFGKQNAARDNADYSDVMLTSEEEIKTTNPVATEEYGIVADNLQQQNTAPQIGTVNSQGALPGMVWQNRDVYLQGPIWAKIPHTDGNFHPSPLMGGFGLKHPPPQILIKNTPVPADPPTTFNQSKLNSFITQYSTGQVSVEIEWELQKENSKRWNPEIQYTSNYYKSTSVDFAVNTEGVYSEPHPIGTRYLTRPL

SEQ ID NO: 539 - DNA, 2181 bp, Artificial Sequence
  source: /note="Description of Artificial Sequence: Synthetic polynucleotide"
atgtcttttgttgatcaccctccagattggttggaagaagttggtgaaggtcttcgcgagtttttgggccttgaagcgggcccaccgaaaccaaaacccaatcagcagcatcaagatcaagcccgtggtcttgtgctgcctggttataactatctcggacccggaaacggtctcgatcgaggagagcctgtcaacagggcagacgaggtcgcgcgagagcacgacatctcgtacaacgagcagcttgaggcgggagacaacccctacctcaagtacaaccacgcggacgccgagtttcaggagaagctcgccgacgacacatccttcgggggaaacctcggaaaggcagtctttcaggccaagaaaagggttctcgaaccttttggcctggttgaagagggtgctaagacggcccctaccggaaagcggatagacgaccactttccaaaaagaaagaaggctcggaccgaagaggactccaagccttccacctcgtcagacgccgaagctggacccagcggatcccagcagctgcaaatcccagcacaaccagcctcaagtttgggagctgatacaatgtctgcgggaggtggcggcccattgggcgacaataaccaaggtgccgatggagtgggcaatgcctcgggagattggcattgcgattccacgtggatgggggacagagtcgtcaccaagtccacccgcacctgggtgctgcccagctacaacaaccaccagtaccgagagatcaaaagcggctccgtcgacggaagcaacgccaacgcctactttggatacagcaccccctgggggtactttgactttaaccgcttccacagccactggagcccccgagactggcaaagactcatcaacaactattggggcttcagaccccggtctctcagagtcaaaatcttcaacatccaagtcaaagaggtcacggtgcaggactccaccaccaccatcgccaacaacctcacctccaccgtccaagtgtttacggacgacgactaccaactcccgtacgtcgtcggcaacgggaccgagggatgcctgccggccttccccccgcaggtctttacgctgccgcagtacggctacgcgacgctgaaccgagacaacggagacaacccgacagagcggagcagcttcttttgcctagagtactttcccagcaagatgctgaggacgggcaacaactttgagtttacctacagctttgaagaggtgcccttccactgcagcttcgccccgagccagaacctctttaagctggccaacccgctggtggaccagtacctgtaccgcttcgtgagcacctcggccacgggcgccatccagttccaaaagaacctggcgggcagatacgccaacacctacaaaaactggttcccggggcccatgggccgaacccagggctggaacacgagctctggggtcagcagcaccaacagagtcagcgtcaacaacttttccgtctcaaaccggatgaacctggagggggccagctaccaagtgaacccccagcccaacgggatgacaaacacgctccaaggcagcaaccgctacgcgctggaaaacaccatgatcttcaacgctcaaaacgccacgccgggaactacctcggtgtacccagaggacaatctactgctgaccagcgagagcgagactcagcccgtcaaccgggtggcttacaacacgggcggtcagatggccaccaacgcccagaacgccaccacggctcccacggtcgggacctacaacctccaggaagtgcttcctggcagcgtatggatggagagggacgtgtacctccaaggacccatctgggccaagatcccagagacgggggcgcactttcacccctctccggccatgggcggattcggactcaaacacccgccgcccatgatgctcatcaaaaacacgccggtgcccggcaacatcaccagcttctcggacgtgcccgtcagcagcttcatcacccagtacagcaccgggcaggtcaccgtggagatggaatgggagctcaaaaaggaaaactccaagaggtggaacccagagatccagtacaccaacaactacaacgacccccagtttgtggactttgctccagacggctccggcgaatacagaaccaccagagccatcggaacccgatacctcacccgacccctt

SEQ ID NO: 540 - protein, 726 aa, Artificial Sequence
  source: /note="Description of Artificial Sequence: Synthetic polypeptide"
MSFVDHPPDWLEEVGEGLREFLGLEAGPPKPKPNQQHQDQARGLVLPGYNYLGPGNGLDRGEPVNRADEVAREHDISYNEQLEAGDNPYLKYNHADAEFQEKLADDTSFGGNLGKAVFQAKKRVLEPFGLVEEGAKTAPTGKRIDDHFPKRKKARTEEDSKPSTSSDAEAGPSGSQQLQIPAQPASSLGADTMSAGGGGPLGDNNQGADGVGNASGDWHCDSTWMGDRVVTKSTRTWVLPSYNNHQYREIKSGSVDGSNANAYFGYSTPWGYFDFNRFHSHWSPRDWQRLINNYWGFRPRSLRVKIFNIQVKEVTVQDSTTTIANNLTSTVQVFTDDDYQLPYVVGNGTEGCLPAFPPQVFTLPQYGYATLNRDNGDNPTERSSFFCLEYFPSKMLRTGNNFEFTYSFEEVPFHCSFAPSQNLFKLANPLVDQYLYRFVSTSATGAIQFQKNLAGRYANTYKNWFPGPMGRTQGWNTSSGSSTNRVSVNNFSVSNRMNLEGASYQVNPQPNGMTNTLQGSNRYALENTMIFNAQNATPGTTSVYPEDNLLLTSESETQPVNRVAYNTGGQMATNAQNATTAPTVGTYNLQEVLPGSVWMERDVYLQGPIWAKIPETGAHFHPSPAMGGFGLKHPPPMMLIKNTPVPGNITSFSDVPVSSFITQYSTGQVTVEMEWELKKENSKRWNPEIQYTNNYNDPQFVDFAPDGSGEYRTTRAIGTRYLTRPL

SEQ ID NO: 541 - protein, 735 aa, Artificial Sequence
  source: /note="Description of Artificial Sequence: Synthetic polypeptide"
MAADGYLPDWLEDTLSEGIRQWWKLKPGPPPPKPAERHKDDSRGLVLPGYKYLGPFNGLDKGEPVNEADAAALEHDKAYDRQLDSGDNPYLKYNHADAEFQERLKEDTSFGGNLGRAVFQAKKRILEPLGLVEEPVKTAPGKKRPVEHSPAEPDSSSGTGKSGQQPARKRLNFGQTGDADSVPDPQPLGQPPAAPSGLGTNTMASGSGAPMADNNEGADGVGNSSGNWHCDSTWMGDRVITTSTRTWALPTYNNHLYKQISSQSGASNDNHYFGYSTPWGYFDFNRFHCHFSPRDWQRLINNNWGFRPKRLSFKLFNIQVKEVTQNDGTTTIANNLTSTVQVFTDSEYQLPYVLGSAHQGCLPPFPADVFMVPQYGYLTLNNGSQAVGRSSFYCLEYFPSQMLRTGNNFTFSYTFEDVPFHSSYAHSQSLDRLMNPLIDQYLYYLSRTNTPSGTTTMSRLQFSQAGASDIRDQSRNWLPGPCYRQQRVSKTAADNNNSDYSWTGATKYHLNGRDSLVNPGPAMASHKDDEEKYFPQSGVLIFGKQDSGKTNVDIEKVMITDEEEIRTTNPVATEQYGSVSTNLQSGNTQAATSDVNTQGVLPGMVWQDRDVYLQGPIWAKIPHTDGHFHPSPLMGGFGLKHPPPQILIKNTPVPANPSTTFSAAKFASFITQYSTGQVSVEIEWELQKENSKRWNPEIQYTSNYNKSVNVDFTVDTNGVYSEPRPIGTRYLTRNL

SEQ ID NO: 542 - DNA, 1797 bp, Artificial Sequence
  source: /note="Description of Artificial Sequence: Synthetic polynucleotide"
acggctccgaccggagacaagcggaaaggcgaagacgaacctcgtttgcccgacacttcttcacagactcccaagaaaaacaagaagcctcgcaaggaaagaccttccggcggggcagaagatccgggcgaaggcacctcttccaacgctggagcagcagcacccgcctctagtgtgggatcatctatcatggctgaaggaggtggcggcccagtgggcgatgcaggccagggtgccgatggagtgggcaattcctccggaaattggcattgcgattcccaatggctggaaaacggagtcgtcactcgaaccacccgaacctgggtcttgcccagctacaacaaccacctgtacaaacgaatccaaggacccagcggaggcgacaacaacaacaaattctttggattcagcaccccctggggatactttgactacaatcgattccactgccacttttccccgcgagactggcaacgactcatcaacaacaactggggcatccgtcccaaagcgatgcgctttagactctttaacatccaggttaaagaggtcacggtccaagacttcaacaccaccatcggcaacaacctcaccagtacggtccaggtctttgcggacaaggactaccaactgccgtacgtcctcggatcggctaccgaaggcaccttcccgccgttcccagcggatatctacacgatcccgcagtacgggtactgcacgctaaactacaacaacgaggcggtggatcgttcggccttctactgtctggactactttccctcagacatgctgcggacaggaaataactttgagtttacttacaccttcgaggacgttcctttccatagcatgtttgcccacaaccagacgctagaccggctgatgaatcccctcgtggatcagtacctctgggctttcagctccgtcagccaagcaggctcatctggacgagctcttcattactcgcgggcgactaaaaccaacatggcggctcaatataggaactggttacctgggcctttcttccgtgatcagcaaatctttacgggcgctagcaacatcactaaaaataacgtctttagcgtttgggaaaaaggcaagcaatgggaactcgacaatcggaccaacctaatgcagcccggtcctgcggcagcgaccacctttagcggagaacctgaccgtcaagccatgcaaaacacgctggcttttagcaggaccgtctacgatcaaacgaccgccacgaccgatcgtaaccagatactcatcaccaacgaagacgaaatcagacccaccaactcggtcggtatcgacgcgtggggagcagttcccaccaacaaccagtcgatcgtgacccccggcactcgcgcggccgtcaacaatcaaggggcgcttcccgggatggtgtggcaaaacagagacatttaccctacagggacccatttggccaaaattcccgacactgacaatcacttccatccgtccccgcttattgggcggtttggctgcaagcatccccctccccagattttcattaaaaacacacccgtccctgccaacccttcggaaacgttccagacggccaaagtggcctccttcatcaaccagtactcgaccggacagtgcaccgtcgaaatcttttgggaactcaagaaggaaacctccaagcgctggaaccccgaaatccagttcacctccaactttggcaacgcggccgacatccagtttgccgtctccgacacgggatcctattccgaacctcgtcccatcggtacccgttaccttaccaaacctctgtaa

SEQ ID NO: 543 - DNA, 1989 bp, Artificial Sequence
  source: /note="Description of Artificial Sequence: Synthetic polynucleotide"
atgaggtcgtactacgaggtcatcgttcagctgcccaacgacgtcgagagtcaggtacctggaatctccgattcgttcgtcaactggattacgtcgcgagaatggacgttgcctgaggacgccgattgggatttggaccaggtcgatcaagttcaactgacgctcggcgacaaaatccaacgggagattcgaactcattgggggacgatggccaaagaaccggactttcactattttatccaactggaacaaggtgaggtgttctttcatttacacgtcctgctggaaacgtgttccgtaaagccgatggtactcggaagatatatccgacatattcaacaaaaaattgtgagtaaagtctactgcgccacgagcctacgatggaaggatggatgcgtggtgaccaagaccaaaaatttcgggggcgcgaacaaggtccgggccgagtcgtatattcccgcctacctgatcccgaaacagcaaccggaagtgcagtgggcgtggactaacgtgcccgagtatataaaagcgtgcttgcaccgagaactgcgtgccagtctcgcgcgacttcacttcgaggaggcgggcgtctcgcaatccaaggaaaatctcgcgagaactgcagacggcgctcccgtgatgccgacccgcgtcagcaaacgctacatggagctcgtggattggctcgtggagaaggggatcaccaccgagaaggaatggctgctggaaaacagagaaagctttcggagctttcaggcctcgagcaactcggcgcgtcagatcaagacggccctgcaaggcgccattcaggagatgcttctgaccaagacggcggaggactacctcgtcggaaaggatcccgtctcggacgacgacatccgtcagaaccgcatctacaagattctggaactgaaccactacgacccagcgtacgtggggagtattttggtcgggtggtgccagaagaaatggggcaagcgaaacacgctgtggctgttcggacatgcgaccaccggcaagaccaacatcgcggaggctattgcccatgctgtgccgttctatggatgcgttaactggaccaacgagaactttccgttcaacgactgcgtcgaaaaaatgattatctggtgggaggagggcaaaatgaccgccaaagtggtggaaacagccaaggcgattctgggaggatctcgggtgagagtggaccaaaaatgcaaagcttcggttccgatcgaaccgacgccggtcattattaccagtaacaccaacatgtgttatgtcatcgacgggaacacgaccacgttcgagcataagcagccgttggaggacaggatgtttaagctcgaattgctgactcggttgcctgatgactttggtaaggtgaccaaacaggaggtgcgtcaattcttcaggtggtctcaggatcacctgacccctgtgatcccagaattcctagtgcggaaggcggagtctcgcaaaagacccgccccttccggggaaggctatataagcccgacaaagcggcccgcgctcgcagagcagcagcaggcgtcggagagcgcggacccggttcccaccaggtatcgtatcaaatgctcgaaacattgcggtatggataaaatgttgtttccttgccaaatttgtgaatcgatgaacagagatattaatatttgtgctattcataaaacgaccgactgtaaagagtgtttccccgactacggggataaagatgatgtagaactacccccctgtacagaacacaacgtgtctcgttgttatcaatgtcattcgggcgaattgtatcgcgtgacttcggactctgacgagaaacctgcccccgagagtgatgaaggcaccgagccatcctatgctccctgcacgattcaccacctgatgggcaagagtcacgggttagtcacttgcgcggcgtgtcggttgaaaaatagtacgttgcatgatgacttggatgacggtgatctcgaacaataa

SEQ ID NO: 544 - DNA, 1626 bp, Artificial Sequence
  source: /note="Description of Artificial Sequence: Synthetic polynucleotide"
atgaggtcgtactacgaggtcatcgttcagctgcccaacgacgtcgagagtcaggtacctggaatctccgattcgttcgtcaactggattacgtcgcgagaatggacgttgcctgaggacgccgattgggatttggaccaggtcgatcaagttcaactgacgctcggcgacaaaatccaacgggagattcgaactcattgggggacgatggccaaagaaccggactttcactattttatccaactggaacaaggtgaggtgttctttcatttacacgtcctgctggaaacgtgttccgtaaagccgatggtactcggaagatatatccgacatattcaacaaaaaattgtgagtaaagtctactgcgccacgagcctacgatggaaggatggatgcgtggtgaccaagaccaaaaatttcgggggcgcgaacaaggtccgggccgagtcgtatattcccgcctacctgatcccgaaacagcaaccggaagtgcagtgggcgtggactaacgtgcccgagtatataaaagcgtgcttgcaccgagaactgcgtgccagtctcgcgcgacttcacttcgaggaggcgggcgtctcgcaatccaaggaaaatctcgcgagaactgcagacggcgctcccgtgatgccgacccgcgtcagcaaacgctacatggagctcgtggattggctcgtggagaaggggatcaccaccgagaaggaatggctgctggaaaacagagaaagctttcggagctttcaggcctcgagcaactcggcgcgtcagatcaagacggccctgcaaggcgccattcaggagatgcttctgaccaagacggcggaggactacctcgtcggaaaggatcccgtctcggacgacgacatccgtcagaaccgcatctacaagattctggaactgaaccactacgacccagcgtacgtggggagtattttggtcgggtggtgccagaagaaatggggcaagcgaaacacgctgtggctgttcggacatgcgaccaccggcaagaccaacatcgcggaggctattgcccatgctgtgccgttctatggatgcgttaactggaccaacgagaactttccgttcaacgactgcgtcgaaaaaatgattatctggtgggaggagggcaaaatgaccgccaaagtggtggaaacagccaaggcgattctgggaggatctcgggtgagagtggaccaaaaatgcaaagcttcggttccgatcgaaccgacgccggtcattattaccagtaacaccaacatgtgttatgtcatcgacgggaacacgaccacgttcgagcataagcagccgttggaggacaggatgtttaagctcgaattgctgactcggttgcctgatgactttggtaaggtgaccaaacaggaggtgcgtcaattcttcaggtggtctcaggatcacctgacccctgtgatcccagaattcctagtgcggaaggcggagtctcgcaaaagacccgccccttccggggaaggctatataagcccgacaaagcggcccgcgctcgcagagcagcagcaggcgtcggagagcgcggacccggttcccaccagattggttggagcggttggtcaaaaagggagtgaatgctgcagctga

SEQ ID NO: 545 - DNA, 1323 bp, Artificial Sequence
  source: /note="Description of Artificial Sequence: Synthetic polynucleotide"
atggagctcgtggattggctcgtggagaaggggatcaccaccgagaaggaatggctgctggaaaacagagaaagctttcggagctttcaggcctcgagcaactcggcgcgtcagatcaagacggccctgcaaggcgccattcaggagatgcttctgaccaagacggcggaggactacctcgtcggaaaggatcccgtctcggacgacgacatccgtcagaaccgcatctacaagattctggaactgaaccactacgacccagcgtacgtggggagtattttggtcgggtggtgccagaagaaatggggcaagcgaaacacgctgtggctgttcggacatgcgaccaccggcaagaccaacatcgcggaggctattgcccatgctgtgccgttctatggatgcgttaactggaccaacgagaactttccgttcaacgactgcgtcgaaaaaatgattatctggtgggaggagggcaaaatgaccgccaaagtggtggaaacagccaaggcgattctgggaggatctcgggtgagagtggaccaaaaatgcaaagcttcggttccgatcgaaccgacgccggtcattattaccagtaacaccaacatgtgttatgtcatcgacgggaacacgaccacgttcgagcataagcagccgttggaggacaggatgtttaagctcgaattgctgactcggttgcctgatgactttggtaaggtgaccaaacaggaggtgcgtcaattcttcaggtggtctcaggatcacctgacccctgtgatcccagaattcctagtgcggaaggcggagtctcgcaaaagacccgccccttccggggaaggctatataagcccgacaaagcggcccgcgctcgcagagcagcagcaggcgtcggagagcgcggacccggttcccaccaggtatcgtatcaaatgctcgaaacattgcggtatggataaaatgttgtttccttgccaaatttgtgaatcgatgaacagagatattaatatttgtgctattcataaaacgaccgactgtaaagagtgtttccccgactacggggataaagatgatgtagaactacccccctgtacagaacacaacgtgtctcgttgttatcaatgtcattcgggcgaattgtatcgcgtgacttcggactctgacgagaaacctgcccccgagagtgatgaaggcaccgagccatcctatgctccctgcacgattcaccacctgatgggcaagagtcacgggttagtcacttgcgcggcgtgtcggttgaaaaatagtacgttgcatgatgacttggatgacggtgatctcgaacaataa

SEQ ID NO: 546 - DNA, 960 bp, Artificial Sequence
  source: /note="Description of Artificial Sequence: Synthetic polynucleotide"
atggagctcgtggattggctcgtggagaaggggatcaccaccgagaaggaatggctgctggaaaacagagaaagctttcggagctttcaggcctcgagcaactcggcgcgtcagatcaagacggccctgcaaggcgccattcaggagatgcttctgaccaagacggcggaggactacctcgtcggaaaggatcccgtctcggacgacgacatccgtcagaaccgcatctacaagattctggaactgaaccactacgacccagcgtacgtggggagtattttggtcgggtggtgccagaagaaatggggcaagcgaaacacgctgtggctgttcggacatgcgaccaccggcaagaccaacatcgcggaggctattgcccatgctgtgccgttctatggatgcgttaactggaccaacgagaactttccgttcaacgactgcgtcgaaaaaatgattatctggtgggaggagggcaaaatgaccgccaaagtggtggaaacagccaaggcgattctgggaggatctcgggtgagagtggaccaaaaatgcaaagcttcggttccgatcgaaccgacgccggtcattattaccagtaacaccaacatgtgttatgtcatcgacgggaacacgaccacgttcgagcataagcagccgttggaggacaggatgtttaagctcgaattgctgactcggttgcctgatgactttggtaaggtgaccaaacaggaggtgcgtcaattcttcaggtggtctcaggatcacctgacccctgtgatcccagaattcctagtgcggaaggcggagtctcgcaaaagacccgccccttccggggaaggctatataagcccgacaaagcggcccgcgctcgcagagcagcagcaggcgtcggagagcgcggacccggttcccaccagattggttggagcggttggtcaaaaagggagtgaatgctgcagctga

SEQ ID NO: 547 - DNA, 1608 bp, Artificial Sequence
  source: /note="Description of Artificial Sequence: Synthetic polynucleotide"
atggctgaaggaggtggcggcccagtgggcgatgcaggccagggtgccgatggagtgggcaattcctccggaaattggcattgcgattcccaatggctggaaaacggagtcgtcactcgaaccacccgaacctgggtcttgcccagctacaacaaccacctgtacaaacgaatccaaggacccagcggaggcgacaacaacaacaaattctttggattcagcaccccctggggatactttgactacaatcgattccactgccacttttccccgcgagactggcaacgactcatcaacaacaactggggcatccgtcccaaagcgatgcgctttagactctttaacatccaggttaaagaggtcacggtccaagacttcaacaccaccatcggcaacaacctcaccagtacggtccaggtctttgcggacaaggactaccaactgccgtacgtcctcggatcggctaccgaaggcaccttcccgccgttcccagcggatatctacacgatcccgcagtacgggtactgcacgctaaactacaacaacgaggcggtggatcgttcggccttctactgtctggactactttccctcagacatgctgcggacaggaaataactttgagtttacttacaccttcgaggacgttcctttccatagcatgtttgcccacaaccagacgctagaccggctgatgaatcccctcgtggatcagtacctctgggctttcagctccgtcagccaagcaggctcatctggacgagctcttcattactcgcgggcgactaaaaccaacatggcggctcaatataggaactggttacctgggcctttcttccgtgatcagcaaatctttacgggcgctagcaacatcactaaaaataacgtctttagcgtttgggaaaaaggcaagcaatgggaactcgacaatcggaccaacctaatgcagcccggtcctgcggcagcgaccacctttagcggagaacctgaccgtcaagccatgcaaaacacgctggcttttagcaggaccgtctacgatcaaacgaccgccacgaccgatcgtaaccagatactcatcaccaacgaagacgaaatcagacccaccaactcggtcggtatcgacgcgtggggagcagttcccaccaacaaccagtcgatcgtgacccccggcactcgcgcggccgtcaacaatcaaggggcgcttcccgggatggtgtggcaaaacagagacatttaccctacagggacccatttggccaaaattcccgacactgacaatcacttccatccgtccccgcttattgggcggtttggctgcaagcatccccctccccagattttcattaaaaacacacccgtccctgccaacccttcggaaacgttccagacggccaaagtggcctccttcatcaaccagtactcgaccggacagtgcaccgtcgaaatcttttgggaactcaagaaggaaacctccaagcgctggaaccccgaaatccagttcacctccaactttggcaacgcggccgacatccagtttgccgtctccgacacgggatcctattccgaacctcgtcccatcggtacccgttaccttaccaaacctctgtaa

SEQ ID NO: 548 - DNA, 2232 bp, Artificial Sequence
  source: /note="Description of Artificial Sequence: Synthetic polynucleotide"
atgtctctcatttctgatgcgattccagattggttggagcggttggtcaaaaagggagtgaatgctgcagctgatttctaccatttggaaagcggtcctcctcgtcctaaggcaaatcagcaaactcaagaatctcttgaaaaggacgattcgagaggtctcgtgttcccaggctacaattatctaggccctttcaacggtctagataaaggagaacccgtcaacgaggcagacgctgccgccttagaacacgacaaggcttacgacctcgaaatcaaggacgggcacaacccgtactttgagtacaacgaggccgacagacgtttccaggaacgtctcaaagacgatacctcctttggaggcaatttaggtaaagccatcttccaggccaaaaagagggttctcgaaccctttggtctggtggaagactcaaagacggctccgaccggagacaagcggaaaggcgaagacgaacctcgtttgcccgacacttcttcacagactcccaagaaaaacaagaagcctcgcaaggaaagaccttccggcggggcagaagatccgggcgaaggcacctcttccaacgctggagcagcagcacccgcctctagtgtgggatcatctatcatggctgaaggaggtggcggcccagtgggcgatgcaggccagggtgccgatggagtgggcaattcctccggaaattggcattgcgattcccaatggctggaaaacggagtcgtcactcgaaccacccgaacctgggtcttgcccagctacaacaaccacctgtacaaacgaatccaaggacccagcggaggcgacaacaacaacaaattctttggattcagcaccccctggggatactttgactacaatcgattccactgccacttttccccgcgagactggcaacgactcatcaacaacaactggggcatccgtcccaaagcgatgcgctttagactctttaacatccaggttaaagaggtcacggtccaagacttcaacaccaccatcggcaacaacctcaccagtacggtccaggtctttgcggacaaggactaccaactgccgtacgtcctcggatcggctaccgaaggcaccttcccgccgttcccagcggatatctacacgatcccgcagtacgggtactgcacgctaaactacaacaacgaggcggtggatcgttcggccttctactgtctggactactttccctcagacatgctgcggacaggaaataactttgagtttacttacaccttcgaggacgttcctttccatagcatgtttgcccacaaccagacgctagaccggctgatgaatcccctcgtggatcagtacctctgggctttcagctccgtcagccaagcaggctcatctggacgagctcttcattactcgcgggcgactaaaaccaacatggcggctcaatataggaactggttacctgggcctttcttccgtgatcagcaaatctttacgggcgctagcaacatcactaaaaataacgtctttagcgtttgggaaaaaggcaagcaatgggaactcgacaatcggaccaacctaatgcagcccggtcctgcggcagcgaccacctttagcggagaacctgaccgtcaagccatgcaaaacacgctggcttttagcaggaccgtctacgatcaaacgaccgccacgaccgatcgtaaccagatactcatcaccaacgaagacgaaatcagacccaccaactcggtcggtatcgacgcgtggggagcagttcccaccaacaaccagtcgatcgtgacccccggcactcgcgcggccgtcaacaatcaaggggcgcttcccgggatggtgtggcaaaacagagacatttaccctacagggacccatttggccaaaattcccgacactgacaatcacttccatccgtccccgcttattgggcggtttggctgcaagcatccccctccccagattttcattaaaaacacacccgtccctgccaacccttcggaaacgttccagacggccaaagtggcctccttcatcaaccagtactcgaccggacagtgcaccgtcgaaatcttttgggaactcaagaaggaaacctccaagcgctggaaccccgaaatccagttcacctccaactttggcaacgcggccgacatccagtttgccgtctccgacacgggatcctattccgaacctcgtcccatcggtacccgttaccttaccaaacctctgtaa

SEQ ID NO: 549 - protein, 535 aa, Artificial Sequence
  source: /note="Description of Artificial Sequence: Synthetic polypeptide"
MAEGGGGPVGDAGQGADGVGNSSGNWHCDSQWLENGVVTRTTRTWVLPSYNNHLYKRIQGPSGGDNNNKFFGFSTPWGYFDYNRFHCHFSPRDWQRLINNNWGIRPKAMRFRLFNIQVKEVTVQDFNTTIGNNLTSTVQVFADKDYQLPYVLGSATEGTFPPFPADIYTIPQYGYCTLNYNNEAVDRSAFYCLDYFPSDMLRTGNNFEFTYTFEDVPFHSMFAHNQTLDRLMNPLVDQYLWAFSSVSQAGSSGRALHYSRATKTNMAAQYRNWLPGPFFRDQQIFTGASNITKNNVFSVWEKGKQWELDNRTNLMQPGPAAATTFSGEPDRQAMQNTLAFSRTVYDQTTATTDRNQILITNEDEIRPTNSVGIDAWGAVPTNNQSIVTPGTRAAVNNQGALPGMVWQNRDIYPTGTHLAKIPDTDNHFHPSPLIGRFGCKHPPPQIFIKNTPVPANPSETFQTAKVASFINQYSTGQCTVEIFWELKKETSKRWNPEIQFTSNFGNAADIQFAVSDTGSYSEPRPIGTRYLTKPL

SEQ ID NO: 550 - protein, 440 aa, Artificial Sequence
  source: /note="Description of Artificial Sequence: Synthetic polypeptide"
MELVDWLVEKGITTEKEWLLENRESFRSFQASSNSARQIKTALQGAIQEMLLTKTAEDYLVGKDPVSDDDIRQNRIYKILELNHYDPAYVGSILVGWCQKKWGKRNTLWLFGHATTGKTNIAEAIAHAVPFYGCVNWTNENFPFNDCVEKMIIWWEEGKMTAKVVETAKAILGGSRVRVDQKCKASVPIEPTPVIITSNTNMCYVIDGNTTTFEHKQPLEDRMFKLELLTRLPDDFGKVTKQEVRQFFRWSQDHLTPVIPEFLVRKAESRKRPAPSGEGYISPTKRPALAEQQQASESADPVPTRYRIKCSKHCGMDKMLFPCQICESMNRDINICAIHKTTDCKECFPDYGDKDDVELPPCTEHNVSRCYQCHSGELYRVTSDSDEKPAPESDEGTEPSYAPCTIHHLMGKSHGLVTCAACRLKNSTLHDDLDDGDLEQ

SEQ ID NO: 551 - protein, 319 aa, Artificial Sequence
  source: /note="Description of Artificial Sequence: Synthetic polypeptide"
MELVDWLVEKGITTEKEWLLENRESFRSFQASSNSARQIKTALQGAIQEMLLTKTAEDYLVGKDPVSDDDIRQNRIYKILELNHYDPAYVGSILVGWCQKKWGKRNTLWLFGHATTGKTNIAEAIAHAVPFYGCVNWTNENFPFNDCVEKMIIWWEEGKMTAKVVETAKAILGGSRVRVDQKCKASVPIEPTPVIITSNTNMCYVIDGNTTTFEHKQPLEDRMFKLELLTRLPDDFGKVTKQEVRQFFRWSQDHLTPVIPEFLVRKAESRKRPAPSGEGYISPTKRPALAEQQQASESADPVPTRLVGAVGQKGSECCS

SEQ ID NO: 552 - protein, 662 aa, Artificial Sequence
  source: /note="Description of Artificial Sequence: Synthetic polypeptide"
MRSYYEVIVQLPNDVESQVPGISDSFVNWITSREWTLPEDADWDLDQVDQVQLTLGDKIQREIRTHWGTMAKEPDFHYFIQLEQGEVFFHLHVLLETCSVKPMVLGRYIRHIQQKIVSKVYCATSLRWKDGCVVTKTKNFGGANKVRAESYIPAYLIPKQQPEVQWAWTNVPEYIKACLHRELRASLARLHFEEAGVSQSKENLARTADGAPVMPTRVSKRYMELVDWLVEKGITTEKEWLLENRESFRSFQASSNSARQIKTALQGAIQEMLLTKTAEDYLVGKDPVSDDDIRQNRIYKILELNHYDPAYVGSILVGWCQKKWGKRNTLWLFGHATTGKTNIAEAIAHAVPFYGCVNWTNENFPFNDCVEKMIIWWEEGKMTAKVVETAKAILGGSRVRVDQKCKASVPIEPTPVIITSNTNMCYVIDGNTTTFEHKQPLEDRMFKLELLTRLPDDFGKVTKQEVRQFFRWSQDHLTPVIPEFLVRKAESRKRPAPSGEGYISPTKRPALAEQQQASESADPVPTRYRIKCSKHCGMDKMLFPCQICESMNRDINICAIHKTTDCKECFPDYGDKDDVELPPCTEHNVSRCYQCHSGELYRVTSDSDEKPAPESDEGTEPSYAPCTIHHLMGKSHGLVTCAACRLKNSTLHDDLDDGDLEQ

SEQ ID NO: 553 - protein, 541 aa, Artificial Sequence
  source: /note="Description of Artificial Sequence: Synthetic polypeptide"
MRSYYEVIVQLPNDVESQVPGISDSFVNWITSREWTLPEDADWDLDQVDQVQLTLGDKIQREIRTHWGTMAKEPDFHYFIQLEQGEVFFHLHVLLETCSVKPMVLGRYIRHIQQKIVSKVYCATSLRWKDGCVVTKTKNFGGANKVRAESYIPAYLIPKQQPEVQWAWTNVPEYIKACLHRELRASLARLHFEEAGVSQSKENLARTADGAPVMPTRVSKRYMELVDWLVEKGITTEKEWLLENRESFRSFQASSNSARQIKTALQGAIQEMLLTKTAEDYLVGKDPVSDDDIRQNRIYKILELNHYDPAYVGSILVGWCQKKWGKRNTLWLFGHATTGKTNIAEAIAHAVPFYGCVNWTNENFPFNDCVEKMIIWWEEGKMTAKVVETAKAILGGSRVRVDQKCKASVPIEPTPVIITSNTNMCYVIDGNTTTFEHKQPLEDRMFKLELLTRLPDDFGKVTKQEVRQFFRWSQDHLTPVIPEFLVRKAESRKRPAPSGEGYISPTKRPALAEQQQASESADPVPTRLVGAVGQKGSECCS

SEQ ID NO: 554 - protein, 743 aa, Artificial Sequence
  source: /note="Description of Artificial Sequence: Synthetic polypeptide"
MSLISDAIPDWLERLVKKGVNAAADFYHLESGPPRPKANQQTQESLEKDDSRGLVFPGYNYLGPFNGLDKGEPVNEADAAALEHDKAYDLEIKDGHNPYFEYNEADRRFQERLKDDTSFGGNLGKAIFQAKKRVLEPFGLVEDSKTAPTGDKRKGEDEPRLPDTSSQTPKKNKKPRKERPSGGAEDPGEGTSSNAGAAAPASSVGSSIMAEGGGGPVGDAGQGADGVGNSSGNWHCDSQWLENGVVTRTTRTWVLPSYNNHLYKRIQGPSGGDNNNKFFGFSTPWGYFDYNRFHCHFSPRDWQRLINNNWGIRPKAMRFRLFNIQVKEVTVQDFNTTIGNNLTSTVQVFADKDYQLPYVLGSATEGTFPPFPADIYTIPQYGYCTLNYNNEAVDRSAFYCLDYFPSDMLRTGNNFEFTYTFEDVPFHSMFAHNQTLDRLMNPLVDQYLWAFSSVSQAGSSGRALHYSRATKTNMAAQYRNWLPGPFFRDQQIFTGASNITKNNVFSVWEKGKQWELDNRTNLMQPGPAAATTFSGEPDRQAMQNTLAFSRTVYDQTTATTDRNQILITNEDEIRPTNSVGIDAWGAVPTNNQSIVTPGTRAAVNNQGALPGMVWQNRDIYPTGTHLAKIPDTDNHFHPSPLIGRFGCKHPPPQIFIKNTPVPANPSETFQTAKVASFINQYSTGQCTVEIFWELKKETSKRWNPEIQFTSNFGNAADIQFAVSDTGSYSEPRPIGTRYLTKPL

SEQ ID NO: 555 - protein, 598 aa, Artificial Sequence
  source: /note="Description of Artificial Sequence: Synthetic polypeptide"
TAPTGDKRKGEDEPRLPDTSSQTPKKNKKPRKERPSGGAEDPGEGTSSNAGAAAPASSVGSSIMAEGGGGPVGDAGQGADGVGNSSGNWHCDSQWLENGVVTRTTRTWVLPSYNNHLYKRIQGPSGGDNNNKFFGFSTPWGYFDYNRFHCHFSPRDWQRLINNNWGIRPKAMRFRLFNIQVKEVTVQDFNTTIGNNLTSTVQVFADKDYQLPYVLGSATEGTFPPFPADIYTIPQYGYCTLNYNNEAVDRSAFYCLDYFPSDMLRTGNNFEFTYTFEDVPFHSMFAHNQTLDRLMNPLVDQYLWAFSSVSQAGSSGRALHYSRATKTNMAAQYRNWLPGPFFRDQQIFTGASNITKNNVFSVWEKGKQWELDNRTNLMQPGPAAATTFSGEPDRQAMQNTLAFSRTVYDQTTATTDRNQILITNEDEIRPTNSVGIDAWGAVPTNNQSIVTPGTRAAVNNQGALPGMVWQNRDIYPTGTHLAKIPDTDNHFHPSPLIGRFGCKHPPPQIFIKNTPVPANPSETFQTAKVASFINQYSTGQCTVEIFWELKKETSKRWNPEIQFTSNFGNAADIQFAVSDTGSYSEPRPIGTRYLTKPL

SEQ ID NO: 556 - DNA, 4694 bp, Artificial Sequence
  source: /note="Description of Artificial Sequence: Synthetic polynucleotide"
tggccagtttccaagacaggctcgctcgctcactcgggccggggccccaaaggggcccctagcgaccgcttcgcggtcgcggcccgagtgagcgagcgagcctgtcttggaaactggccagcactccggtgaggtaatgccgtcacgtggtcgggaatgggaacgggaaatctcgcgagaacgtaaacaaatataagacggcgccacacggcgctgcgtcatacgcgcgcgcgcaccggcgagatgaggtcgtactacgaggtcatcgttcagctgcccaacgacgtcgagagtcaggtacctggaatctccgattcgttcgtcaactggattacgtcgcgagaatggacgttgcctgaggacgccgattgggatttggaccaggtcgatcaagttcaactgacgctcggcgacaaaatccaacgggagattcgaactcattgggggacgatggccaaagaaccggactttcactattttatccaactggaacaaggtgaggtgttctttcatttacacgtcctgctggaaacgtgttccgtaaagccgatggtactcggaagatatatccgacatattcaacaaaaaattgtgagtaaagtctactgcgccacgagcctacgatggaaggatggatgcgtggtgaccaagaccaaaaatttcgggggcgcgaacaaggtccgggccgagtcgtatattcccgcctacctgatcccgaaacagcaaccggaagtgcagtgggcgtggactaacgtgcccgagtatataaaagcgtgcttgcaccgagaactgcgtgccagtctcgcgcgacttcacttcgaggaggcgggcgtctcgcaatccaaggaaaatctcgcgagaactgcagacggcgctcccgtgatgccgacccgcgtcagcaaacgctacatggagctcgtggattggctcgtggagaaggggatcaccaccgagaaggaatggctgctggaaaacagagaaagctttcggagctttcaggcctcgagcaactcggcgcgtcagatcaagacggccctgcaaggcgccattcaggagatgcttctgaccaagacggcggaggactacctcgtcggaaaggatcccgtctcggacgacgacatccgtcagaaccgcatctacaagattctggaactgaaccactacgacccagcgtacgtggggagtattttggtcgggtggtgccagaagaaatggggcaagcgaaacacgctgtggctgttcggacatgcgaccaccggcaagaccaacatcgcggaggctattgcccatgctgtgccgttctatggatgcgttaactggaccaacgagaactttccgttcaacgactgcgtcgaaaaaatgattatctggtgggaggagggcaaaatgaccgccaaagtggtggaaacagccaaggcgattctgggaggatctcgggtgagagtggaccaaaaatgcaaagcttcggttccgatcgaaccgacgccggtcattattaccagtaacaccaacatgtgttatgtcatcgacgggaacacgaccacgttcgagcataagcagccgttggaggacaggatgtttaagctcgaattgctgactcggttgcctgatgactttggtaaggtgaccaaacaggaggtgcgtcaattcttcaggtggtctcaggatcacctgacccctgtgatcccagaattcctagtgcggaaggcggagtctcgcaaaagacccgccccttccggggaaggctatataagcccgacaaagcggcccgcgctcgcagagcagcagcaggcgtcggagagcgcggacccggttcccaccaggtatcgtatcaaatgctcgaaacattgcggtatggataaaatgttgtttccttgccaaatttgtgaatcgatgaacagagatattaatatttgtgctattcataaaacgaccgactgtaaagagtgtttccccgactacggggataaagatgatgtagaactacccccctgtacagaacacaacgtgtctcgttgttatcaatgtcattcgggcgaattgtatcgcgtgacttcggactctgacgagaaacctgcccccgagagtgatgaaggcaccgagccatcctatgctccctgcacgattcaccacctgatgggcaagagtcacgggttagtcacttgcgcggcgtgtcggttgaaaaatagtacgttgcatgatgacttggatgacggtgatctcgaacaataaatgattgaaatgtagccatgtctctcatttctgatgcgattccagattggttggagcggttggtcaaaaagggagtgaatgctgcagctgatttctaccatttggaaagcggtcctcctcgtcctaaggcaaatcagcaaactcaagaatctcttgaaaaggacgattcgagaggtctcgtgttcccaggctacaattatctaggccctttcaacggtctagataaaggagaacccgtcaacgaggcagacgctgccgccttagaacacgacaaggcttacgacctcgaaatcaaggacgggcacaacccgtactttgagtacaacgaggccgacagacgtttccaggaacgtctcaaagacgatacctcctttggaggcaatttaggtaaagccatcttccaggccaaaaagagggttctcgaaccctttggtctggtggaagactcaaagacggctccgaccggagacaagcggaaaggcgaagacgaacctcgtttgcccgacacttcttcacagactcccaagaaaaacaagaagcctcgcaaggaaagaccttccggcggggcagaagatccgggcgaaggcacctcttccaacgctggagcagcagcacccgcctctagtgtgggatcatctatcatggctgaaggaggtggcggcccagtgggcgatgcaggccagggtgccgatggagtgggcaattcctccggaaattggcattgcgattcccaatggctggaaaacggagtcgtcactcgaaccacccgaacctgggtcttgcccagctacaacaaccacctgtacaaacgaatccaaggacccagcggaggcgacaacaacaacaaattctttggattcagcaccccctggggatactttgactacaatcgattccactgccacttttccccgcgagactggcaacgactcatcaacaacaactggggcatccgtcccaaagcgatgcgctttagactctttaacatccaggttaaagaggtcacggtccaagacttcaacaccaccatcggcaacaacctcaccagtacggtccaggtctttgcggacaaggactaccaactgccgtacgtcctcggatcggctaccgaaggcaccttcccgccgttcccagcggatatctacacgatcccgcagtacgggtactgcacgctaaactacaacaacgaggcggtggatcgttcggccttctactgtctggactactttccctcagacatgctgcggacaggaaataactttgagtttacttacaccttcgaggacgttcctttccatagcatgtttgcccacaaccagacgctagaccggctgatgaatcccctcgtggatcagtacctctgggctttcagctccgtcagccaagcaggctcatctggacgagctcttcattactcgcgggcgactaaaaccaacatggcggctcaatataggaactggttacctgggcctttcttccgtgatcagcaaatctttacgggcgctagcaacatcactaaaaataacgtctttagcgtttgggaaaaaggcaagcaatgggaactcgacaatcggaccaacctaatgcagcccggtcctgcggcagcgaccacctttagcggagaacctgaccgtcaagccatgcaaaacacgctggcttttagcaggaccgtctacgatcaaacgaccgccacgaccgatcgtaaccagatactcatcaccaacgaagacgaaatcagacccaccaactcggtcggtatcgacgcgtggggagcagttcccaccaacaaccagtcgatcgtgacccccggcactcgcgcggccgtcaacaatcaaggggcgcttcccgggatggtgtggcaaaacagagacatttaccctacagggacccatttggccaaaattcccgacactgacaatcacttccatccgtccccgcttattgggcggtttggctgcaagcatccccctccccagattttcattaaaaacacacccgtccctgccaacccttcggaaacgttccagacggccaaagtggcctccttcatcaaccagtactcgaccggacagtgcaccgtcgaaatcttttgggaactcaagaaggaaacctccaagcgctggaaccccgaaatccagttcacctccaactttggcaacgcggccgacatccagtttgccgtctccgacacgggatcctattccgaacctcgtcccatcggtacccgttaccttaccaaacctctgtaaattaaacccttcaataaaccgtttatgcgtaactgtatttccgtctcctgtcgttattcagtcacatgatgcggcattacctcaccggagtgctggccagtttccaagacaggctcgctcgctcactcgggccggggccccaaaggggcccctagcgaccgcttcgcggtcgcggcccgagtgagcgagcgagcctgtcttggaaactggcca

SEQ ID NO: 557 - DNA, 2211 bp, Artificial Sequence
  source: /note="Description of Artificial Sequence: Synthetic polynucleotide"
atggctgctgatggttatcttccagattggctcgaggacactctctctgaaggaataagacagtggtggaagctcaaacctggcccaccaccaccaaagcccgcagagcggcataaggacgacagcaggggtcttgtgcttcctgggtacaagtacctcggacccttcaacggactcgacaagggagagccggtcaacgaggcagacgcagcggccctcgagcacgacaaggcctacgaccagcagctcaaggccggtgacaacccctacctcaagtacaaccacgccgacgcggagttccagcagcggcttcagggcgacacatcgtttgggggcaacctcggcagagcagtcttccaggccaaaaagagggttcttgaacctcttggtctggttgagcaagcgggtgagacggctcctggaaagaagagaccgttgattgaatccccccagcagcccgactcctccacgggtatcggcaaaaaaggcaagcagccggctaaaaagagactcaattttggtcagactggcgactcagagtcagtccccgacccacaacctctcggagaacctccagcaacccccgctgctgtgggacctactacaatggcttcaggtggtggcgcaccaatggcagacaataacgaaggcgccgacggagtgggtaatgcctcaggaaattggcattgcgattccacatggctgggcgacagagtcatcaccaccagcacccgcacctgggccttgcccacctacaataaccacctctacaagcaaatctccagtgcttcaacgggggccagcaacgacaaccactacttcggctacagcaccccctgggggtattttgacttcaacagattccactgccacttttcaccacgtgactggcagcgactcatcaacaacaattggggattccggcccaagagactcaacttcaaactcttcaacatccaagtcaaggaggtcacgacgaatgatggcgtcacaaccatcgctaataaccttaccagcacggttcaagtcttctcggactcagactatcagctcccgtacgtgctcgggtcggctcacgagggctgcctcccgccgttcccagcagacgtcttcatggtgccacagtatggatacctcaccctgaacaacgggagtcaggcagtaggacgctcttcattttactgcctggagtactttccttctcagatgctgcgtaccggaaacaactttaccttcagctacacttttgaggacgttcctttccacagcagctacgctcacagccagagtctggaccgtctcatgaatcctctcatcgaccagtacctgtattacctgaacagaactcagaatcagtccggaagtgcccaaaacaaggacttgctgtttagccgggggtctccagctggcatgtctgttcagcccaaaaactggctacctggaccctgttatcggcagcagcgcgtttctaaaacaaaaacagacaacaacaacagcaactttacctggactggtgcttcaaaatataaccttaatgggcgtgaatctataatcaaccctggcactgctatggcctcacacaaagacgacaaagacaagttctttcccatgagcggtgtcatgatttttggaaaggagagcgccggagcttcaaacactgcattggacaatgtcatgatcacagacgaagaggaaatcaaagccactaaccccgtggccaccgaaagatttgggactgtggcagtcaatctccagagcagcagcacagaccctgcgaccggagatgtgcatgttatgggagccttacctggaatggtgtggcaagacagagacgtatacctgcagggtcccatttgggccaaaattcctcacacagatggacactttcacccgtctcctcttatgggcggctttggactcaagaacccgcctcctcagatcctcatcaaaaacacgcctgttcctgcgaatcctccggcggagttttcagctacaaagtttgcttcattcatcacccaatactccacaggacaagtgagtgtggaaattgaatgggagctgcagaaagaaaacagcaagcgctggaatcccgaagtgcagtacacatccaattatgcaaaatctgccaacgttgattttactgtggacaacaatggactttatactgagcctcgccccattggcacccgttacctcacccgtcccctgtaa

SEQ ID NO: 558 - protein, 736 aa, Artificial Sequence
  source: /note="Description of Artificial Sequence: Synthetic polypeptide"
MAADGYLPDWLEDTLSEGIRQWWKLKPGPPPPKPAERHKDDSRGLVLPGYKYLGPFNGLDKGEPVNEADAAALEHDKAYDQQLKAGDNPYLKYNHADAEFQQRLQGDTSFGGNLGRAVFQAKKRVLEPLGLVEQAGETAPGKKRPLIESPQQPDSSTGIGKKGKQPAKKRLNFGQTGDSESVPDPQPLGEPPATPAAVGPTTMASGGGAPMADNNEGADGVGNASGNWHCDSTWLGDRVITTSTRTWALPTYNNHLYKQISSASTGASNDNHYFGYSTPWGYFDFNRFHCHFSPRDWQRLINNNWGFRPKRLNFKLFNIQVKEVTTNDGVTTIANNLTSTVQVFSDSDYQLPYVLGSAHEGCLPPFPADVFMVPQYGYLTLNNGSQAVGRSSFYCLEYFPSQMLRTGNNFTFSYTFEDVPFHSSYAHSQSLDRLMNPLIDQYLYYLNRTQNQSGSAQNKDLLFSRGSPAGMSVQPKNWLPGPCYRQQRVSKTKTDNNNSNFTWTGASKYNLNGRESIINPGTAMASHKDDKDKFFPMSGVMIFGKESAGASNTALDNVMITDEEEIKATNPVATERFGTVAVNLQSSSTDPATGDVHVMGALPGMVWQDRDVYLQGPIWAKIPHTDGHFHPSPLMGGFGLKNPPPQILIKNTPVPANPPAEFSATKFASFITQYSTGQVSVEIEWELQKENSKRWNPEVQYTSNYAKSANVDFTVDNNGLYTEPRPIGTRYLTRPL

SEQ ID NO: 559 - DNA, 2211 bp, Artificial Sequence
  source: /note="Description of Artificial Sequence: Synthetic polynucleotide"
atggcttccgatggttatcttccagattggctcgaggacaacctctctgagggcatccgcgagtggtgggacttgaaacctggagccccgaaacccaaagccaaccagcaaaagcaggacgacggccggggtctggtgcttcctggctacaagtacctcggacccttcaacggactcgacaagggggagcccgtcaacgcggcggatgcagcggccctcgagcacgacaaggcctacgaccagcagctcagagcgggtgacaatccgtacctgcggtataaccacgccgacgccgagtttcaggagcgtctgcaagaagatacgtcttttgggggcaacctcgggcgagcagtcttccaggccaagaagagggttctcgaaccttttggtctggttgaggaaggtgctaagacggctcctggaaagaaacgtccggtagagcagtcgccacaagagccagactcctcctcgggcattggcaagacaggccagcagcccgctaaaaagagactcaattttggtcagactggcgactcagagtcagtccccgacccacaacctctcggagaacctccagcaacccccgctgctgtgggacctactacaatggcttcaggcggtggcgcaccaatggcagacaataacgaaggcgccgacggagtgggtaatgcctcaggaaattggcattgcgattccacatggctgggcgacagagtcatcaccaccagcacccgaacatgggccttgcccacctataacaaccacctctacaagcaaatctccagtgcttcaacgggggccagcaacgacaaccactacttcggctacagcaccccctgggggtattttgatttcaacagattccactgccatttctcaccacgtgactggcagcgactcatcaacaacaattggggattccggcccaagagactcaacttcaaactcttcaacatccaagtcaaggaggtcacgacgaatgatggcgtcacaaccatcgctaataaccttaccagcacggttcaagtcttctcggactcggagtaccagcttccgtacgtcctcggctctgcgcaccagggctgcctccctccgttcccggcggacgtgttcatgattccgcagtacggctacctaacgctcaacaatggcagccaggcagtgggacggtcatccttttactgcctggaatatttcccatcgcagatgctgagaacgggcaataactttaccttcagctacaccttcgaggacgtgcctttccacagcagctacgcgcacagccagagcctggaccggctgatgaatcctctcatcgaccagtacctgtattacctgaacagaactcagaatcagtccggaagtgcccaaaacaaggacttgctgtttagccgggggtctccagctggcatgtctgttcagcccaaaaactggctacctggaccctgttaccggcagcagcgcgtttctaaaacaaaaacagacaacaacaacagcaactttacctggactggtgcttcaaaatataaccttaatgggcgtgaatctataatcaaccctggcactgctatggcctcacacaaagacgacaaagacaagttctttcccatgagcggtgtcatgatttttggaaaggagagcgccggagcttcaaacactgcattggacaatgtcatgatcacagacgaagaggaaatcaaagccactaaccccgtggccaccgaaagatttgggactgtggcagtcaatctccagagcagcagcacagaccctgcgaccggagatgtgcatgttatgggagccttacctggaatggtgtggcaagacagagacgtatacctgcagggtcccatttgggccaaaattcctcacacagatggacactttcacccgtctcctcttatgggcggctttggacttaagcacccgcctcctcagatcctcatcaaaaacacgcctgttcctgcgaatcctccggcagagttttcggctacaaagtttgcttcattcatcacccagtattctactggccaagtcagcgtggagattgaatgggagctgcagaaagaaaacagcaaacgctggaatcccgaagtgcagtatacatctaactatgcaaaatctgccaacgttgatttcactgtggacaacaatggactttatactgagcctcgtcccattggcacccgttacctcacccgtcccctgtaa

SEQ ID NO: 560 - protein, 736 aa, Artificial Sequence
  source: /note="Description of Artificial Sequence: Synthetic polypeptide"
MASDGYLPDWLEDNLSEGIREWWDLKPGAPKPKANQQKQDDGRGLVLPGYKYLGPFNGLDKGEPVNAADAAALEHDKAYDQQLRAGDNPYLRYNHADAEFQERLQEDTSFGGNLGRAVFQAKKRVLEPFGLVEEGAKTAPGKKRPVEQSPQEPDSSSGIGKTGQQPAKKRLNFGQTGDSESVPDPQPLGEPPATPAAVGPTTMASGGGAPMADNNEGADGVGNASGNWHCDSTWLGDRVITTSTRTWALPTYNNHLYKQISSASTGASNDNHYFGYSTPWGYFDFNRFHCHFSPRDWQRLINNNWGFRPKRLNFKLFNIQVKEVTTNDGVTTIANNLTSTVQVFSDSEYQLPYVLGSAHQGCLPPFPADVFMIPQYGYLTLNNGSQAVGRSSFYCLEYFPSQMLRTGNNFTFSYTFEDVPFHSSYAHSQSLDRLMNPLIDQYLYYLNRTQNQSGSAQNKDLLFSRGSPAGMSVQPKNWLPGPCYRQQRVSKTKTDNNNSNFTWTGASKYNLNGRESIINPGTAMASHKDDKDKFFPMSGVMIFGKESAGASNTALDNVMITDEEEIKATNPVATERFGTVAVNLQSSSTDPATGDVHVMGALPGMVWQDRDVYLQGPIWAKIPHTDGHFHPSPLMGGFGLKHPPPQILIKNTPVPANPPAEFSATKFASFITQYSTGQVSVEIEWELQKENSKRWNPEVQYTSNYAKSANVDFTVDNNGLYTEPRPIGTRYLTRPL

SEQ ID NO: 561 - DNA, 2211 bp, Artificial Sequence
  source: /note="Description of Artificial Sequence: Synthetic polynucleotide"
atggctgctgatggttatcttccagattggctcgaggacactctctctgaaggaataagacagtggtggaagctcaaacctggcccaccaccaccaaagcccgcagagcggcataaggacgacagcaggggtcttgtgcttcctgggtacaagtacctcggacccttcaacggactcgacaagggagagccggtcaacgaggcagacgcagcggccctcgagcacgacaaggcctacgaccagcagctcaaggccggtgacaacccctacctcaagtacaaccacgccgacgcggagttccagcagcggcttcagggcgacacatcgtttgggggcaacctcggcagagcagtcttccaggccaaaaagagggttcttgaacctcttggtctggttgagcaagcgggtgagacggctcctggaaagaagagaccgttgattgaatccccccagcagcccgactcctccacgggtatcggcaaaaaaggcaagcagccggctaaaaagagactcaattttggtcagactggcgactcagagtcagtccccgacccacaacctctcggagaacctccagcaacccccgctgctgtgggacctactacaatggcttcaggtggtggcgcaccaatggcagacaataacgaaggcgccgacggagtgggtaatgcctcaggaaattggcattgcgattccacatggctgggcgacagagtcatcaccaccagcacccgcacctgggccttgcccacctacaataaccacctctacaagcaaatctccagtgcttcaacgggggccagcaacgacaaccactacttcggctacagcaccccctgggggtattttgacttcaacagattccactgccacttttcaccacgtgactggcagcgactcatcaacaacaattggggattccggcccaagagactcaacttcaaactcttcaacatccaagtcaaggaggtcacgacgaatgatggcgtcacaaccatcgctaataaccttaccagcacggttcaagtcttctcggactcagactatcagctcccgtacgtgctcgggtcggctcacgagggctgcctcccgccgttcccagcagacgtcttcatggtgccacagtatggatacctcaccctgaacaacgggagtcaggcagtaggacgctcttcattttactgcctggagtactttccttctcagatgctgcgtaccggaaacaactttaccttcagctacacttttgaggacgttcctttccacagcagctacgctcacagccagagtctggaccgtctcatgaatcctctcatcgaccagtacctgtattacctgaacagaactcagaatcagtccggaagtgcccaaaacaaggacttgctgtttagccgggggtctccaactggcatgtctgttcagcccaaaaactggctacctggaccctgttatcggcagcagcgcgtttctaaaacaaaaacagacaacaacaacagcaactttacctggactggtgcttcaaaatataaccttaatgggcgtgaatctataatcaaccctggcactgctatggcctcacacaaagacgacaaagacaagttctttcccatgagcggtgtcatgatttttggaaaggagagcgccggagcttcaaacactgcattggacaatgtcatgatcacagacgaagaggaaatcaaagccactaaccccgtggccactgaaagatttgggactgtggcagtcaatctccagagcagcagcacagaccctgcgaccggagatgtgcatgccatgggagccttacctggaatggtgtggcaagacagagacgtatacctgcagggtcctatttgggccaaaattcctcacacggatggacactttcacccgtctcctctcatgggcggctttggactcaagaacccgcctcctcagatcctcatcaaaaacacgcctgttcctgcgaatcctccggcggagttttcagctacaaagtttgcttcattcatcacccagtattccacaggacaagtgagcgtggagattgaatgggagctgcagaaagaaaacagcaaacgctggaatcccgaagtgcagtatacatctaactatgcaaaatctgccaacgttgatttcactgtggacaacaatggactttatactgagcctcgccccattggcacccgttacctcacccgtcccctgtaa

SEQ ID NO: 562 - protein, 736 aa, Artificial Sequence
  source: /note="Description of Artificial Sequence: Synthetic polypeptide"
MAADGYLPDWLEDTLSEGIRQWWKLKPGPPPPKPAERHKDDSRGLVLPGYKYLGPFNGLDKGEPVNEADAAALEHDKAYDQQLKAGDNPYLKYNHADAEFQQRLQGDTSFGGNLGRAVFQAKKRVLEPLGLVEQAGETAPGKKRPLIESPQQPDSSTGIGKKGKQPAKKRLNFGQTGDSESVPDPQPLGEPPATPAAVGPTTMASGGGAPMADNNEGADGVGNASGNWHCDSTWLGDRVITTSTRTWALPTYNNHLYKQISSASTGASNDNHYFGYSTPWGYFDFNRFHCHFSPRDWQRLINNNWGFRPKRLNFKLFNIQVKEVTTNDGVTTIANNLTSTVQVFSDSDYQLPYVLGSAHEGCLPPFPADVFMVPQYGYLTLNNGSQAVGRSSFYCLEYFPSQMLRTGNNFTFSYTFEDVPFHSSYAHSQSLDRLMNPLIDQYLYYLNRTQNQSGSAQNKDLLFSRGSPTGMSVQPKNWLPGPCYRQQRVSKTKTDNNNSNFTWTGASKYNLNGRESIINPGTAMASHKDDKDKFFPMSGVMIFGKESAGASNTALDNVMITDEEEIKATNPVATERFGTVAVNLQSSSTDPATGDVHAMGALPGMVWQDRDVYLQGPIWAKIPHTDGHFHPSPLMGGFGLKNPPPQILIKNTPVPANPPAEFSATKFASFITQYSTGQVSVEIEWELQKENSKRWNPEVQYTSNYAKSANVDFTVDNNGLYTEPRPIGTRYLTRPL

SEQ ID NO: 563 - DNA, 2211 bp, Artificial Sequence
  source: /note="Description of Artificial Sequence: Synthetic polynucleotide"
atggctgccgatggttatcttccagattggctcgaggacaacctctctgagggcattcgcgagtggtgggcgctgaaacctggagccccgaagcccaaagccaaccagcaaaagcaggacgacggccggggtctggtgcttcctggctacaagtacctcggacccttcaacggactcgacaagggggagcccgtcaacgcggcggatgcagcggccctcgagcacgacaaggcctacgaccagcagctcaaagcgggtgacaatccgtacctgcggtataaccacgccgacgccgagtttcaggagcgtctgcaagaagatacgtcttttgggggcaacctcgggcgagcagtcttccaggccaagaagcgggttctcgaacctctcggtctggttgaggaaggcgctaagacggctcctggaaagaaacgtccggtagagcaatcgccacaagagccagactcctcctcgggcatcggcaagacaggccagcagcccgctaaaaagagactcaattttggtcagactggcgactcagagtcagtccccgacccacaacctctcggagaacctccagcaacccccgctgctgtgggacctactacaatggcttcaggcggtggcgcaccaatggcagacaataacgaaggcgccgacggagtgggtaatgcctcaggaaattggcattgcgattccacatggctgggcgacagagtcatcaccaccagcacccgaacatgggccttgcccacctataacaaccacctctacaagcaaatctccagtgcttcgacgggggccagcaacgacaaccactacttcggctacagcaccccctgggggtattttgactttaacagattccactgccacttttcaccacgtgactggcagcgactcatcaacaacaactggggattccggcccaagagactcagcttcaagctcttcaacatccaggtcaaggaggtcacgacgaatgatggcgtcacaaccatcgctaataaccttaccagcacggttcaagtcttctcggactcggagtaccagcttccgtacgtcctcggctctgcgcaccagggctgcctccctccgttcccggcggacgtgttcatgattccgcaatacggctacctgacgctcaacaatggcagccaagccgtgggacgttcatccttttactgcctggaatatttcccttctcagatgctgagaacgggcaacaactttaccttcagctacacctttgaggaagtgcctttccacagcagctacgcgcacagccagagcctggaccggctgatgaatcctctcatcgatcaatacctgtattacctgaacagaactcaaaatcagtccggaagtgcccaaaacaaggacttgctgtttagccgtgggtctccagctggcatgtctgttcagcccaaaaactggctacctggaccctgttatcggcagcagcgcgtttctaaaacaaaaacagacaacaacaacagcaattttacctggactggtgcttcaaaatataacctcaatgggcgtgaatccatcatcaaccctggcactgctatggcctcacataaagacgacgaagacaagttctttcccatgagcggtgtcatgatttttggaaaagagagcgccggagcttcaaacactgcattggacaatgtcatgattacagacgaagaggaaattaaagccactaaccctgtggccaccgaaagatttgggaccgtggcagtcaatttccagagcagcagcacagaccctgcgaccggagatgtgcatgctatgggagcattacctggcatggtgtggcaagatagagacgtgtacctgcagggtcccatttgggccaaaattcctcacacagatggacactttcacccgtctcctcttatgggcggctttggactcaagaacccgcctcctcagatcctcatcaaaaacacgcctgttcctgcgaatcctccggcggagttttcagctacaaagtttgcttcattcatcacccaatactccacaggacaagtgagcgtggagattgaatgggagctgcagaaagaaaacagcaaacgctggaatcccgaagtgcagtatacatctaactatgcaaaatctgccaacattgatttcactgtggacaacaatggactttatactgagcctcgccccattggcacccgttacctcacccgtccccagtaa

SEQ ID NO: 564 - protein, 736 aa, Artificial Sequence
  source: /note="Description of Artificial Sequence: Synthetic polypeptide"
MAADGYLPDWLEDNLSEGIREWWALKPGAPKPKANQQKQDDGRGLVLPGYKYLGPFNGLDKGEPVNAADAAALEHDKAYDQQLKAGDNPYLRYNHADAEFQERLQEDTSFGGNLGRAVFQAKKRVLEPLGLVEEGAKTAPGKKRPVEQSPQEPDSSSGIGKTGQQPAKKRLNFGQTGDSESVPDPQPLGEPPATPAAVGPTTMASGGGAPMADNNEGADGVGNASGNWHCDSTWLGDRVITTSTRTWALPTYNNHLYKQISSASTGASNDNHYFGYSTPWGYFDFNRFHCHFSPRDWQRLINNNWGFRPKRLSFKLFNIQVKEVTTNDGVTTIANNLTSTVQVFSDSEYQLPYVLGSAHQGCLPPFPADVFMIPQYGYLTLNNGSQAVGRSSFYCLEYFPSQMLRTGNNFTFSYTFEEVPFHSSYAHSQSLDRLMNPLIDQYLYYLNRTQNQSGSAQNKDLLFSRGSPAGMSVQPKNWLPGPCYRQQRVSKTKTDNNNSNFTWTGASKYNLNGRESIINPGTAMASHKDDEDKFFPMSGVMIFGKESAGASNTALDNVMITDEEEIKATNPVATERFGTVAVNFQSSSTDPATGDVHAMGALPGMVWQDRDVYLQGPIWAKIPHTDGHFHPSPLMGGFGLKNPPPQILIKNTPVPANPPAEFSATKFASFITQYSTGQVSVEIEWELQKENSKRWNPEVQYTSNYAKSANIDFTVDNNGLYTEPRPIGTRYLTRPQ

SEQ ID NO: 565 - DNA, 2211 bp, Artificial Sequence
  source: /note="Description of Artificial Sequence: Synthetic polynucleotide"
atggctgccgatggttatcttccagattggctcgaggacaacctctctgagggcattcgcgagtggtgggacttgaaacctggagccccgaaacccaaagccaaccagcaaaagcaggacgacggccggggtctggtgcttcctggctacaagtacctcggacccttcaacggactcgacaagggggagcccgtcaacgcggcggatgcagcggccctcgagcacgacaaggcctacgaccagcagctcaaagcgggtgacaatccgtaccttcggtataaccacgccgacgccgagtttcaggagcgtctgcaagaagatacgtcttttgggggcaacctcgggcgagcagtcttccaggccaaaaagagggttctcgaacctctcggtctggttgaggaagcggctaagacggctcctggaaagaaacgtccggtagagcagtcgccacaagagccagactcctcctcgggcattggcaagacaggccagcagcccgctaaaaagagactcaattttggtcagactggcgactcagagtcagtccccgacccacaacctctcggagaacctcccgcagccccctcaggtgtgggatctcttacaatggcttcaggtggtggcgcaccaatggcagacaataacgaaggcgccgacggagtgggtaatgcctcaggaaattggcattgcgattccacatggctgggcgacagagtcatcaccaccagcacccgcacctgggccttgcccacctacaataaccacctctacaagcaaatctccagtgcttcaacgggggccagcaacgacaaccactacttcggctacagcaccccctgggggtattttgacttcaacagattccactgccacttttcaccacgtgactggcaaagactcatcaacaacaattggggattccggcccaagagactcaacttcaagctcttcaacatccaagtcaaggaggtcacgacgaatgatggcgtcacgaccatcgctaataaccttaccagcacggttcaagtcttctcggactcggagtaccagttgccgtacgtcctcggctctgcgcaccagggctgcctccctccgttcccggcggacgtgttcatgattccgcagtacggctacctaacgctcaacaatggcagccaggcagtgggacggtcatccttttactgcctggaatatttcccatcgcagatgctgagaacgggcaacaactttaccttcagctacacctttgaggaagtgcctttccacagcagctacgcgcacagccagagcctggaccggctgatgaatcctctcatcgaccagtacctgtattacctgaacagaactcaaaatcagtccggaagtgcccaaaacaaggacttgctgtttagccgtgggtctccagctggcatgtctgttcagcccaaaaactggctacctggaccctgttaccggcagcagtgcgtttctaaaacaaaaacagacaacaacaacagcaactttacctggactggtgcttcaaaatataaccttaatgggcgtgaatctataatcaaccctggcactgctatggcctcacacaaagacgacaaagacaagttctttcccatgagcggtgtcatgatttttggaaaggagagcgccggagcttcaaacactgcattggacaatgtcatgatcacagacgaagaggaaatcaaagccactaaccccgtggccaccgaaagatttgggactgtggcagtcaatctccagagcagcagcacagaccctgcgaccggagatgtgcatgttatgggagccttacctggaatggtgtggcaagacagagacgtatacctgcagggtcctatttgggccaaaattcctcacacagatggacactttcacccgtctcctcttatgggcggctttggactcaagaacccgcctcctcagatcctcatcaaaaacacgcctgttcctgcgaatcctccggcggagttttcagctacaaagtttgcttcattcatcacccaatactccacaggacaagtgagcgtggagattgaatgggagctgcagaaagaaaacagcaagcgctggaatcccgaagtgcagtacacatccaattatgcaaaatctgccaacgttgatttcactgtggacaacaatggactttatactgagcctcgccccattggcacccgttacctcacccgtcccctgtaa

SEQ ID NO: 566 - protein, 736 aa, Artificial Sequence
  source: /note="Description of Artificial Sequence: Synthetic polypeptide"
MAADGYLPDWLEDNLSEGIREWWDLKPGAPKPKANQQKQDDGRGLVLPGYKYLGPFNGLDKGEPVNAADAAALEHDKAYDQQLKAGDNPYLRYNHADAEFQERLQEDTSFGGNLGRAVFQAKKRVLEPLGLVEEAAKTAPGKKRPVEQSPQEPDSSSGIGKTGQQPAKKRLNFGQTGDSESVPDPQPLGEPPAAPSGVGSLTMASGGGAPMADNNEGADGVGNASGNWHCDSTWLGDRVITTSTRTWALPTYNNHLYKQISSASTGASNDNHYFGYSTPWGYFDFNRFHCHFSPRDWQRLINNNWGFRPKRLNFKLFNIQVKEVTTNDGVTTIANNLTSTVQVFSDSEYQLPYVLGSAHQGCLPPFPADVFMIPQYGYLTLNNGSQAVGRSSFYCLEYFPSQMLRTGNNFTFSYTFEEVPFHSSYAHSQSLDRLMNPLIDQYLYYLNRTQNQSGSAQNKDLLFSRGSPAGMSVQPKNWLPGPCYRQQCVSKTKTDNNNSNFTWTGASKYNLNGRESIINPGTAMASHKDDKDKFFPMSGVMIFGKESAGASNTALDNVMITDEEEIKATNPVATERFGTVAVNLQSSSTDPATGDVHVMGALPGMVWQDRDVYLQGPIWAKIPHTDGHFHPSPLMGGFGLKNPPPQILIKNTPVPANPPAEFSATKFASFITQYSTGQVSVEIEWELQKENSKRWNPEVQYTSNYAKSANVDFTVDNNGLYTEPRPIGTRYLTRPL

SEQ ID NO: 567 - DNA, 2211 bp, Artificial Sequence
  source: /note="Description of Artificial Sequence: Synthetic polynucleotide"
atggctgccgatggttatcttccagattggctcgaggacaacctctctgagggcattcgcgaatggtgggacttgaaacctggagccccgaaacccaaagtcaaccagcaaaagcaggacaacgctcggggtcttgtgcttccgggttacaaatacctcggacccttcaacggactcgacaagggggagcccgtcaacgcggcggacgcagcggccctcgagcacgacaaggcctacgaccagcagctcaaagcgggtgacaatccgtaccttcggtataaccacgccgacgccgagtttcaggagcgtctgcaagaagatacgtcttttgggggcaaccttggacgagcagtcttccaggccaagaagagggttctcgaaccttttggtctggttgaggaaggtgctaagacggctcctggaaagaaacgtccggtagagcagtcgccacaagagccagactcctcctcgggcattggcaagacaggccagcagcccgctaaaaagagactcaattttggtcagactggcgactcagagtcagtccccgacccacaacctctcggagaacctccagcaacccccgctgctgtgggacctactacaatggcttcaggcggtggcgcaccaatggcagacaataacgaaggcgccgacggagtgggtaatgcctcaggaaattggcattgcgattccacatggctgggcgacagagtcatcaccaccagcacccgcacctgggccttgcccacctacaataaccacctctacaagcaaatctccagtgcttcaacgggggccagcaacgacaaccactacttcggctacagcaccccctgggggtattttgacttcaacagattccactgccacttttcaccacgtgactggcaaagactcatcaacaacaattggggattccggcccaagagactcaacttcaagctcttcaacatccaagtcaaggaggtcacgacgaatgatggcgtcacgaccatcgctaataaccttaccagcacggttcaagtcttctcggactcggagtaccagttgccgtacgtcctcggctctgcgcaccagggctgcctccctccgttcccggcggacgtgttcatgattccgcaatacggctacctgacgctcaacaatggcagccaggcagtgggacggtcatccttttactgcctggaatatttcccatcgcagatgctgagaacgggcaataactttaccttcagctacacttttgaggacgttcctttccacagcagctacgctcacagccagagcctggaccggctgatgaatcctctcatcgaccagtacctgtattacctgaacagaactcagaatcagtccggaagtgcccaaaacaaggacttgctgtttagccgtgggtctccaactggcatgtctgttcagcccaaaaactggctacctggaccctgttatcggcagcagcgcgtttctaaaacaaaaacagacaacaacaacagcaactttacctggactggtgcttcaaaatataaccttaatgggcgtgaatctataatcaaccctggcactgctatggcctcacacaaagacgacgaagacaagttctttcccatgagcggtgtcatgatttttggaaaggagagcgccggagcttcaaacactgcattggacaatgtcatgatcacagacgaagaggaaatcaaagccactaaccccgtggccactgaaagatttgggactgtggcagtcaatctccagagcagcagcacagaccctgcgaccggagatgtgcatgccatgggagccttacctggaatggtgtggcaagacagagacgtatacctgcagggtcctatttgggccaaaattcctcacacggatggacactttcacccgtctcctctcatgggcggctttggacttaagcacccgcctcctcagatcctcatcaaaaacacgcctgttcctgcgaatcctccggcagagttttcggctacaaagtttgcttcattcatcacccagtattccacaggacaagtgagcgtggagattgaatgggagctgcagaaagaaaacagcaaacgctggaatcccgaagtgcagtatacatctaactatgcaaaatctgccaacgttgatttcactgtggacaacaatggactttatactgagcctcgccccattggcacccgttacctcacccgtcccctgtaa

SEQ ID NO: 568 - protein, 736 aa, Artificial Sequence
  source: /note="Description of Artificial Sequence: Synthetic polypeptide"
MAADGYLPDWLEDNLSEGIREWWDLKPGAPKPKVNQQKQDNARGLVLPGYKYLGPFNGLDKGEPVNAADAAALEHDKAYDQQLKAGDNPYLRYNHADAEFQERLQEDTSFGGNLGRAVFQAKKRVLEPFGLVEEGAKTAPGKKRPVEQSPQEPDSSSGIGKTGQQPAKKRLNFGQTGDSESVPDPQPLGEPPATPAAVGPTTMASGGGAPMADNNEGADGVGNASGNWHCDSTWLGDRVITTSTRTWALPTYNNHLYKQISSASTGASNDNHYFGYSTPWGYFDFNRFHCHFSPRDWQRLINNNWGFRPKRLNFKLFNIQVKEVTTNDGVTTIANNLTSTVQVFSDSEYQLPYVLGSAHQGCLPPFPADVFMIPQYGYLTLNNGSQAVGRSSFYCLEYFPSQMLRTGNNFTFSYTFEDVPFHSSYAHSQSLDRLMNPLIDQYLYYLNRTQNQSGSAQNKDLLFSRGSPTGMSVQPKNWLPGPCYRQQRVSKTKTDNNNSNFTWTGASKYNLNGRESIINPGTAMASHKDDEDKFFPMSGVMIFGKESAGASNTALDNVMITDEEEIKATNPVATERFGTVAVNLQSSSTDPATGDVHAMGALPGMVWQDRDVYLQGPIWAKIPHTDGHFHPSPLMGGFGLKHPPPQILIKNTPVPANPPAEFSATKFASFITQYSTGQVSVEIEWELQKENSKRWNPEVQYTSNYAKSANVDFTVDNNGLYTEPRPIGTRYLTRPL

SEQ ID NO: 569 - DNA, 2208 bp, Artificial Sequence
  source: /note="Description of Artificial Sequence: Synthetic polynucleotide"
  modified_base (955)..(955): a, c, t, or g
  modified_base (971)..(972): a, c, t, or g
  modified_base (981)..(981): a, c, t, or g
  modified_base (986)..(986): a, c, t, or g
  modified_base (1235)..(1235): a, c, t, or g
  modified_base (1694)..(1696): a, c, t, or g
  modified_base (1698)..(1698): a, c, t, or g
  modified_base (1763)..(1765): a, c, t, or g
  modified_base (1778)..(1778): a, c, t, or g
  modified_base (2204)..(2204): a, c, t, or g
atggctgccgatggttatcttccagattggctcgaggacaacctctctgagggcattcgcgaatggtgggacttgaaacctggagccccgaaacccaaagtcaaccagcaaaagcaggacaacgctcggggtcttgtgcttccgggttacaaatacctcggacccttcaacggactcgacaagggggagcccgtcaacgcggcggacgcagcggccctcgagcacgacaaggcctacgaccagcagctcaaagcgggtgacaatccgtaccttcggtataaccacgccgacgccgagtttcaggagcgtctgcaagaagatacgtcttttgggggcaaccttggacgagcagtcttccaggccaagaagagggttctcgaaccttttggtctggttgaggaaggtgctaagacggctcctggaaagaaacgtccggtagagcagtcgccacaagagccagactcctcctcgggcattggcaagacaggccagcagcccgctaaaaagagactcaattttggtcagactggcgactcagagtcagtccccgacccacaacctctcggagaacctccagcaacccccgctgctgtgggacctactacaatggcttcaggcggtggcgcaccaatggcagacaataacgaaggcgccgacggagtgggtaatgcctcaggaaattggcattgcgattccacatggctgggcgacagagtcatcaccaccagcacccgaacatgggccttgcccacctataacaaccacctctacaagcaaatctccagtgcttcaacgggggccagcaacgacaaccactacttcggctacagcaccccctgggggtattttgatttcaacagattccactgccacttttcaccacgtgactggcagcgactcatcaataacaattggggattccggcccaagagactcaacttcaaactcttcaacntccaagtcaaggaggnnacgacgaangatgncgtcacaaccatcgctaataaccttaccagcacggttcaagtcttctcggactcggagtaccagcttccgtacgtcctcggctctgcgcaccagggctgcctccctccgttcccggcggacgtgttcatgattccgcaatacggctacctgacgctcaacaatggcagccaggcagtgggacggtcatccttttactgcctggaatatttcccatcgcagatgctgagaacgggcaataactttacctncagctacacttttgaggacgttcctttccacagcagctacgctcacagccagagcctggaccggctgatgaatcctctcatcgaccagtacctgtattacctgaacagaactcagaatcagtccggaagtgcccaaaacaaggacttgctgtttagccgtgggtctccaactggcatgtctgttcagcccaaaaactggctacctggaccctgttatcggcagcagcgcgtttctaaaacaaaaacagacaacaacaacagcaactttacctggactggtgcttcaaaatataaccttaatgggcgtgaatctataatcaaccctggcactgctatggcctcacacaaagacgacgaagacaagttctttcccatgagcggtgtcatgatttttggaaaggagagcgccggagcttcaaacactgcattggacaatgtcatgatcacagacgaagagannncnaagccactaaccccgtggccactgaaagatttgggactgtggcagtcaatctccaagcagcacannnaccctgcgaccgnagatgtgcatgccatgggagccttacctggaatggtgtggcaagacagagacgtatacctgcagggtcctatttgggccaaaattcctcacacggatggacactttcacccgtctcctctcatgggcggctttggacttaagcacccgcctcctcagatcctcatcaaaaacacgcctgttcctgcgaatcctccggcagagttttcggctacaaagtttgcttcattcatcacccagtattccacaggacaagtgagcgtggagattgaatgggagctgcagaaagaaaacagcaaacgctggaatcccgaagtgcagtatacatctaactatgcaaaatctgccaacgttgatttcactgtggacaacaatggactttatactgagcctcgccccattggcacccgttacctcacccgtccccngtaa

SEQ ID NO: 570 - protein, 723 aa, Artificial Sequence
  source: /note="Description of Artificial Sequence: Synthetic polypeptide"
MAADGYLPDWLEDNLSEGIREWWDLKPGAPKPKVNQQKQDNARGLVLPGYKYLGPFNGLDKGEPVNAADAAALEHDKAYDQQLKAGDNPYLRYNHADAEFQERLQEDTSFGGNLGRAVFQAKKRVLEPFGLVEEGAKTAPGKKRPVEQSPQEPDSSSGIGKTGQQPAKKRLNFGQTGDSESVPDPQPLGEPPATPAAVGPTTMASGGGAPMADNNEGADGVGNASGNWHCDSTWLGDRVITTSTRTWALPTYNNHLYKQISSASTGASNDNHYFGYSTPWGYFDFNRFHCHFSPRDWQRLINNNWGFRPKRLNFKLFNQVKETTDVTTIANNLTSTVQVFSDSEYQLPYVLGSAHQGCLPPFPADVFMIPQYGYLTLNNGSQAVGRSSFYCLEYFPSQMLRTGNNFTSYTFEDVPFHSSYAHSQSLDRLMNPLIDQYLYYLNRTQNQSGSAQNKDLLFSRGSPTGMSVQPKNWLPGPCYRQQRVSKTKTDNNNSNFTWTGASKYNLNGRESIINPGTAMASHKDDEDKFFPMSGVMIFGKESAGASNTALDNVMITDEEATNPVATERFGTVAVNLQSSPATDVHAMGALPGMVWQDRDVYLQGPIWAKIPHTDGHFHPSPLMGGFGLKHPPPQILIKNTPVPANPPAEFSATKFASFITQYSTGQVSVEIEWELQKENSKRWNPEVQYTSNYAKSANVDFTVDNNGLYTEPRPIGTRYLTRP

SEQ ID NO: 571 - DNA, 2208 bp, Artificial Sequence
  source: /note="Description of Artificial Sequence: Synthetic polynucleotide"
atggctgccgatggttatcttccagattggctcgaggacactctctctgaaggaataagacagtggtggaagctcaaacctggcccaccaccaccaaagcccgcagagcggcataaggacgacagcaggggtcttgtgcttcctgggtacaagtacctcggacccttcaacggactcgacaagggagagccggtcaacgaggcagacgccgcggccctcgagcacgacaaagcctatgaccggcagctcgacagcggagacaacccgtacctcaagtacaaccacgccgacgcggagtttcaggagcgccttaaagaagatacgtcttttgggggcaacctcggacgagcagtcttccaggcgaaaaagagggttcttgaacctctgggcctggttgaggaacctgttaagacggctccgggaaaaaagaggccggtagagcactctcctgtggagccagactcctcctcgggaaccggaaaggcgggtcagcagcctgcaagaaaaagattgaattttggtcagactggagacgcagactcagtacctgacccccagcctctcggacagccaccagcagccccctctggtctgggaactaatacgatggctacaggcagtggcgcaccaatggcagacaataacgagggcgccgacggagtgggtaattcctcgggaaattggcattgcgattccacatggatgggcgacagagtcatcaccaccagcacccgaacctgggccctgcccacctacaacaaccacctctacaaacaaatttccagccaatcaggagcctcgaacgacaatcactactttggctacagcaccccttgggggtattttgacttcaacagattccactgccacttttcaccacgtgactggcaaagactcatcaacaacaactggggattccgacccaagagactcaagttcaagctctttaacattcaagtcaaagaggtcacgcagaatgacggtacgacgacgattgccaataaccttaccagcacggttcaggtgtttactgactcggagtaccagctcccgtacgtcctcggctcggcgcatcaaggatgcctcccgccgttcccagcagacgtcttcatggtgccacagtatggatacctcaccctgaacaacgggagtcaggcagtaggacgctcttcattttactgcctggagtactttccttctcagatgctgcgtaccggtaacaactttaccttcagctacacttttgaggacgttcctttccacagcagctacgctcacagccagagtctggaccgtctcatgaatcctctcatcgaccagtacctgtattacttgagcagaacagacgctccaagtggaaccaccacgcagtcaaggcttcagttttctcaggccggagcgagtgacattcgggaccagtctaggaactggcttcctggaccctgttaccgccagcagcgagtatcaaagacatctgcggataacaacaacagtgaatactcgtggactggagctaccaagtaccacctcaatggcagagactctctggtgaatccgggcccggccatggcaagccacaaggacgatgaagaaaagttttttcctcagagcggggttctcatctttgggaagcaaggctcagagaaaacaagtgtggacattgaaaaggtcatgattacagacgaagaggaaatcaggacaaccaatcccgtggctacggagcagtatggttctgtatctaccaacctccagagaggcaacagacaagcagctaccgcagatgtcaacacacaaggcgttcttccaggcatggtctggcaggacagagatgtgtaccttcaggggcccatctgggcaaagattccacacacggacggacattttcacccctctcccctcatgggtggattcggacttaaacaccctcctccacagattctcatcaagaacaccccggtacctgcgaatccttcgaccaccttcagtgcggcaaagtttgcttccttcatcacacagtactccacgggacaggtcagcgtggagatcgagtgggagctgcagaaggaaaacagcaaacgctggaatcccgaagttcagtacacttccaactacaacaagtctgttaatgtggactttactgtggacactaatggcgtgtattcagagcctcgccccattggcaccagatacctgactcgtaatctgtaa

SEQ ID NO: 572 - protein, 735 aa, Artificial Sequence
  source: /note="Description of Artificial Sequence: Synthetic polypeptide"
MAADGYLPDWLEDTLSEGIRQWWKLKPGPPPPKPAERHKDDSRGLVLPGYKYLGPFNGLDKGEPVNEADAAALEHDKAYDRQLDSGDNPYLKYNHADAEFQERLKEDTSFGGNLGRAVFQAKKRVLEPLGLVEEPVKTAPGKKRPVEHSPVEPDSSSGTGKAGQQPARKRLNFGQTGDADSVPDPQPLGQPPAAPSGLGTNTMATGSGAPMADNNEGADGVGNSSGNWHCDSTWMGDRVITTSTRTWALPTYNNHLYKQISSQSGASNDNHYFGYSTPWGYFDFNRFHCHFSPRDWQRLINNNWGFRPKRLKFKLFNIQVKEVTQNDGTTTIANNLTSTVQVFTDSEYQLPYVLGSAHQGCLPPFPADVFMVPQYGYLTLNNGSQAVGRSSFYCLEYFPSQMLRTGNNFTFSYTFEDVPFHSSYAHSQSLDRLMNPLIDQYLYYLSRTDAPSGTTTQSRLQFSQAGASDIRDQSRNWLPGPCYRQQRVSKTSADNNNSEYSWTGATKYHLNGRDSLVNPGPAMASHKDDEEKFFPQSGVLIFGKQGSEKTSVDIEKVMITDEEEIRTTNPVATEQYGSVSTNLQRGNRQAATADVNTQGVLPGMVWQDRDVYLQGPIWAKIPHTDGHFHPSPLMGGFGLKHPPPQILIKNTPVPANPSTTFSAAKFASFITQYSTGQVSVEIEWELQKENSKRWNPEVQYTSNYNKSVNVDFTVDTNGVYSEPRPIGTRYLTRNL

SEQ ID NO: 573 - DNA, 2208 bp, Artificial Sequence
  source: /note="Description of Artificial Sequence: Synthetic polynucleotide"
atggctgccgatggttatcttccagattggctcgaggacactctctctgaaggaataagacagtggtggaagctcaaacctggcccaccaccaccaaagcccgcagagcggcataaggacgacagcaggggtcttgtgcttcctgggtacaagtacctcggacccttcaacggactcgacaagggagagccggtcaacgaggcagacgccgcggccctcgagcacgacaaagcctatgaccggcagctcgacagcggagacaacccgtacctcaagtacaaccacgccgacgcggagtttcaggagcgccttaaagaagatacgtcttttgggggcaacctcggacgagcagtcttccaggcgaaaaagagggttcttgaacctctgggcctggttgaggaacctgttaagacggctccgggaaaaaagaggccggtagagcactctcctgtggagccagactcctcctcgggaaccggaaaggcgggccagcagcctgcaagaaaaagattgaattttggtcagactggagacgcaaactcagtacctgacccccagcctctcggacagccaccagcagccccctctggtctgggaactaatacgatggctacaggcagtggcgcaccaatggcagacaataacgagggcgccgacggagtgggtaattcctcgggaaattggcattgcgattccacatggatgggcgacagagtcatcaccaccagcacccgaacctgggccctgcccacctacaacaaccacctctacaaacaaatttccagccaatcaggagcctcgaacgacaatcactactttggctacagcaccccttgggggtattttgacttcaacagattccactgccacttttcaccacgtgactggcaaagactcatcaacaacaactggggattccgacccaagagactcaagttcaagctctttaacattcaagtcaaagaggtcacgcagaatgacggtacgacgacgattgccaataaccttaccagcacggttcaggtgtttactgactcggagtaccagctcccgtacgtcctcggctcggcgcatcaaggatgcctcccgccgttcccagcagacgtcttcatggtgccacagtatggatacctcaccctgaacaacgggagtcgggcagtaggacgctcttcattttactgcctggagtactttccttctcagatgctgcgtaccggtaacaactttaccttcagctacacttttgaggacgttcctttccacagcagctacgctcacagccagagtctggaccgtctcatgaatcctctcatcgaccagtacctgtattacttgagcagaacagacactccaagtggaaccaccacgcagtcaaggcttcagttttctcaggccggagcgagtgacattcgggaccagtctaggaactggcttcctggaccctgttaccgccagcagcgagtatcaaagacatctgcggataacaacaacagtgaatactcgtggactggagctaccaagtaccacctcaatggcagagactctctggtgaatccgggcccggccatggcaagccacaaggacgatgaagaaaagttttttcctcagagcggggttctcatctttgggaagcaaggctcagagaaaacaagtgtggacattgaaaaggtcatgattacagacgaagaggaaatcaggacgaccaatcccgtggctacggagcagtatggttctgtatctaccaacctccagagaggcaacagacaagcagctaccgcagatgtcaacacacaaggcgttcttccaggcatggtctggcaggacagagatgtgtaccttcaggggcccatctgggcaaagattccacacacggacggacattttcacccctctcccctcatgggtggattcggacttaaacaccctcctccacagattctcatcaagaacaccccggtacctgcgaatccttcgaccaccttcagtgcggcaaagtttgcttccttcatcacacagtactccacgggacaggtcagcgtggagatcgagtgggagctgcagaaggaaaacagcaaacgctggaatcccgaagttcagtacacttccaactacaacaagtctgttaatgtggactttactgtggacactaatggcgtgtatacagagcctcgccccattggcaccagatacctgactcgtaatctgtaa

SEQ ID NO: 574 - protein, 735 aa, Artificial Sequence
  source: /note="Description of Artificial Sequence: Synthetic polypeptide"
MAADGYLPDWLEDTLSEGIRQWWKLKPGPPPPKPAERHKDDSRGLVLPGYKYLGPFNGLDKGEPVNEADAAALEHDKAYDRQLDSGDNPYLKYNHADAEFQERLKEDTSFGGNLGRAVFQAKKRVLEPLGLVEEPVKTAPGKKRPVEHSPVEPDSSSGTGKAGQQPARKRLNFGQTGDANSVPDPQPLGQPPAAPSGLGTNTMATGSGAPMADNNEGADGVGNSSGNWHCDSTWMGDRVITTSTRTWALPTYNNHLYKQISSQSGASNDNHYFGYSTPWGYFDFNRFHCHFSPRDWQRLINNNWGFRPKRLKFKLFNIQVKEVTQNDGTTTIANNLTSTVQVFTDSEYQLPYVLGSAHQGCLPPFPADVFMVPQYGYLTLNNGSRAVGRSSFYCLEYFPSQMLRTGNNFTFSYTFEDVPFHSSYAHSQSLDRLMNPLIDQYLYYLSRTDTPSGTTTQSRLQFSQAGASDIRDQSRNWLPGPCYRQQRVSKTSADNNNSEYSWTGATKYHLNGRDSLVNPGPAMASHKDDEEKFFPQSGVLIFGKQGSEKTSVDIEKVMITDEEEIRTTNPVATEQYGSVSTNLQRGNRQAATADVNTQGVLPGMVWQDRDVYLQGPIWAKIPHTDGHFHPSPLMGGFGLKHPPPQILIKNTPVPANPSTTFSAAKFASFITQYSTGQVSVEIEWELQKENSKRWNPEVQYTSNYNKSVNVDFTVDTNGVYTEPRPIGTRYLTRNL

SEQ ID NO: 575 - DNA, 2211 bp, Artificial Sequence
  source: /note="Description of Artificial Sequence: Synthetic polynucleotide"
atggctgccgatggttatcttccagattggctcgaggacactctctctgaaggaataagacagtggtggaagctcaaacctggcccaccaccaccaaagcccgcagagcggcataaggacgacagcaggggtcttgtgcttcctgggtacaagtacctcggacccttcaacggactcgacaagggagagccggtcaacgaggcagacgccgcggccctcgagcacgacaaggcctacgaccagcagctcaaagcgggtgacaatccgtacctgcggtataaccacgccgacgccgagtttcaggagcgtctgcaagaagatacgtcttttgggggcaacctcgggcgagcagtcttccaggccaagaagcgggttctcgaacctctcggtctggttgaggaaggcgctaagacggctcctggaaagaaacgtccggtagagcagtcgccacaagagccagactcctcctcgggcatcggcaagacaggccagcagcccgctaaaaagagactcaattttggtcagactggcgactcagagtcagtccccgacccacaacctctcggagaacctccagcaacccccgctgctgtgggacctactacaatggcttcaggcggtggcgcaccaatggcagacaataacgaaggcgccgacggagtgggtaatgcctcaggaaattggcattgcgattccacatggctgggcgacagagtcatcaccaccagcacccgaacatgggccttgcccacctataacaaccacctctacaagcaaatctccagtgcttcgacgggggccagcaacgacaaccactacttcggctacagcaccccctgggggtattttgactttaacagattccactgccacttttcaccacgtgactggcagcgactcatcaacaataactggggattccggcccaagagactcagcttcaagctcttcaacatccaggtcaaggaggtcacgacgaatgatggcgtcacaaccatcgctaataaccttaccagcacggttcaagtcttctcggactcggagtaccagcttccgtacgtcctcggctctgcgcaccagggctgcctccctccgttcccggcggacgtgttcatgattccgcaatacggctacctgacgctcaacaatggcagccaagccgtgggacgttcatccttttactgcctggaatatttcccttctcagatgctgagaacgggcaacaactttaccttcagctacacctttgaggaagtgcctttccacagcagctacgcgcacagccagagcctggaccggctgatgaatcctctcatcgatcaatacctgtattacctgaacagaactcaaaatcagtccggaagtgcccaaaacaaggacttgctgtttagccgtgggtctccagctggcatgtctgttcagcccaaaaactggctacctggaccctgttatcggcagcagcgcgtttctaaaacaaaaacagacaacaacaacagcaattttacctggactggtgcttcaaaatataacctcaatgggcgtgaatccatcatcaaccctggcactgctatggcctcacacaaagacgacgaagacaagttctttcccatgagcggtgtcatgatttttggaaaagagagcgccggagcttcaaacactgcattggacaatgtcatgattacggacgaagaggaaattaaagccactaaccctgtggccaccgaaagatttgggaccgtggcagtcaatttccagagcagcagcacagaccctgcgaccggagatgtgcatgctatgggagcattacctggcatggtgtggcaagatagagacgtgtacctgcagggtcccatttgggccaaaattcctcacacagatggacactttcacccgtctcctcttatgggcggctttggactcaagaacccgcctcctcagatcctcatcaaaaacacgcctgttcctgcgaatcctccggcggagttttcagctacaaagtttgcttcattcatcactcaatactccacaggacaagtgagcgtggaaattgaatgggagctgcagaaagaaaacagcaaacgctggaatcccgaagtgcagtatacatctaactatgcaaaatctgccaacgttgatttcactgtggacaacaatggactttatactgagcctcgccccattggcacccgttacctcacccgtcccctgtaa

SEQ ID NO: 576 - protein, 736 aa, Artificial Sequence
  source: /note="Description of Artificial Sequence: Synthetic polypeptide"
MAADGYLPDWLEDTLSEGIRQWWKLKPGPPPPKPAERHKDDSRGLVLPGYKYLGPFNGLDKGEPVNEADAAALEHDKAYDQQLKAGDNPYLRYNHADAEFQERLQEDTSFGGNLGRAVFQAKKRVLEPLGLVEEGAKTAPGKKRPVEQSPQEPDSSSGIGKTGQQPAKKRLNFGQTGDSESVPDPQPLGEPPATPAAVGPTTMASGGGAPMADNNEGADGVGNASGNWHCDSTWLGDRVITTSTRTWALPTYNNHLYKQISSASTGASNDNHYFGYSTPWGYFDFNRFHCHFSPRDWQRLINNNWGFRPKRLSFKLFNIQVKEVTTNDGVTTIANNLTSTVQVFSDSEYQLPYVLGSAHQGCLPPFPADVFMIPQYGYLTLNNGSQAVGRSSFYCLEYFPSQMLRTGNNFTFSYTFEEVPFHSSYAHSQSLDRLMNPLIDQYLYYLNRTQNQSGSAQNKDLLFSRGSPAGMSVQPKNWLPGPCYRQQRVSKTKTDNNNSNFTWTGASKYNLNGRESIINPGTAMASHKDDEDKFFPMSGVMIFGKESAGASNTALDNVMITDEEEIKATNPVATERFGTVAVNFQSSSTDPATGDVHAMGALPGMVWQDRDVYLQGPIWAKIPHTDGHFHPSPLMGGFGLKNPPPQILIKNTPVPANPPAEFSATKFASFITQYSTGQVSVEIEWELQKENSKRWNPEVQYTSNYAKSANVDFTVDNNGLYTEPRPIGTRYLTRPL

SEQ ID NO: 577 - protein, 735 aa, Artificial Sequence
  source: /note="Description of Artificial Sequence: Synthetic polypeptide"
MAADGYLPDWLEDTLSEGIRQWWKLKPGPPPPKPAERHKDDSRGLVLPGYKYLGPFNGLDKGEPVNEADAAALEHDKAYDRQLDSGDNPYLKYNHADAEFQERLKEDTSFGGNLGRAVFQAKKRVLEPLGLVEEPVKTAPGKKRPVEHSPVEPDSSSGTGKAGQQPARKRLNFGQTGDADSVPDPQPLGQPPAAPSGLGTNTMATGSGAPMADNNEGADGVGNSSGNWHCDSTWMGDRVITTSTRTWALPTYNNHLYKQISSQSGASNDNHYFGYSTPWGYFDFNRFHCHFSPRDWQRLINNNWGFRPKRLKFKLFNIQVKEVTQNDGTTTIANNLTSTVQVFTDSEYQLPYVLGSAHQGCLPPFPADVFMVPQYGYLTLNNGSQAVGRSSFYCLEYFPSQMLRTGNNFTFSYTFEDVPFHSSYAHSQSLDRLMNPLIDQYLYYLSRTDTPSGTTTQSRLQFSQAGASDIRNQSRNWLPGPCYRQQRVSKTSADNNNSEYSWTGATKYHLNGRDSLVNPGPAMASHKDDEEKFFPQSGVLIFGKQGSEKTSVDIEKVMITDEEEIRTTNPVATEQYGSVSTNLQRGNRQAATADVNTQGVLPGMVWQDRDVYLQGPIWAKIPHTDGHFHPSPLMGGFGLKHPPPQILIKNTPVPANPSTTFSAAKFASFITQYSTGQVSVEIEWELQKENSKRWNPEVQYTSNYNKSVNVDFTVDTNGVYSEPRPIGTRYLTRNQ

SEQ ID NO: 578 - DNA, 2208 bp, Artificial Sequence
  source: /note="Description of Artificial Sequence: Synthetic polynucleotide"
atggctgccgatggttatcttccagattggctcgaggacactctctctgaaggaataagacagtggtggaagctcaaacctggcccaccaccaccaaagcccgcagagcggcataaggacgacagcaggggtcttgtgcttcctgggtacaagtacctcggacccttcaacggactcgacaagggagagccggtcaacgaggcagacgccgcggccctcgagcacgacaaagcctatgaccggcagctcgacagcggagacaacccgtacctcaagtacaaccacgccgacgcggagtttcaggaacgccttaaagaagatacgtcttttgggggcaacctcggacgagcagtcttccaggcgaaaaagagggttcttgaacctctgggcctggttgaggaacctgttaagacggctccgggaaaaaagaggccggtagagcactctcctgtggagccagactcctcctcgggaaccggaaaggcgggccagcagcctgcaagaaaaagattgaattttggtcagactggagacgcagactcagtacctgacccccagcctctcggacagccaccagcagccccctctggtctgggaactaatacgatggctacaggcagtggcgcaccaatggcagacaataacgagggcgccgacggagtgggtaattcctcgggaaattggcattgcgattccacatggatgggcgacagagtcatcaccaccagcacccgaacctgggccctgcccacctacaacaaccacctctacaaacaaatttccagccaatcaggagcctcgaacgacaatcactactttggctacagcaccccttgggggtattttgacttcaacagattccactgccacttttcaccacgtgactggcaaagactcatcaacaacaactggggattccgacccaagagactcaagttcaagctctttaacattcaagtcaaagaggtcacgcagaatgacggtacgacgacgattgccaataaccttaccagcacggttcaggtgtttactgactcggagtaccagctcccgtacgtcctcggctcggcgcatcaaggatgcctcccgccgttcccagcagacgtcttcatggtgccacagtatggatacctcaccctgaacaacgggagtcaggcagtaggacgctcttcattttactgcctggagtactttccttctcagatgctgcgtaccggtaacaactttaccttcagctacacttttgaggacgttcctttccacagcagctacgctcacagccagagtctggaccgtctcatgaatcctctcatcgaccagtacctgtattacttgagcagaacagacactccaagtggaaccaccacgcagtcaaggcttcagttttctcaggccggagcgagtgacattcggaaccagtctaggaactggcttcctggaccctgttaccgccagcagcgagtatcaaagacatctgcggataacaacaacagtgaatactcgtggactggagctaccaagtaccacctcaatggcagagactctctggtgaatccgggcccggccatggcaagccacaaggacgatgaagaaaagttttttcctcagagcggggttctcatctttgggaagcaaggctcagagaaaacaagtgtggacattgaaaaggtcatgattacagacgaagaggaaatcaggacaaccaatcccgtggctacggagcagtatggttctgtatctaccaacctccagagaggcaacagacaagcagctaccgcagatgtcaacacacaaggcgttcttccaggcatggtctggcaggacagagatgtgtaccttcaggggcccatctgggcaaagattccacacacggacggacattttcacccctctcccctcatgggtggattcggacttaaacaccctcctccacagattctcatcaagaacaccccggtacctgcgaatccttcgaccaccttcagtgcggcaaagtttgcttccttcatcacacagtactccacgggacaggtcagcgtggagatcgagtgggagctgcagaaggaaaacagcaaacgctggaatcccgaagttcagtacacttccaactacaacaagtctgttaatgtggactttactgtggacactaatggcgtgtattcagagcctcgccccattggcaccagatacctgactcgtaatcagtaa

SEQ ID NO: 579 - DNA, 2208 bp, Artificial Sequence
  source: /note="Description of Artificial Sequence: Synthetic polynucleotide"
atggctgccgatggttatcttccagattggctcgaggacactctctctgaaggaataagacagtggtggaagctcaaacctggcccaccaccaccaaagcccgcagagcggcataaggacgacagcaggggtcttgtgcttcctgggtacaagtacctcggacccttcaacggactcgacaagggagagccggtcaacgaggcagacgccgcggccctcgagcacgacaaagcctatgaccggcagctcgacagcggagacaacccgtacctcaagtacaaccacgccgacgcggagtttcaggagcgccttaaagaagatacgtcttttgggggcaacctcggacgagcagtcttccaggcgaaaaagagggttcttgaacctctgggcctggttgaggaacctgttaagacggctccgggaaaaaagaggccggtagagcactctcctgtggagccagactcctcctcgggaaccggaaaggcgggccagcagcctgcaagaaaaagattgaattttggtcagactggagacgcagactcagtacctgatccccagcctctcggacagccaccagcagccccctctggtctgggaactaatacgatggctacaggcagtggcgcaccaatggcagacaataacgagggcgccgacggagtgggtaattcctcgggaaattggcattgcgattccacatggatgggcgacagagtcatcaccaccagcacccgaacctgggccctgcccacctacaacaaccacctctacaaacaaatttccagccaatcaggagcctcgaacgacaatcactactttggctacagcaccccttgggggtattttgacttcaacagattccactgccacttttcaccacgtgactggcaaagactcatcaacaacaactggggattccgacccaagagactcaagttcaagctctttaacattcaagtcaaagaggtcacgcagaatgacggtacgacgacgattgccaataaccttaccagcacggttcaggtgtttactgactcggagtaccagctcccgtatgtcctcggctcggcgcatcaaggatgcctcccgccgttcccagcagacgtcttcatggtgccacagtatggatacctcaccctgaacaacgggagtcaggcagtaggacgctcttcattttactgcctggagtactttccttctcagatgctgcgtaccggtaacaactttaccttcagctacacttttgaggacgttcctttccacagcagctacgctcacagccagagtctggaccgtctcatgaatcctctcatcgaccagtacctgtattacttgagcagaacagacactccaagtggaaccaccacgcagtcaaggcttcagttttctcaggccggagcgagtgacattcgggaccagtctaggaactggcttcctggaccctgttaccgccagcagcgagtatcaaagacatctgcggataacaacaacagtgaatactcgtggactggagctaccaagtaccacctcaatggcagagactctctggtgaatccgggcccggccatggcaagccacaaggacgatgaagaaaagttttttcctcagagcggggttctcatctttgggaagcaaggctcagagaaaacaagtgtggacattgaaaaggtcatgattacagacgaagaggaaatcaggacaaccaatcccgtggctacggagcagtatggttctgtatctaccaacctccagagaggcaacagacaagcagctaccgcagatgtcaacacacaaggcgttcttccaggcatggtctggcaggacagagatgtgtaccttcaggggcccatctgggcaaagattccacacacggacggacattttcacccctctcccctcatgggtggattcggacttaaacaccctcctccacagattctcatcaagaacaccccggtacctgcgaatccttcgaccaccttcagtgcggcaaagtttgcttccttcatcacacagtactccacgggacaggtcagcgtggagatcgagtgggagctgcagaaggaaaacagcaaacgctggaatcccgaagttcagtacacttccaactacaacaagtctgttaatgtggactttactgtggacactaatggcgtgtattcagagcctcgccccattggcaccagatacctgactcgtaatctgtaa

SEQ ID NO: 580 - protein, 735 aa, Artificial Sequence
  source: /note="Description of Artificial Sequence: Synthetic polypeptide"
MAADGYLPDWLEDTLSEGIRQWWKLKPGPPPPKPAERHKDDSRGLVLPGYKYLGPFNGLDKGEPVNEADAAALEHDKAYDRQLDSGDNPYLKYNHADAEFQERLKEDTSFGGNLGRAVFQAKKRVLEPLGLVEEPVKTAPGKKRPVEHSPVEPDSSSGTGKAGQQPARKRLNFGQTGDADSVPDPQPLGQPPAAPSGLGTNTMATGSGAPMADNNEGADGVGNSSGNWHCDSTWMGDRVITTSTRTWALPTYNNHLYKQISSQSGASNDNHYFGYSTPWGYFDFNRFHCHFSPRDWQRLINNNWGFRPKRLKFKLFNIQVKEVTQNDGTTTIANNLTSTVQVFTDSEYQLPYVLGSAHQGCLPPFPADVFMVPQYGYLTLNNGSQAVGRSSFYCLEYFPSQMLRTGNNFTFSYTFEDVPFHSSYAHSQSLDRLMNPLIDQYLYYLSRTDTPSGTTTQSRLQFSQAGASDIRDQSRNWLPGPCYRQQRVSKTSADNNNSEYSWTGATKYHLNGRDSLVNPGPAMASHKDDEEKFFPQSGVLIFGKQGSEKTSVDIEKVMITDEEEIRTTNPVATEQYGSVSTNLQRGNRQAATADVNTQGVLPGMVWQDRDVYLQGPIWAKIPHTDGHFHPSPLMGGFGLKHPPPQILIKNTPVPANPSTTFSAAKFASFITQYSTGQVSVEIEWELQKENSKRWNPEVQYTSNYNKSVNVDFTVDTNGVYSEPRPIGTRYLTRNL

SEQ ID NO: 581 - DNA, 2601 bp, Artificial Sequence
  source: /note="Description of Artificial Sequence: Synthetic polynucleotide"
ccatcgacgtcagacgcggaagcttcgatcaactacgcggacaggtaccaaaacaaatgttctcgtcacgtgggcatgaatctgatgctgtttccctgcagacaatgcgagagactgaatcagaattcaaatatctgcttcactcacggtgtcaaagactgtttagagtgctttcccgtgtcagaatctcaacccgtttctgtcgtcaaaaaggcgtatcagaaactgtgctacattcatcacatcatgggaaaggtgccagacgcttgcactgcttgcgacctggtcaatgtggacttggatgactgtgtttctgaacaataaatgacttaaaccaggtatgactgccgatggttatcttccagattggctcgaggacaaccttagtgaaggaattcgcgagtggtgggctttgaaacctggagcccctcaacccaaggcaaatcaacaacatcaagacaacgctcgaggtcttgtgcttccgggttacaaataccttggacccggcaacggactcgacaagggggagccggtcaacgcagcagacgcggcggccctcgagcacgacaaggcctacgaccagcagctcaaggccggagacaacccgtacctcaagtacaaccacgccgacgccgagttccaggagcggctcaaagaagatacgtcttttgggggcaacctcgggcgagcagtcttccaggccaaaaagaggcttcttgaacctcttggtctggttgaggaagcggctaagacggctcctggaaagaagaggcctgtagagcagtctcctcaggaaccggactcctccgcgggtattggcaaatcgggtgcacagcccgctaaaaagagactcaatttcggtcagactggcgacacagagtcagtcccagaccctcaaccaatcggagaacctcccgcagccccctcaggtgtgggatctcttacaatggcttcaggtggtggcgcaccagtggcagacaataacgaaggtgccgatggagtgggtagttcctcgggaaattggcattgcgattcccaatggctgggggacagagtcatcaccaccagcacccgaacctgggccctgcccacctacaacaatcacctctacaagcaaatctccaacagcacatctggaggatcttcaaatgacaacgcctacttcggctacagcaccccctgggggtattttgacttcaacagattccactgccacttctcaccacgtgactggcagcgactcatcaacaacaactggggattccggcctaagcaactcaacttcaagctcttcaacattcaggtcaaagaggttacggacaacaatggagtcaagaccatcgccaataaccttaccagcacggtccaggtcttcacggactcagactatcagctcccgtacgtgctcgggtcggctcacgagggctgcctcccgccgttcccagcggacgttttcatgattcctcagtacgggtatctgacgcttaatgatggaagccaggccgtgggtcgttcgtccttttactgcctggaatatttcccgtcgcaaatgctaagaacgggtaacaacttccagttcagctacgagtttgagaacgtacctttccatagcagctacgctcacagccaaagcctggaccgactaatgaatccactcatcgaccaatacttgtactatctctcaaagactattaacggttctggacagaatcaacaaacgctaaaattcagtgtggccggacccagcaacatggctgtccagggaagaaactacatacctggacccagctaccgacaacaacgtgtctcaaccactgtgactcaaaacaacaacagcgaatttgcttggcctggagcttcttcttgggctctcaatggacgtaatagcttgatgaatcctggacctgctatggccagccacaaagaaggagaggaccgtttctttcctttgtctggatctttaatttttggcaaacaaggaactggaagagacaacgtggatgcggacaaagtcatgataaccaacgaagaagaaattaaaactactaacccggtagcaacggagtcctatggacaagtggccacaaaccaccagagtgcccaagcacaggcgcagaccggctgggttcaaaaccaaggaatacttccgggtatggtttggcaggacagagatgtgtacctgcaaggacccatttgggccaaaattcctcacacggacggcaactttcacccttctccgctgatgggagggtttggaatgaagcacccgcctcctcagatcctcatcaaaaacacacctgtacctgcggatcctccaacggccttcaacaaggacaagctgaactctttcatcacccagtattctactggccaagtcagcgtggagatcgagtgggagctgcagaaggaaaacagcaagcgctggaacccggagatccagtacacttccaactattacaagtctaataatgttgaatttgctgttaatactgaaggtgtatatagtgaaccccgccccattggcaccagatacctgactcgtaatctgtaattgcttgttaatcaataaaccgtttaattcgtttcagttgaactgcggcc

SEQ ID NO: 582 - DNA, 2601 bp, Artificial Sequence
  source: /note="Description of Artificial Sequence: Synthetic polynucleotide"
ccatcgacgtcagacgcggaagcttcgatcaactacgcggacaggtaccaaaacaaatgttctcgtcacgtgggcatgaatctgatgctgtttccctgcagacaatgcgagagactgaatcagaattcaaatatctgcttcactcacggtgtcaaagactgtttagagtgctttcccgtgtcagaatctcaacccgtttctgtcgtcaaaaaggcgtatcagaaactgtgctacattcatcacatcatgggaaaggtgccagacgcttgcactgcttgcgacctggtcaatgtggacttggatgactgtgtttctgaacaataaatgacttaaaccaggtatggctgccgatggttatcttccagattggctcgaggacaaccttagtgaaggaattcgcgagtggtgggctttgaaacctggagcccctcaacccaaggcaaatcaacaacatcaagacaacgctcgaggtcttgtgcttccgggttacaaataccttggacccggcaacggactcgacaagggggagccggtcaacgcagcagacgcggcggccctcgagcacgacaaggcctacgaccagcagctcaaggccggagacaacccgtacctcaagtacaaccacgccgacgccgagttccaggagcggctcaaagaagatacgtcttttgggggcaacctcgggcgagcagtcttccaggccaaaaagaggcttcttgaacctcttggtctggttgaggaagcggctaagacggctcctggaaagaagaggcctgtagagcagtctcctcaggaaccggactcctccgcgggtattggcaaatcgggtgcacagcccgctaaaaagagactcaatttcggtcagactggcgacacagagtcagtcccagaccctcaaccaatcggagaacctcccgcagccccctcaggtgtgggatctcttacaatggcttcaggtggtggcgcaccagtggcagacaataacgaaggtgccgatggagtgggtagttcctcgggaaattggcattgcgattcccaatggctgggggacagagtcatcaccaccagcacccgaacctgggccctgcccacctacaacaatcacctctacaagcaaatctccaacagcacatctggaggatcttcaaatgacaacgcctacttcggctacagcaccccctgggggtattttgacttcaacagattccactgccacttctcaccacgtgactggcagcgactcatcaacaacaactggggattccggcctaagcgactcaacttcaagctcttcaacattcaggtcaaagaggttacggacaacaatggagtcaagaccatcgccaataaccttaccagcacggtccaggtcttcacggactcagactatcagctcccgtacgtgctcgggtcggctcacgagggctgcctcccgccgttcccagcggacgttttcatgattcctcagtacgggtatctgacgcttaatgatggaagccaggccgtgggtcgttcgtccttttactgcctggaatatttcccgtcgcaaatgctaagaacgggtaacaacttccagttcagctacgagtttgagaacgtacctttccatagcagctacgctcacagccaaagcctggaccgactaatgaatccactcatcgaccaatacttgtactatctctcaaagactattaacggttctggacagaatcaacaaacgctaaaattcagtgtggccggacccagcaacatggctgtccagggaagaaactacatacctggacccagctaccgacaacaacgtgtctcaaccactgtgactcaaaacaacaacagcgaatttgcttggcctggggcttcttcttgggctctcaatggacgtaatagcttgatgaatcctggacctgctatggccagccacaaagaaggagaggaccgtttctttcctttgtctggatctttaatttttggcaaacaaggaactggaagagacaacgtggatgcggacaaagtcatgataaccaacgaagaagaaattaaaactactaacccggtagcaacggagtcctatggacaagtggccacaaaccaccagagtgcccaagcacaggcgcagaccggctgggttcaaaaccaaggaatacttccgggtatggtttggcaggacagagatgtgtacctgcaaggacccatttgggccaaaattcctcacacgggcggcaactttcacccttctccgctgatgggagggtttggaatgaagcacccgcctcctcagatcctcatcaaaaacacacctgtacctgcggatcctccaacggccttcaacaaggacaagctgaactctttcatcacccagtattctactggccaagtcagcgtggagatcgagtgggagctgcagaaggaaaacagcaagcgctggaacccggagatccagtacacttccaactattacaagtctaataatgttgaatttgctgttaatactggaggtgtatatagtgaaccccgccccattggcaccagatacctgactcgtaatctgtaattgcttgttaatcaataaaccgtttaattcgtttcagttgaactgcggcc

SEQ ID NO: 583 - DNA, 2601 bp, Artificial Sequence
  source: /note="Description of Artificial Sequence: Synthetic polynucleotide"
ccatcgacgtcagacgcggaagcttcgatcaactacgcggacaggtaccaaaacaaatgttctcgtcacgtgggcatgaatctgatgctgtttccctgcagacaatgcgagagactgaatcagaattcaaatatctgcttcactcacggtgtcaaagactgtttagagtgctttcccgtgtcagaatctcaacccgtttctgtcgtcaaaaaggcgtatcagaaactgtgctacattcatcacatcatgggaaaggtgccagacgcttgcactgcttgcgacctggtcaatgtggactcggatgactgtgtttctgaacaataaatgacttaaaccaggtatggctgccgatggttatcttccagattggctcgaggacaaccttagtgaaggaattcgcgagtggtgggctttgaaacctggagcccctcaacccaaggcaaatcaacaacatcaagacaacgctcgaggtcttgtgcttccgggttacaaataccttggacccggcaacggactcgacaagggggagccggtcaacgcagcagacgcggcggccctcgagcacgacaaggcctacgaccagcagctcaaggccggagacaacccgtacctcaagtacaaccacgccgacgccgagttccaggagcggctcaaagaagatacgtcttttgggggcaacctcgggcgagcagtcttccaggccaaaaagaggcttcttgaacctcttggtctggttgaggaagcggctaagacggctcctggaaagaagaggcctgtagagcagtctcctcaggaaccggactcctccgcgggtattgacaaatcgggtgcacagcccgctaaaaagagactcaatttcggtcagactggcgacacagagtcagtcccagaccctcaaccaatcggagaacctcccgcagccccctcaggtgtgggatctcttacaatggcttcaggtggtggcgcaccagtggcagacaataacgaaggtgccgatggagtgggtagttcctcgggaaattggcattgcgattcccaatggctgggggacagagtcatcaccaccagcacccgaacctgggccctgcccacctacaacaatcacctctacaagcaaatctccaacagcacatctggaggatcttcaaatgacaacgcctacttcggctacagcaccccctgggggtattttgacttcaacagattccactgccacttctcaccacgtgactggcagcgactcatcaacaacaactggggattccggcctaagcgactcaacttcaagctcttcaacattcaggtcaaagaggttacggacaacaatggagtcaagaccatcgccaataaccttaccagcacggtccaggtcttcacggactcggactatcagctcccgtacgtgctcgggtcggctcacgagggctgcctcccgccgttcccagcggacgttttcatgattcctcagtacgggtatctgacgcttaatgatggaagccaggccgtgggtcgttcgtccttttactgcctggaatatttcccgtcgcaaatgctaagaacgggtaacaacttccagttcagctacgagtttgagaacgtacctttccatagcagctacgctcacagccaaagcctggaccgactaatgaatccactcatcgaccaatacttgtactatctctcaaagactattaacggttctggacagaatcaacaaacgctaaaattcagtgtggccggacccagcaacatggctgtccagggaagaaactacatacctggacccagctaccgacaacaacgtgtctcaaccactgtgactcaaaacaacaacagcgaatttgcttggcctggagcttcttcttgggctctcaatggacgtaatagcttgatgaatcctggacctgctatggccagccacaaagaaggagaggaccgtttctttcctttgtctggatctttaatttttggcaaacaaggaactggaagagacaacgtggatgcggacaaagtcatgataaccaacgaagaagaaattaaaactactaacccggtagcaacggagtcctatggacaagtggccacaaaccaccagagtgcccaagcacaggcgcagaccggctgggttcaaaaccaaggaatacttccgggtatggtttggcaggacagagatgtgtacctgcaaggacccatttgggccaaaattcctcacacggacggcaactttcacccttctccgctgatgggagggtttggaatgaagcacccgcctcctcagatcctcatcaaaaacacacctgtacctgcggatcctccaacggccttcaacaaggacaagctgaactctttcatcacccagtattctactggccaagtcagcgtggagatcgagtgggagctgcagaaggaaaacagcaagcgctggaacccggagatccagtacacttccaactattacaagtctaataatgttgaatttgctgttaatactgaaggtgtatatagtgaaccccgccccattggcaccagatacctgactcgtaatctgtaattgcttgttaatcaataaaccgtttaattcgtttcagttgaactgcggcc

SEQ ID NO: 584 - DNA, 2601 bp, Artificial Sequence
  source: /note="Description of Artificial Sequence: Synthetic polynucleotide"
ccatcgacgtcagacgcggaagcttcgatcaactacgcggacaggtaccaaaacaaatgttctcgtcacgtgggcatgaatctgatgctgtttccctgcagacaatgcgagagactgaatcagaattcaaatatctgcttcactcacggtgtcaaagactgtttagagtgctttcccgtgtcagaatctcaacccgtttctgtcgtcaaaaaggcgtatcagaaactgtgctacattcatcacatcatgggaaaggtgccagacgcttgcactgcttgcgacctggtcaatgtggacttggatgactgtgtttctgaacaataaatgacttaaaccaggtatggctgccgatggttatcttccagattggctcgaggacaaccttagtgaaggaattcgcgagtggtgggctttgaaacctggagcccctcaacccaaggcaaatcaacaacatcaagacaacgctcgaggtcttgtgcttccgggttacaaataccttggacccggcaacggactcgacaagggggagccggtcaacgcagcagacgcggcggccctcgagcacgacaaggcctacgaccagcagctcaaggccggagacaacccgtacctcaagtacaaccacgccgacgccgagttccaggagcggctcaaagaagatacgtcttttgggggcaacctcgggcgagcagtcctccaggccaaaaagaggcttcttgaacctcttggtctggttgaggaagcggctaagacggctcctggaaagaagaggcctgtagagcagtctcctcaggaaccggactcctccgcgggtattggcaaatcgggtgcacagcccgctaaaaagagactcaatttcggtcagactggcgacacagagtcagtcccagaccctcaaccaatcggagaacctcccgcagccccctcaggtgtgggatctcttacaatggcttcaggtggtggcgcaccagtggcagacaataacgaaggtgccgatggagtgggtagttcctcgggaaattggcattgcgattcccaatggctgggggacagagtcatcaccaccagcacccgaacctgggccctgcccacctacaacaatcacctctacaagcaaatctccaacagcacatctggaggatcttcaaatgacaacgcctacttcggctacagcaccccctgggggtattttgacttcaacagattccactgccacttctcaccacgtgactggcagcgactcatcaacaacaactggggattccggcctaagcgactcaacttcaagctcttcaacattcaggtcaaagaggttacggacaacaatggagtcaagaccatcgccaataaccttaccagcacggtccaggtcttcacggactcagactatcagctcccgtacgtgctcgggtcggctcacgagggctgcctcccgccgttcccagcggacgttttcatgattcctcagtacgggtatctgacgcttaatgatggaagccaggccgtgggtcgttcgtccttttactgcctggaatatttcccgtcgcaaatgctaagaacgggtaacaacttccagttcagctacgagtttgagaacgtacctttccatagcagctacgctcacagccaaagcctggaccgactaatgaatccactcatcgaccaatacttgtactatctctcaaagactattaacggttctggacagaatcaacaaacgctaaaattcagtgtggccggatccagcaacatggctgtccagggaagaaactacatacctggacccagctaccgacaacaacgtgtctcaaccactgtgactcaaaacaacaacagcgaatttgcttggcctggagcttcttcttgggctctcaatggacgtaatagcttgatgaatcctggacctgctatggccagccacaaagaaggagaggaccgtttctttcctttgtctggatctttaatttttggcaaacaaggaactggaagagacaacgtggatgcggacaaagtcatgataaccaacgaagaagaaattaaaactactaacccggtagcaacggagtcctatggacaagtggccacaaaccaccagagtgcccaagcacaggcgcagaccggctgggttcaaaaccaaggaatacttccaggtatggtttggcaggacagagatgtgtacctgcaaggacccatttgggccaaaattcctcacacggacggcaactttcacccttctccgctgatgggagggtttggaatgaagcacccgcctcctcagatcctcatcaaaaacacacctgtacctgcggatcctccaacggccttcaacaaggacaagctgaactctttcatcacccagtattctactggccaagtcagcgtggagatcgagtgggagctgcagaaggaaaacagcaagcgctggaacccggagatccagtacacttccaactattacaagtctaataatgttgaatttgctgttaatactgaaggtgtatatagtgaaccccgccccattggcaccagatacctgactcgtaatctgtaattgcttgttaatcaataaaccgtttaattcgtttcagttgaactgcggcc

SEQ ID NO: 585 - DNA, 2601 bp, Artificial Sequence
  source: /note="Description of Artificial Sequence: Synthetic polynucleotide"
ccatcgacgtcagacgcggaagcttcgatcaactacgcggacaggtaccaaaacaaatgttctcgtcacgtgggcatgaatctgatgctgtttccctgcagacaatgcgagagactgaatcagaattcaaatatctgcttcactcacggtgtcaaagactgtttagagtgctttcccgtgtcagaatctcaacccgtttctgtcgtcaaaaaggcgtatcagaaactgtgctacattcatcacatcatgggaaaggtgccagacgcttgcactgcttgcgacctggtcaatgtggacttggatgactgtgtttctgaacaataaatgacttaaaccaggtatggctgccgatggttatcttccagattggctcgaggacaaccttagtgaaggaattcgcgagtggtgggctttgaaacctggagcccctcaacccaaggcaaatcaacaacatcaagacaacgctcgaggtcttgtgcttccgggttacaaataccttggacccggcaacggactcgacaagggggagccggtcaacgcagcagacgcggcggccctcgagcacgacagggcctacgaccagcagctcaaggccggagacaacccgtacctcaagtacaaccacgccgacgccgagttccaggagcggctcaaagaagatacgtcttttgggggcaacctcgggcgagcagtcttccaggccaaaaagaggcttcttgaacctcttggtctggttgaggaagcggctaagacggctcctggaaagaagaggcctgtagagcagtctcctcaggaaccggactcctccgcgggtattggcaaatcgggtgcacagcccgctaaaaagagactcaatttcggtcagactggcgacacagagtcagtcccagaccctcaaccaatcggagaacctcccgcagccccctcaggtgtgggatctcttacaatggcttcaggtggtggcgcaccagtggcagacaataacgaaggtgccgatggagtgggtagttcctcgggaaattggcattgcgattcccaatggctgggggacagagtcatcaccaccagcacccgaacctgggccctgcccacctacaacaatcacctctacaagcaaatctccaacagcacatctggaggatcttcaaatgacaacgcctacttcggctacagcaccccctgggggtattttgacttcaacagattccactgccacttctcaccacgtgactggcagcgactcatcaacaacaactggggattccggcctaagcgactcaacttcaagctcttcaacattcaggtcaaagaggttacggacaacaatggagtcaagaccatcgccaataaccttaccagcacggtccaggtcttcacggactcagactatcagctcccgtacgtgctcgggtcggctcacgagggctgcctcccgccgttcccagcggacgttttcatgattcctcagtacgggtatctgacgcttaatgatggaagccaggccgtgggtcgttcgtccttttactgcctggaatatttcccgtcgcaaatgctaagaacgggtaacaacttccagttcagctacgagtttgagaacgtacctttccatagcagctacgctcacagccaaagcctggaccgactaatgaatccactcatcgaccaatacttgtactatctctcaaagactattaacggttctggacagaatcaacaaacgctaaaattcagtgtggccggacctagcaacatggctgtccagggaagaaactacatacctggacccagctaccgacaacaacgtgtctcaaccactgtgactcaaaacaacaacagcgaatttgcttggcctggagcttcttcttgggctctcaatggacgtaatagcttgatgaatcctggacctgctatggccagccacaaagaaggagaggaccgtttctttcctttgtctggatctttaatttttggcaaacaaggaactggaagagacaacgtggatgcggacaaagtcatgataaccaacgaagaagaaattaaaactactaacccggtagcaacggagtcctatggacaagtggccacaaaccaccagagtgcccaagcacaggcgcagaccggctgggttcaaaaccaaggaatacttccgggtatggtttggcaggacagagatgtgtacctgcaaggacccatttgggccaaaattcctcacacggacggcaactttcacccttctccgctgatgggagggtttggaatgaagcacccgcctcctcagatcctcatcaaaaacacacctgtacctgcggatcctccaacggccttcaacaaggacaagctgaactctttcatcacccagtattctactggccaagtcagcgtggagatcgagtgggagctgcagaagaaaaacagcaagcgctggaacccggagatccagtacacttccaactattacaagtctaataatgttgaatttgctgttaacactgaaggtgtatatagtgaaccccgccccattggcaccagatacctgactcgtaatctgtaattgcttgttaatcaataaaccgtttaattcgtttcagttgaactgcggcc

SEQ ID NO: 586 - DNA, 2601 bp, Artificial Sequence
  source: /note="Description of Artificial Sequence: Synthetic polynucleotide"
ccatcgacgtcagacgcggaagcttcgatcaactacgcggacaggtaccaaaacaaatgttctcgtcacgtgggcatgaatctgatgctgtttccctgcagacaatgcgagagactgaatcagaattcaaatatctgcttcactcacggtgtcaaagactgtttagagtgctttcccgtgtcagaatctcaacccgtttctgtcgtcaaaaaggcgtatcagaaactgtgctacattcatcacatcatgggaaaggtgccagacgcttgcactgcttgcgacctggtcaatgtggacttggatgactgtgtttctgaacaataaatgacttaaaccaggtatggctgccgatggttatcttccagattggctcgaggacaaccttagtgaaggaattcgcgagtggtgggctttgaaacctggagcccctcaacccaaggcaaatcaacaacatcaagacaacgctcgaggtcttgtgcttccgggttacaaataccttggacccggcaacggactcgacaagggggagccggtcaacgcagcagacgcggcggccctcgagcacgacaaggcctacgaccagcagctcaaggccggagacaacccgtacctcaagtacaaccacgccgacgccgagttccaggagcggctcaaagaagatacgtcttttgggggcaacctcgggcgagcagtcttccaggccaaaaagaggcttcttgaacctcttggtctggttgaggaagcggctaagacggctcctggaaagaagaggcctgtagagcagtctcctcaggaaccggactcctccgcgggtattggcaaatcgggtgcacagcccgctaaaaagagactcaatttcggtcagactggcgacacagagtcagtcccagaccctcaaccaatcggagaacctcccgcagccccctcaggtgtgggatctcttacaatggcttcaggtggtggcgcaccagtggcagacaataacgaaggtgccgatggagtgggtagttcctcgggaaattggcattgcgattcccaatggctgggggacagagtcatcaccaccagcacccgaacctgggccctgcccacctacaacaatcacctctacaagcaaatctccaacagcacatctggaggatcttcaaatgacaacgcctacttcggctacagcaccccctgggggtattttgacttcaacagattccactgccacttctcaccacgtgactggcagcgactcatcaacaacaactggggattccggcctaagcgactcaacttcaagctcttcaacattcaggtcaaagaggttacggacaacaatggagtcaagaccatcgccaataaccttaccagcacggtccaggtcttcacggactcagactatcagctcccgtacgtgctcgggtcggctcacgagggctgcctcccgccgttcccagcggacgttttcatgattcctcagtacgggtatctgacgcttaatgatggaagccaggccgtgggtcgttcgtccttttactgcctggaatatttcccgtcgcaaatgctaagaacgggtaacaacttccagttcagctacgagtttgagaacgtacctttccatagcagctacgctcacagccaaagcctggaccgactaatgaatccactcatcgaccaatacttgtactatctctcaaagactattaacggttctggacagaatcaacaaacgctaaaattcagtgtggccggacccagcaacatggctgtccagggaagaaactacatacctggacccagctaccgacaacaacgtgtctcaaccactgtgactcaaaacaacaacagcgaatttgcttggcctggagcttcttcttgggctctcaatggacgtaatagcttgatgaatcctggacctgctatggccagccacaaagaaggagaggaccgtttctttcctttgtctggatctttaatttttggcaaacaaggaactggaagagacaacgtggatgcggacaaagtcatgataaccaacgaagaagaaattaaaactactaacccggtagcaacggagtcctatggacaagtggccacaaaccaccagagtgcccaagcacgggcgcagaccggctgggttcaaaaccaaggaatacttccgggtatggtttggcaggacagagatgtgtacctgcaaggacccatttgggccaaaattcctcacacggacggcaactttcacccttctccgctgatgggagggtttggaatgaagcacccgcctcctcagatcctcatcaaaaacacacctgtacctgcggatcctccaacggccttcaacaaggacaagctgaactctttcatcacccagtattctactggccaagtcagcgtggagatcgagtgggagctgcagaaggaaaacagcaagcgctggaacccggagatccagtacacttccaactattacaagtctaataatgttgaatttgctgttaatactgaaggtgtatatagtgaaccccgccccattggcaccagatacctgactcgtaatctgtaattgcttgttaatcaataaaccgtttaattcgtttcagttgaactgcggcc

SEQ ID NO: 587 - DNA, 2601 bp, Artificial Sequence
  source: /note="Description of Artificial Sequence: Synthetic polynucleotide"
ccatcgacgtcagacgcggaagcttcgatcaactacgcggacaggtaccaaaacaaatgttctcgtcacgtgggcatgaatctgatgctgtttccctgcagacaatgcgagagactgaatcagaattcaaatatctgcttcactcacggtgtcaaagactgtttagagtgctttcccgtgtcagaatctcaacccgtttctgtcgtcaaaaaggcgtatcagaaactgtgctacattcatcacatcatgggaaaggtgccagacgcttgcactgcttgcgacctggtcaatgtggacttggatgactgtgtttctgaacaataaatgacttaaaccaggtatggctgccgatggttatcttccagattggctcgaggacaaccttagtgaaggaattcgcgagtggtgggctttgaaacctggagcccctcaacccaaggcaaatcaacaacatcaagacaacgctcgaggtcttgtgcttccgggttacaaataccttggacccggcaacggactcgacaagggggagccggtcaacgcagtagacgcggcggccctcgagcacgacaaggcctacgaccagcagctcaaggccggagacaacccgtacctcaagtacaaccacgccgacgccgagttccaggagcggctcaaagaagatacgtcttttgggggcaacctcgggcgagcagtcttccaggccaaaaagaggcttcttgaacctcttggtctggttgaggaagcggctaagacggctcctggaaagaagaggcctgtagagcagtctcctcaggaaccggactcctccgcgggtattggcaaatcgggtgcacagcccgctaaaaagagactcaatttcggtcagactggcgacacagagtcagtcccagaccctcaaccaatcggagaacctcccgcagccccctcaggtgtgggatctcttacaatggcttcaggtggtggcgcaccagtggcagacaataacgaaggtgccgatggagtgggtagttcctcgggaaattggcattgcgattcccaatggctgggggacagagtcatcaccaccagcacccgaacctgggccctgcccacctacaacaatcacctctacaagcaaatctccaacagcacatctggaggatcttcaaatgacaacgcctacttcggctacagcaccccctgggggtattttgacttcaacagattccactgccacttctcaccacgtgactggcagcgactcatcaacaacaactggggatttcggcctaagcgactcaacttcaagctcttcaacattcaggtcaaagaggttacggacaacaatggagtcaagaccatcgccaataaccttaccagcacggtccaggtcttcacggactcagactatcagctcccgtacgtgctcgggtcggctcacgagggctgcctcccgccgttcccagcggacgttttcatgattcctcagtacgggtatctgacgcttaatgatggaagccaggccgtgggtcgttcgtccttttactgcctggaatatttcccgtcgcaaatgctaagaacgggtaacaacttccagttcagctacgagtttgagaacgtacctttccatagcagctacgctcacagccaaagcctggaccgactaatgaatccactcatcgaccaatacttgtactatctctcaaagactattaacggttctggacagaatcaacaaacgctaaaattcagtgtggccggacccagcaacatggctgtccagggaagaaactacatacctggacccagctaccgacaacaacgtgtctcaaccactgtgactcaaaacaacaacagcgaatttgcttggcctggagcttcttcttgggctctcaatggacgtaatagcttgatgaatcctggacctgctatggccagccacaaagaaggagaggaccgtttctttcctttgtctggatctttaatttttggcaaacaaggaactggaagagacaacgtggatgcggacaaagtcatgataaccaacgaagaagaaattaaaactactaacccggtagcaacggagtcctatggacaagtggccacaaaccaccagagtgcccaagcacaggcgcagaccggctgggttcaaaaccaaggaatacttccgggtatggtttggcaggacagagatgtgtacctgcaaggacccatttgggccaaaattcctcacacggacggcaactttcacccttctccgctgatgggagggtttggaatgaagcacccgcctcctcagatcctcatcaaaaacacacctgtacctgcggatcctccaacggccttcaacaaggacaagctgaactctttcatcacccagtattctactggccaagtcagcgtggagatcgagtgggagctgcagaaggaaaacagcaagcgctggaacccggagatccagtacacttccaactattacaagtctaataatgttgaatttgctgttaatactgaaggtgtatatagtgaaccccgccccattggcaccagatacctgactcgtaatctgtaattgcttgttaatcaataaaccgtttaattcgtttcagttgaactgcggcc

SEQ ID NO: 588 - DNA, 2580 bp, Artificial Sequence
  source: /note="Description of Artificial Sequence: Synthetic polynucleotide"
ccatcgacgtcagacgcggaagcttcgatcaactacgcggacaggtaccaaaacaaatgttctcgtcacgtgggcatgaatctgatgctgtttccctgcagacaatgcgagagactgaatcagaattcaaatatctgcttcactcacggtgtcaaagactgtttagagtgctttcccgtgtcagaatctcaacccgtttctgtcgtcaaaaaggcgtatcagaaactgtgctacattcatcacatcatgggaaaggtgccagacgcttgcactgcttgcgacctggtcaatgtggacttggatgactgtgtttctgaacaataaatgacttaaaccaggtatggctgccgatggttatcttccagattggctcgaggacaaccttagtgaaggaattcgcgagtggtgggctttgaaacctggagcccctcaacccaaggcaaatcaacaacatcaagacaacgctcgaggtcttgtgcttccgggttacaaataccttggacccggcaacggactcgacaagggggagccggtcaacgcagcagacgcggcggccctcgagcacgacaaggcctacgaccagcagctcaaggccggagacaacccgtacctcaagtacaaccacgccgacgccgagttccaggagcggctcaaagaagatacgtcttttgggggcaacctcgggcgagcagtcttccaggccaaaaagaggcttcttgaacctcttggtctggttgaggaagcggctaagacggctcctggaaagaagaggcctgtagagcagtctcctcgggaaccggactcctccgcgggtattggcaaatcgggtgcacagcccgctaaaaagagactcaatttcggtcagactggcgacacagagtcagtcccagaccctcaaccaatcggagaacctcccgcagccccctcaggtgtgggatctcttacaatggcttcaggtggtggcgcaccagtggcagacaataacgaaggtgccgatggagtgggtagttcctcgggaaattggcattgcgattcccaatggctgggggacagagtcatcaccaccagcacccgaacctgggccctgcccacctacaacaatcacctctacaagcaaatctccaacagcacatctggaggatcttcaaatgacaacgcctacttcggctacagcaccccctgggggtattttgacttcaacagattccactgccacttctcaccacgtgactggcagcgactcatcaacaacaactggggattccggcctaagcgactcaacttcaagctcttcaacattcaggtcaaagaggttacggacaacaatggagtcaagaccatcgccaataaccttaccagcacggtccaggtcttcacggactcagactatcagctcccgtacgtgctcgggtcggctcacgagggctgcctcccgccgttcccagcggacgttttcatgattcctcagtacgggtatctgacgcttaatgatggaagccaggccgtgggtcgttcgtccttttactgcctggaatatttcccgtcgcaaatgctaagaacgggtaacaacttccagttcagctacgagtttgagaacgtacctttccatagcagctacgctcacagccaaagcctggaccgactaatgaatccactcatcgaccaatacttgtactatctctcaaagactattaacggttctggacagaatcaacaaacgctaaaattcagtgtggccggacccagcaacatggctgtccagggaagaaactacatacctggacccagctaccgacaacaacgtgtctcaaccactgtgactcaaaacaacaacagcgaatttgcttggcctggagcttcttcttgggctctcaatggacgtaatagcttgatgaatcctggacctgctatggccagccacaaagaaggagaggaccgtttctttcctttgtctggatctttaatttttggcaaacaaggaactggaagagacaacgtggatgcggacaaagtcatgataaccaacgaagaagaaattaaaactactaacccggtagcaacggagtcctatggacaagtggccacaaaccaccagagtgcccaagcacaggcgcagaccggctgggttcaaaaccaaggaatacttccgggtatggtttggcaggacagagatgtgtacctgcaaggacccatttgggccaaaattcctcacacggacggcaactttcacccttctccgctgatgggagggtttggaatgaagcacccgcctcctcagatcctcatcaaaaacacacctgtacctgcggatcctccaacggccttcaacaaggacaagctgaactctttcatcacccagtattctactggccaagtcagcgtggagatcgagtgggaactgcagaaggaaaacagcaagcgctggaacccggagatccagtacacttccaactattacaagtctaataatgttgaatttgctgttaatactgaaggtgtatatagtgaaccccgccccattggcaccagatacctgactcgtaatctgtaattgcttgttaatcaataaaccgtttaatt

SEQ ID NO: 589 - DNA, 2601 bp, Artificial Sequence
  source: /note="Description of Artificial Sequence: Synthetic polynucleotide"
ccatcgacgtcagacgcggaagcttcgatcaactacgcggacaggtaccaaaacaaatgttctcgtcacgtgggcatgaatctgatgctgtttccctgcagacaatgcgagagactgaatcagaattcaaatatctgcttcactcacggtgtcaaagactgtttagagtgctttcccgtgtcagaatctcaacccgtttctgtcgtcaaaaaggcgtatcagaaactgtgctacattcatcacatcatgggaaaggtgccagacgcttgcactgcttgcgacctggtcaatgtggacttggatgactgtgtttctgaacaataaatgacttaaaccaggtatggctgccgatggttatcttccagattggctcgaggacaaccttagtgaaggaattcgcgagtggtgggctttgaaacctggagcccctcaacccaaggcaaatcaacaacatcaagacaacgctcgaggtcttgtgcttccgggttacaaataccttggacccggcaacggactcgacaagggggagccggtcaacgcagcagacgcggcggccctcgagcacgacaaggcctacgaccagcagctcaaggccggagacaacccgtacctcaagtacaaccacgccgacgccgagttccaggagcggctcaaagaagatacgtcttttgggggcaacctcgggcgagcagtctttcaggccaaaaagaggcttcttgaacctcttggtctggttgaggaagcggctaagacggctcctggaaagaagaggcctgtagagcagtctcctcaggaaccggactcctccgcgggtattggcaaatcgggtgcacagcccgctaaaaagagactcaatttcggtcagactggcgacacagagtcagtcccagaccctcaaccaatcggagaacctcccgcagccccctcaggtgtgggatctcttacaatggcttcatgtggtggcgcaccagtggcagacaataacgaaggtgccgatggagtgggtagttcctcgggaaattggcattgcgattcccaatggctgggggacagagtcatcaccaccagcacccgaacctgggccctgcccacctacaacaatcacctctacaagcaaatctccaacagcacatctggaggatcttcaaatgacaacgcctacttcggctacagcaccccctgggggtattttgacttcaacagattccactgccacttctcaccacgtgactggcagcgactcatcaacaacaactggggattccggcctaagcgactcaacttcaagctcttcaacattcaggtcaaagaggttacggacaacaatggagtcaagaccatcgccaataaccttaccagcacggtccaggtcttcacggactcagactatcagctcccgtacgtgctcgggtcggctcacgagggctgcctcccgccgttcccagcggacgttttcatgattcctcagtacgggtatctgacgcttaatgatggaagccaggccgtgggtcgttcgtccttttactgcctggaatatttcccgtcgcaaatgctaagaacgggtaacaacttccagttcagctacgagtttgagaacgtacctttccatagcagctacgctcacagccaaagcctggaccgactaatgaatccactcatcgaccaatacttgtactatctctcaaagactattaacggttctggacagaatcaacaaacgctaaaattcagtgtggccggacccagcaacatggctgtccagggaagaaactacatacctggacccagctaccgacaacaacgtgtctcaaccactgtgactcaaaacaacaacagcgaatttgcttggcctggagcttcttcttgggctctcaatggacgtaatagcttgatgaatcctggacctgctatggccagccacaaagaaggagaggaccgtttctttcctttgtctggatctttaatttttggcaaacaaggaactggaagagacaacgtggatgcggacaaagtcatgataaccaacgaagaagaaattaaaactactaacccggtagcaacggagtcctatggacaagtggccacaaaccaccagagtgcccaagcacaggcgcagaccggctgggttcaaaaccaaggaatacttccgggtatggtttggcaggacagagatgtgtacctgcaaggacccatttgggccaaaattcctcacacggacggcaactttcacccttctccgctgatgggagggtttggaatgaagcacccgcctcctcagatcctcatcaaaaacacacctgtacctgcggatcctccaacggccttcaacaaggacaagctgaactctttcatcacccagtattctactggccaagtcagcgtggagatcgagtgggagctgcagaaggaaaacagcaagcgctggaacccggagatccagtacacttccaactattacaagtctaataatgttgaatttgctgttaatactgaaggtgtatatagtgaaccccgccccattggcaccagatacctgactcgtaatctgtaattgcttgttaatcaataaaccgtttaattcgtttcagttgaactgcggcc

SEQ ID NO: 590 - DNA, 2601 bp, Artificial Sequence
  source: /note="Description of Artificial Sequence: Synthetic polynucleotide"
ccatcgacgtcagacgcggaagcttcgatcaactacgcggacaggtaccaaaacaaatgttctcgtcacgtgggcatgaatctgatgctgtttccctgcagacaatgcgagagactgaatcagaattcaaatatctgcttcactcacggtgtcaaagactgtttagagtgctttcccgtgtcagaatctcaacccgtttctgtcgtcaaaaaggcgtatcagaaactgtgctacattcatcacatcatgggaaaggtgccagacgcttgcactgcttgcgacctggtcaatgtggacttggatgactgtgtttctgaacaataaatgacttaaaccaggtatggctgccgatggttatcttccagattggctcgaggacaaccttagtgaaggaattcgcgagtggtgggctttgaaacctggagcccctcaacccaaggcaaatcaacaacatcaagacaacgctcgaggtcttgtgcttccgggttacaaataccttggacccggcaacggactcgacaagggggagccgatcaacgcagcagacgcggcggccctcgagcacgacaaggcctacgaccagcagctcaaggccggagacaacccgtacctcaagtacaaccacgccgacgccgagttccaggagcggctcaaagaagatacgtcttttgggggcaacctcgggcgagcagtcttccaggccaaaaagaggcttcttgaacctcttggtctggttgaggaagcggctaagacggctcctggaaagaagaggcctgtagagcagtctcctcaggaaccggactcctccgcgggtattggcaaatcgggtgcacagcccgctaaaaagagactcaatttcggtcagactggcgacacagagtcagtcccagaccctcaaccaatcggagaacctcccgcagccccctcaggtgtgggatctcttacaatggcttcaggtggtggcgcaccagtggcagacaataacgaaggtgccgatggagtgggtagttcctcgggaaattggcattgcgattcccaatggctgggggacagagtcatcaccaccagcacccgaacctgggccctgcccacctacaacaatcacctctacaagcaaatctccaacagcacatctggaggatcttcaaatgacaacgcctacttcggctacagcaccccctgggggtattttgacttcaacagattccactgccacttctcaccacgtgactggcagcgactcatcaacaacaactggggattccggcctaagcgactcaacttcaagctcttcaacattcaggtcaaagaggttacggacaacaatggagtcaagaccatcgccaataaccttaccagcacggtccaggtcttcacggactcagactatcagctcccgtacgtgctcgggtcggctcacgagggctgcctcccgccgttcccagcggacgttttcatgattcctcagtacgggtatctgacgcttaatgatggaagccaggccgtgggtcgttcgtccttttactgcctggaatatttcccgtcgcaaatgctaagaacgggtaacaacttccagttcagctacgagtttgagaacgtacctttccatagcagctacgctcacagccaaagcctggaccgactaatgaatccactcatcgaccaatacttgtactatctctcaaagactattaacggttctggacagaatcaacaaacgctaaaattcagtgtggccggacccagcaacatggctgtccagggaagaaactacatacctggacccagctaccgacaacaacgtgtctcaaccactgtgactcaaaacaacaacagcgaatttgcttggcctggagcttcttcttgggctctcaatggacgtaatagcttgatgaatcctggacctgctatggccagccacaaagaaggagaggaccgtttctttcctttgtctggatctttaatttttggcaaacaaggaactggaagagacaacgtggatgcggacaaagtcatgataaccaacgaagaagaaattaaaactactaacccggtagcaacggagtcctatggacaagtggccacaaaccaccagagtgcccaagcacaggcgcagaccggctgggttcaaaaccaaggaatacttccgggtatggtttggcaggacagagatgtgtacctgcaaggacccatttgggccaaaattcctcacacgtacggcaactttcacccttctccgctgatgggagggtttggaatgaagcacccgcctcctcagatcctcatcaaaaacacacctgtacctgcggatcctccaacggccttcaacaaggacaagctgaactctttcatcacccagtattctactggccaagtcagcgtggagatcgagtgggagctgcagaaggaaaacagcaagcgctggaacccggagatccagtacacttccaactattacaagtctaataatgttgaatttgctgttaatactgaaggtgtatatagtgaaccccgccccattggcaccagatacctgactcgtaatctgtaattgcttgttaatcaataaaccgtttaattcgtttcagttgaactgcggcc

SEQ ID NO: 591 - DNA, 2601 bp, Artificial Sequence
  source: /note="Description of Artificial Sequence: Synthetic polynucleotide"
ccatcgacgtcagacgcggaagcttcgatcaactacgcggacaggtaccaaaacaaatgttctcgccacgtgggcatgaatctgatgctgtttccctgcagacaatgcgagagactgaatcagaattcaaatatctgcttcactcacggtgtcaaagactgtttagagtgctttcccgtgtcagaatctcaacccgtttctgtcgtcaaaaaggcgtatcagaaactgtgctacattcatcacatcatgggaaaggtgccagacgcttgcactgcttgcgacctggtcaatgtggacttggatgactgtgtttctgaacaataaatgacttaaaccaggtatggctgccgatggttatcttccagattggctcgaggacaaccttagtgaaggaattcgcgagtggtgggctttgaaacctggagcccctcaacccaaggcaaatcaacaacatcaagacaacgctcgaggtcttgtgcttccgggttacaaataccttggacccggcaacggactcgacaagggggagccggtcaacgcagcagacgcggcggccctcgagcacgacaaggcctacgaccagcagctcaaggccggagacaacccgtacctcaagtacaaccacgccgacgccgagttccaggagcggctcaaagaagatacgtcttttgggggcaacctcgggcgagcagtcttccaggccaaaaagaggcttcttgaacctcttggtctggttgaggaagcggctaagacggctcctggaaagaagaggcctgtagagcagtctcctcaggaaccggactcctccgcgggtattggcaaatcgggtgcacagcccgctaaaaagagactcaatttcggtcagactggcgacacagagtcagtcccagaccctcaaccaatcggagaacctcccgctgccccctcaggtgtgggatctcttacaatggcttcaggtggtggcgcaccagtggcagacaataacgaaggtgccgatggagtgggtagttcctcgggaaattggcattgcgattcccaatggctgggggacagagtcatcaccaccagcacccgaacctgggccctgcccacctacaacaatcacctctacaagcaaatctccaacagcacatctggaggatcttcaaatgacaacgcctacttcggctacagcaccccctgggggtattttgacttcaacagattccactgccacttctcaccacatgactggcagcgactcatcaacaacaactggggattccggcctaagcgactcaacttcaagctcttcaacattcaggtcaaagaggttacggacaacaatggagtcaagaccatcgccaataaccttaccagcacggtccaggtcttcacggactcagactatcagctcccgtacgtgctcgggtcggctcacgagggctgcctcccgccgttcccagcggacgttttcatgattcctcagtacgggtatctgacgcttaatgatggaagccaggccgtgggtcgttcgtccttttactgcctggaatatttcccgtcgcaaatgctaagaacgggtaacaacttccagttcagctacgagtttgagaacgtacctttccatagcagctacgctcacagccaaagcctggaccgactaatgaatccactcatcgaccaatacttgtactatctctcaaagactattaacggttctggacagaatcaacaaacgctaaaattcaatgtggccggacccagcaacatggctgtccagggaagaaactacatacctggacccagctaccgacaacaacgtgtctcaaccactgtgactcaaaacaacaacagcgaatttgcctggcctagagcttcttcttgggctctcaatggacgtaatagcttgatgaatcctggacctgctatggccagccacaaagaaggagaggaccgtttctttcctttgtctggatctttaatttttggcaaacaaggaactggaagagacaacgtggatgcggacaaagtcatgataaccaacgaagaagaaattaaaactactaacccggtagcaacggagtcctatggacaagtggccacaaaccaccagagtgcccaagcacaggcgcagaccggctgggttcaaaaccaaggaatacttccgggtatggtttggcaggacagagatgtgtacctgcaaggacccatttgggccaaaattcctcacacggacggcaactttcacccttctccgctgatgggagggtttggaatgaagcacccgcctcctcagatcctcatcaaaaacacacctgtacctgcggatcctccaacggccttcaacaaggacaagctgaactctttcatcacccagtattctactggccaagtcagcatggagatcgagtgggagctgcagaaggaaaacagcaagcgctggaacccggagatccagtacacttccaactattacaagtctaataatgttgaatttgctgttaatactgaaggtgtatatagtgaaccccgccccattggcaccagatacctgactcgtaatctgtaattgcttgttaatcaataaaccgtttaattcgtttcagttgaactgcggcc

SEQ ID NO: 592 - DNA, 2601 bp, Artificial Sequence
  source: /note="Description of Artificial Sequence: Synthetic polynucleotide"
ccatcgacgtcagacgcggaagcttcgatcaactacgcggacaggtaccaaaacaaatgttctcgtcacgtgggcatgaatctgatgctgtttccctgcagacaatgcgagagactgaatcagaattcaaatatctgcttcactcacggtgtcaaagactgtttagagtgctttcccgtgtcagaatctcaacccgtttctgtcgtcaaaaaggcgtatcagaaactgtgctacattcatcacatcatgggaaaggtgccagacgcttgcactgcttgcgacctggtcaatgtggacttggatgactgtgtttctgaacaataaatgacttaaaccaggtatggctgccgatggttatcttccagattggctcgaggacaaccttagtgaaggaattcgcgagtggtgggctttgaaacctggagcccctcaacccaaggcaaatcaacaacatcaagacaacgctcgaggtcttgtgcttccgggttacaaataccttggacccggcaacggactcgacaagggggagccggtcaacgcagcagacgcggcggccctcgagcacgacaaggcctacgaccagcagctcaaggccggagacaacccgtacctcaagtacaaccacgccgacgccgagttccaggagcggctcaaagaagatacgtcttttgggggcaacctcgggcgagcagtcttccaggccaaaaagaggcttcttgaacctcttggtctggttgaggaagcggctaagacggctcctggaaagaagaggcctgtagagcagtctcctcaggaaccggactcctccgcgggtattggcaaatcgggtgcacagcccgctaaaaagagactcaatttcggtcagactggcgacacagagtcagtcccagaccctcaaccaatcggagaacctcccgcagccccctcaggtgtgggatctcttacaatggcttcaggtggtggcgcaccagtggcagacaataacgaaggtgccgatggagtgggtagttcctcgggaaattggcattgcgattcccaatggctgggggacagagtcatcaccaccagcacccgaacctgggccctgcccacctacaacaatcacctctacaagcaaatctccaacagcacatctggaggatcttcaaatgacaacgcctacttcggctacagcaccccctgggggtattttgacttcaacagattccactgccacttctcaccacgtgactggcagcgactcatcaacaacaactggggattccggcctaagcgactcaacttcaagctcttcaacattcaggtcaaagaggttacggacaacaatggagtcaagaccatcgccaataaccttaccagcacggtccaggtcttcacggactcagactatcagctcccgtacgtgctcgggtcggctcacgagggctgcctcccgccgttcccagcggacgttttcatgattcctcagtacgggtatctgacgcttaatgatggaagccaggccgtgggtcgttcgtccttttactgcctggaatatttcccgtcgcaaatgctaagaacgggtaacaacttccagttcagctacgagtttgagaacgtacctttccatagcagctacgctcacagccaaagcctggaccgactaatgaatccactcatcgaccaatacttgtactatctctcaaagactattaacggttctggacagaatcaacaaacgctaaaattcagtgtggccggacccagcaacatggctgtccagggaagaaactacatacctggacccagctaccgacaacaacgtgtctcaaccactgtgactcaaaacaacaacagcgaatttgcttggcctagagcttcttcttgggctctcaatggacgtaatagcttgatgaatcctggacctgctatggccagccacaaagaaggagaggaccgtttctttcctttgtctggatctttaatttttggcaaacaaggaactggaagagacaacgtggatgcggacaaagtcatgataaccaacgaagaagaaattaaaactactaacccggtagcaacggagtcctatggacaagtggccacaaaccaccagagtgcccaagcacaggcgcagaccggctgggttcaaaaccaaggaatacttccgggtatggtttggcaggacagagatgtgtacctgcaaggacccatttgggccaaaattcctcacacggacggcaactttcacccttctccgctgatgggagggtttggaatgaagcacccgcctcctcagatcctcatcaaaaacacacctgtacctgcggatcctccaacggccttcaacaaggacaagctgaactctttcatcacccagtattctactggccaagtcagcgtggagatcgagtgggagctgcagaaggaaaacagcaagcgctggaacccggagatccagtacacttccaactattacaagtctaataatgttgaatttgctgttaatactgaaggtgtatatagtgaaccccgccccattggcaccagatacctgactcgtaatctgtaattgcttgttaatcaataaaccgtttaattcgtttcagttgaactgcggcc

SEQ ID NO: 593 - DNA, 2601 bp, Artificial Sequence
  source: /note="Description of Artificial Sequence: Synthetic polynucleotide"
ccatcgacgtcagacgcggaagcttcgatcaactacgcggacaggtaccaaaacaaatgttctcgtcacgtgggcatgaatctgatgctgtttccctgcagacaatgcgagagactgaatcagaattcaaatatctgcttcactcacggtgtcaaagactgtttagagtgctttcccgtgtcagaatctcaacccgtttctgtcgtcaaaaaggcgtatcagaaactgtgctacattcatcacatcatgggaaaggtgccagacgcttgcactgcttgcgacctggtcaatgtggacttggatgactgtgtttctgaacaataaatgacttaaaccaggtatggctgccgatggttatcttccagattggctcgaggacaaccttagtgaaggaattcgcgagtggtgggctttgaaacctggagcccctcaacccaaggcaaatcaacaacatcaagacaacgctcgaggtcttgtgcttccgggttacaaataccttggacccggcaacggactcgacaagggggagccggtcaacgcagcagacgcggcggccctcgagcacgacaaggcctacgaccagcagctcaaggccggagacaacccgtacctcaagtacaaccacgccgacgccgagttccaggagcggctcaaagaagatacgtcttttgggggcaacctcgggcgagcagtcttccaggccaaaaagaggcttcttgaacctcttggtctggttgaggaagcggctaagacggctcctggaaagaagaggcctgtagagcagtctcctcaggaaccggactcctccgcgggtattggcaaatcgggtgcacagcccgctaaaaagagactcaatttcggtcagactggcgacacagagtcagtcccagaccctcaaccaatcggagaacctcccgcagccccctcaggtgtgggatctcttacaatggcttcaggtggtggcgcaccagtggcagacaataacgaaggtgccgatggagtgggtagttcctcgggaaattggcattgcgattcccaatggctgggggacagagtcatcaccaccagcacccgaacctgggccctgcccacctacaacaatcacctctacaagcaaatctccaacagcacatctggaggatcttcaaatgacaacgcctacttcggctacagcaccccctgggggtattttgacttcaacagattccactgccacttctcaccacgtgactggcagcgactcatcaacaacaactggggattccggcctaagcgactcaacttcaagctcttcaacattcaggtcaaagaggttacggacaacaatggagtcaagaccatcgccaataaccttaccagcacggtccaggtcttcacggactcagactatcagctcccgtacgtgctcgggtcggctcacgagggctgcctcccgccgttcccagcggacgttttcatgattcctcagtacgggtatctgacgcttaatgatggaagccaggccgtgggtcgttcgtccttttactgcctggaatatttcccgtcgcaaatgctaagaacgggtaacaacttccagttcagctacgagtttgagaacgtacctttccatagcagctacgctcacagccaaagcctggaccgactaatgaatccactcatcgaccaatacttgtactatctctcaaagactattaacggttctggacagaatcaacaaacgctaaaattcagtgtggccggacccagcaacatggctgtccagggaagaaactacatacctggacccagctaccgacaacaacgtgtctcaaccactgtgactcaaaacaacaacagcgaatttgcttggcctagagcttcttcttgggctctcaatggacgtaatagcttgatgaatcctggacctgctatggccagccacaaagaaggagaggaccgtttctttcctttgtctggatctttaatttttggcaaacaaggaactggaagagacaacgtggatgcggacaaagtcatgataaccaacgaagaagaaattaaaactactaacccggtagcaacggagtcctatggacaagtggccacaaaccaccagagtgcccaagcacaggcgcagaccggctgggttcaaaaccaaggaatacttccgggtatggtttggcaggacagagatgtgtacctgcaaggacccatttgggccaaaattcctcacacggacggcaactttcacccttctccgctgatgggagggtttggaatgaagcacccgcctcctcagatcctcatcaaaaacacacctgtacctgcggatcctccaacggccttcaacaaggacaagctgaactctttcatcacccagtattctactggccaagtcagcgtggagatcgagtgggagcggcagaaggaaaacagcaagcgctggaacccggagatccagtacacttccaactattacaagtctaataatgttgaatttgctgttaatactgaaggtgtatatagtgaaccccgccccattggcaccagatacctgactcgtaatctgtaattgcttgttaatcaataaaccgtttaattcgtttcagttgaactgcggcc

SEQ ID NO: 594 - DNA, 2601 bp, Artificial Sequence
  source: /note="Description of Artificial Sequence: Synthetic polynucleotide"
ccatcgacgtcagacgcggaagcttcgatcaactacgcggacaggtaccaaaacaaatgttctcgtcacgtgggcatgaatctgatgctgtttccctgcagacaatgcgagagactgaatcagaattcaaatatctgcttcactcacggtgtcaaagactgtttagagtgctttcccgtgtcagaatctcaacccgtttctgtcgtcaaaaaggcgtatcagaaactgtgctacattcatcacatcatgggaaaggtgccagacgcttgcactgcttgcgacctggtcaatgtggacttggatgactgtgtttctgaacaataaatgacttaaaccaggtatggctgccgatggttatcttccagattggctcgaggacaaccttagtgaaggaattcgcgagtggtgggctttgaaacctggagcccctcaacccaaggcaaatcaacaacatcaagacaacgctcgaggtcttgtgcttccgggttacaaataccttggacccggcaacggactcgacaagggggagccggtcaacgcagcagacgcggcggccctcgagcacgacaaggcctacgaccagcagctcaaggccggagacaacccgtacctcaagtacaaccacgccgacgccgagttccaggagcggctcaaagaagatacgtcttttgggggcaacctcgggcgagcagtcttccaggccaaaaagaggcttcttgaacctcttggtctggttgaggaagcggctaagacggctcctggaaagaagaggcctgtagagcagtctcctcaggaaccggactcctccgcgggtattggcaaatcgggtgcacagcccgctaaaaagagactcaatttcggtcagactggcgacacagagtcagtcccagaccctcaaccaatcggagaacctcccgcagccccctcaggtgtgggatctcttacaatggcttcaggtggtggcgcaccagtggcagacaataacgaaggtgccgatggagtgggtagttcctcgggaaattggcattgcgattcccaatggctgggggacagagtcatcaccaccagcacccgaacctgggccctgcccacctacaacaatcacctctacaagcaaatctccaacagcacatctggaggatcttcaaatgacaacgcctacttcggctacagcaccccctgggggtattttgacttcaacagattccactgccacttctcaccacgtgactggcagcgactcatcaacaacaactggggattccggcctaagcgactcaacttcaagctcttcaacattcaggtcaaagaggttacggacaacaatggagtcaagaccatcgccaataaccttaccagcacggtccaggtcttcgcggactcagactatcagctcccgtacgtgctcgggtcggctcacgagggctgcctcccgccgttcccagcggacgttttcatgattcctcagtacgggtatctgacgcttaatgatggaagccaggccgtgggtcgttcgtccttttactgcctggaatatttcccgtcgcaaatgctaagaacgggtaacaacttccagttcagctacgagtttgagaacgtacctttccatagcagctacgctcacagccaaagcctggaccgactaatgaatccactcatcgaccaatacttgtactatctctcaaagactattaacggttctggacagaatcaacaaacgctaaaattcagtgtggccggacccagcaacatggctgtccagggaagaaactacatacctggacccagctaccgacaacaacgtgtctcaaccactgtgactcaaaacaacaacagcgaatttgcttggcctagagcttcttcttgggctctcaatggacgtaatagcttgatgaatcctggacctgctatggccagccacaaagaaggagaggaccgtttctttcctttgtctggatctttaatttttggcaaacaaggaactggaagagacaacgtggatgcggacaaagtcatgataaccaacgaagaagaaattaaaactactaacccggtagcaacggagtcctatggacaagtggccacaaaccaccagagtgcccaagcacaggcgcagaccggctgggttcaaaaccaaggaatacttccgggtatggtttggcaggacagagatgtgtacctgcaaggacccatttgggccaaaattcctcacacggacggcaactttcacccttctccgctgatgggagggtttggaatgaagcacccgcctcctcagatcctcatcaaaaacacacctgtacctgcggatcctccaacggccttcaacaaggacaagctgaactctttcatcacccagtattctactggccaagtcagcgtggagatcgagtgggagctgcagaaggaaaacagcaagcgctggaacccggagatccagtacacttccaactattacaagtctaataatgttgaatttgctgttaatactgaaggtgtatatagtgaaccccgccccattggcaccagatacctgactcgtaatctgtaattgcttgttaatcaataaaccgtttaattcgtttcagttgaactgcggcc

SEQ ID NO: 595 - DNA, 2601 bp, Artificial Sequence
  source: /note="Description of Artificial Sequence: Synthetic polynucleotide"
ccatcgacgtcagacgcggaagcttcgatcaactacgcggacaggtaccaaaacaaatgttctcgtcacgtgggcatgaatctgatgctgtttccctgcagacaatgcgagagactgaatcagaattcaaatatctgcttcactcacggtgtcaaagactgtttagagtgctttcccgtgtcagaatctcaacccgtttctgtcgtcaaaaaggcgtatcagaaactgtgctacattcatcacatcatgggaaaggtgccagacgcttgcactgcttgcgacctggtcaatgtggacttggatgactgtgtttctgaacaataaatgacttaaaccaggtatggctgccgatggttatcttccagattggctcgaggacaaccttagtgaaggaattcgcgagtggtgggctttgaaacctggagcccctcaacccaaggcaaatcaacaacatcaagacaacgctcgaggtcttgtgcttccgggttacaaataccttggacccggcaacggactcgacaagggggagccggtcaacgcagcagacgcggcggccctcgagcacgacaaggcctacgaccagcagctcaaggccggagacaacccgtacctcaagtacaaccacgccgacgccgagttccaggagcggctcaaagaagatacgtcttttgggggcaacctcgggcgagcagtcttccaggccaaaaagaggcttcttgaacctcttggtctggttgaggaagcggctaagacggctcctggaaagaagaggcctgtagagcagtctcctcaggaaccggactcctccgcgggtattggcaaatcgggtgcacagcccgctaaaaagagactcaatttcggtcagactggcgacacagagtcagtcccagaccctcaaccaatcggagaacctcccgcagccccctcaggtgtgggatctcttacaatggcttcaggtggtggcgcaccagtggcagacaataacgaaggtgccgatggagtgggtagttcctcgggaaattggcattgcgattcccaatggctgggggacagagtcatcaccaccagcacccgaacctgggccctgcccacctacaacaatcacctctacaagcaaatctccaacagcacatctggaggatcttcaaatgacaacgcctacttcggctacagcaccccctgggggtattttgacttcaacagattccactgccacttctcaccacgtgactggcagcgactcatcaacaacaactggggattccggcctaagcgactcaacttcaagctcttcaacattcaggtcaaagaggttacggacaacaatggagtcaagaccatcgccaataaccttaccagcacggtccaggtcttcacggactcagactatcagctcccgtacgtgctcgggtcggctcacgagggctgcctcccgccgttcccagcggacgttttcatgattcctcagtacgggtatctgacgcttaatgatggaagccaggccgtgggtcgttcgtccttttactgcctggaatatttcccgtcgcaaatgctaagaacgggtaacaacttccagttcagctacgagtttgagaacgtacctttccatagcagctacgctcacagccaaagcctggaccgactaatgaatccactcatcgaccaatacttgtactatctctcaaagactattaacggttctggacagaatcaacaaacgctaaaattcagtgtggccggacccagcaacatggctgtccagggaagaaactacatacctggacccagctaccgacaacaacgtgtctcaaccactgtgactcaaaacaacaacagcgaaattgcttggcctagagcttcttcttgggctctcaatggacgtaatagcttgatgaatcctggacctgctatggccagccacaaagaaggagaggaccgtttctttcctttgtctggatctttaatttttggcaaacaaggaactggaagagacaacgtggatgcggacaaagtcatgataaccaacgaagaagaaattaaaactactaacccagtagcaacggagtcctatggacaagtggccacaaaccaccagagtgcccaagcacaggcgcagaccggctgggttcaaaaccaaggaatacttccgggtatggtttggcaggacagagatgtgtacctgcaaggacccatttgggccaaaattcctcacacggacggcaactttcacccttctccgctgatgggagggtttggaatgaagcacccgcctcctcagatcctcatcaaaaacacacctgtacctgcggatcctccaacggccttcaacaaggacaagctgaactctttcatcacccagtattctactggccaagtcagcgtggagatcgagtgggagctgcagaaggaaaacagcaagcgctggaacccggagatccagtacacttccaactattgcaagtctaataatgttgaatttgctgttaatactgaaggtgtatatagtgaaccccgccccattggcaccagatacctgactcgtaatctgtaattgcttgttaatcaataaaccgtttaattcgtttcagttgaactgcggcc

SEQ ID NO: 596 - DNA, 2601 bp, Artificial Sequence
  source: /note="Description of Artificial Sequence: Synthetic polynucleotide"
ccatcgacgtcagacgcggaagcttcgatcaactacgcggacaggtaccaaaacaaatgttctcgtcacgtgggcatgaatctgatgctgtttccctgcagacaatgcgagagactgaatcagaattcaaatatctgcttcactcacggtgtcaaagactgtttagagtgctttcccgtgtcagaatctcaacccgtttctgtcgtcaaaaaggcgtatcagaaactgtgctacattcatcacatcatgggaaaggtgccagacgcttgcactgcttgcgacctggtcaatgtggacttggatgtctgtgtttctgaacaataaatgacttaaaccaggtatggctgccgatggttatcttccagattggctcgaggacaaccttagtgaaggaattcgcgagtggtgggctttgaaacctggagcccctcaacccaaggcaaatcaacaacatcaagacaacgctcgaggtcttgtgcttccgggttacaaataccttggacccggcaacggactcgataagggggagccggtcaacgcagcagacgcggcggccctcgagcacgacaaggcctacgaccagcagctcaaggccggagacaacccgtacctcaagtacaaccacgccgacgccgagttccaggagcggctcaaagaagatacgtcttttgggggcaacctcgggcgagcagtcttccaggccaaaaagaggcttcttgaacctcttggtctggttgaggaagcggctaagacggctcctggaaagaagaggcctgtagagcagtctcctcaggaaccggactcctccgcgggtattggcaaatcgggtgcacagcccgctaaaaagagactcaatttcggtcagactggcgacacagagtcagtcccagaccctcaaccaatcggagaacctcccgcagccccctcaggtgtgggatctcttacaatggcttcaggtggtggcgcaccagtggcagacaataacgaaggtgccgatggagtgggtagttcctcgggaaattggcattgcgattcccaatggctgggggacagagtcatcaccaccagcacccgaacctgggccctgcccacctacaacaatcacctctacaagcaaatctccaacagcacatctggaggatcttcaaatgacaacgcctacttcggctacagcaccccctgggggtattttgacttcaacagattccactgccacttctcaccacgtgactggcagcgactcatcaacaacaactggggattccggcctaagcgactcaacttcaagctcttcaacattcaggtcaaagaggttacggacaacaatggagtcaagaccatcgccaataaccttaccagcacggtccaggtcttcacggactcagactatcagctcccgtacgtgctcgggtcggctcacgagggctgcctcccgccgttcccagcggacgttttcatgattcctcagtacgggtatctgacgcttaatgatggaagccaggccgtgggtcgttcgtccttttactgcctggaatatttcccgtcgcaaatgctaagaacgggtaacaacttccagttcagctacgagtttgagaacgtacctttccatagcagctacgctcacagccaaagcctggaccgactaatgaatccactcatcgaccaatacttgtactatctctcaaagactattaacggttctggacagaatcaacaaacgctaaaattcagtgtggccggacccagcaacatggctgtccagggaagaaactacatacctggacccagctaccgacaacaacgtgtctcaaccactgtgactcaaaacaacaacagcgaatttgcttggcctagagcttcttcttgggctctcaatggacgtaatagcttgatgaatcctggacctgctatggccagccacaaagaaggagaggaccgtttctttcctttgtctggatctttaatttttggcaaacaaggaactggaagagacaacgtggatgcggacaaagtcatgataaccaacgaagaagaaattaaaactactaacccggtagcaacggagtcctatggacaagtggccacaaaccaccagagtgcccaagcacaggcgcagaccggctgggttcaaaaccaaggaatacttccgggtatggtttggcaggacagagatgtgtacctgcaaggacccatttgggccaaaattcctcacacggacggcaactttcacccttctccgctgatgggagggtttggaatgaagcacccgcctcctcagatcctcatcaaaaacacacctgtacctgcggatcctccaacggccttcaacaaggacaagctgaactctttcatcacccagtattctactggccaagtcagcgtggagatcgagtgggagctgcagaaggaaaacagcaagcgctggaacccggagatccagtacacttccaactattacaagtctaataatgttgaatttgctgttaatactgaaggtgtatatagtgaaccccgccccattggcaccagatacctgactcgtaatctgtaattgcttgttaatcaataaaccgtttaattcgtttcagttgaactgcggcc

SEQ ID NO: 597 - protein, 736 aa, Artificial Sequence
  source: /note="Description of Artificial Sequence: Synthetic polypeptide"
MTADGYLPDWLEDNLSEGIREWWALKPGAPQPKANQQHQDNARGLVLPGYKYLGPGNGLDKGEPVNAADAAALEHDKAYDQQLKAGDNPYLKYNHADAEFQERLKEDTSFGGNLGRAVFQAKKRLLEPLGLVEEAAKTAPGKKRPVEQSPQEPDSSAGIGKSGAQPAKKRLNFGQTGDTESVPDPQPIGEPPAAPSGVGSLTMASGGGAPVADNNEGADGVGSSSGNWHCDSQWLGDRVITTSTRTWALPTYNNHLYKQISNSTSGGSSNDNAYFGYSTPWGYFDFNRFHCHFSPRDWQRLINNNWGFRPKQLNFKLFNIQVKEVTDNNGVKTIANNLTSTVQVFTDSDYQLPYVLGSAHEGCLPPFPADVFMIPQYGYLTLNDGSQAVGRSSFYCLEYFPSQMLRTGNNFQFSYEFENVPFHSSYAHSQSLDRLMNPLIDQYLYYLSKTINGSGQNQQTLKFSVAGPSNMAVQGRNYIPGPSYRQQRVSTTVTQNNNSEFAWPGASSWALNGRNSLMNPGPAMASHKEGEDRFFPLSGSLIFGKQGTGRDNVDADKVMITNEEEIKTTNPVATESYGQVATNHQSAQAQAQTGWVQNQGILPGMVWQDRDVYLQGPIWAKIPHTDGNFHPSPLMGGFGMKHPPPQILIKNTPVPADPPTAFNKDKLNSFITQYSTGQVSVEIEWELQKENSKRWNPEIQYTSNYYKSNNVEFAVNTEGVYSEPRPIGTRYLTRNL

SEQ ID NO: 598 - protein, 736 aa, Artificial Sequence
  source: /note="Description of Artificial Sequence: Synthetic polypeptide"
MAADGYLPDWLEDNLSEGIREWWALKPGAPQPKANQQHQDNARGLVLPGYKYLGPGNGLDKGEPVNAADAAALEHDKAYDQQLKAGDNPYLKYNHADAEFQERLKEDTSFGGNLGRAVFQAKKRLLEPLGLVEEAAKTAPGKKRPVEQSPQEPDSSAGIGKSGAQPAKKRLNFGQTGDTESVPDPQPIGEPPAAPSGVGSLTMASGGGAPVADNNEGADGVGSSSGNWHCDSQWLGDRVITTSTRTWALPTYNNHLYKQISNSTSGGSSNDNAYFGYSTPWGYFDFNRFHCHFSPRDWQRLINNNWGFRPKRLNFKLFNIQVKEVTDNNGVKTIANNLTSTVQVFTDSDYQLPYVLGSAHEGCLPPFPADVFMIPQYGYLTLNDGSQAVGRSSFYCLEYFPSQMLRTGNNFQFSYEFENVPFHSSYAHSQSLDRLMNPLIDQYLYYLSKTINGSGQNQQTLKFSVAGPSNMAVQGRNYIPGPSYRQQRVSTTVTQNNNSEFAWPGASSWALNGRNSLMNPGPAMASHKEGEDRFFPLSGSLIFGKQGTGRDNVDADKVMITNEEEIKTTNPVATESYGQVATNHQSAQAQAQTGWVQNQGILPGMVWQDRDVYLQGPIWAKIPHTGGNFHPSPLMGGFGMKHPPPQILIKNTPVPADPPTAFNKDKLNSFITQYSTGQVSVEIEWELQKENSKRWNPEIQYTSNYYKSNNVEFAVNTGGVYSEPRPIGTRYLTRNL

SEQ ID NO: 599 - protein, 736 aa, Artificial Sequence
  source: /note="Description of Artificial Sequence: Synthetic polypeptide"
MAADGYLPDWLEDNLSEGIREWWALKPGAPQPKANQQHQDNARGLVLPGYKYLGPGNGLDKGEPVNAADAAALEHDKAYDQQLKAGDNPYLKYNHADAEFQERLKEDTSFGGNLGRAVFQAKKRLLEPLGLVEEAAKTAPGKKRPVEQSPQEPDSSAGIDKSGAQPAKKRLNFGQTGDTESVPDPQPIGEPPAAPSGVGSLTMASGGGAPVADNNEGADGVGSSSGNWHCDSQWLGDRVITTSTRTWALPTYNNHLYKQISNSTSGGSSNDNAYFGYSTPWGYFDFNRFHCHFSPRDWQRLINNNWGFRPKRLNFKLFNIQVKEVTDNNGVKTIANNLTSTVQVFTDSDYQLPYVLGSAHEGCLPPFPADVFMIPQYGYLTLNDGSQAVGRSSFYCLEYFPSQMLRTGNNFQFSYEFENVPFHSSYAHSQSLDRLMNPLIDQYLYYLSKTINGSGQNQQTLKFSVAGPSNMAVQGRNYIPGPSYRQQRVSTTVTQNNNSEFAWPGASSWALNGRNSLMNPGPAMASHKEGEDRFFPLSGSLIFGKQGTGRDNVDADKVMITNEEEIKTTNPVATESYGQVATNHQSAQAQAQTGWVQNQGILPGMVWQDRDVYLQGPIWAKIPHTDGNFHPSPLMGGFGMKHPPPQILIKNTPVPADPPTAFNKDKLNSFITQYSTGQVSVEIEWELQKENSKRWNPEIQYTSNYYKSNNVEFAVNTEGVYSEPRPIGTRYLTRNL

SEQ ID NO: 600 - protein, 736 aa, Artificial Sequence
  source: /note="Description of Artificial Sequence: Synthetic polypeptide"
MAADGYLPDWLEDNLSEGIREWWALKPGAPQPKANQQHQDNARGLVLPGYKYLGPGNGLDKGEPVNAADAAALEHDKAYDQQLKAGDNPYLKYNHADAEFQERLKEDTSFGGNLGRAVLQAKKRLLEPLGLVEEAAKTAPGKKRPVEQSPQEPDSSAGIGKSGAQPAKKRLNFGQTGDTESVPDPQPIGEPPAAPSGVGSLTMASGGGAPVADNNEGADGVGSSSGNWHCDSQWLGDRVITTSTRTWALPTYNNHLYKQISNSTSGGSSNDNAYFGYSTPWGYFDFNRFHCHFSPRDWQRLINNNWGFRPKRLNFKLFNIQVKEVTDNNGVKTIANNLTSTVQVFTDSDYQLPYVLGSAHEGCLPPFPADVFMIPQYGYLTLNDGSQAVGRSSFYCLEYFPSQMLRTGNNFQFSYEFENVPFHSSYAHSQSLDRLMNPLIDQYLYYLSKTINGSGQNQQTLKFSVAGSSNMAVQGRNYIPGPSYRQQRVSTTVTQNNNSEFAWPGASSWALNGRNSLMNPGPAMASHKEGEDRFFPLSGSLIFGKQGTGRDNVDADKVMITNEEEIKTTNPVATESYGQVATNHQSAQAQAQTGWVQNQGILPGMVWQDRDVYLQGPIWAKIPHTDGNFHPSPLMGGFGMKHPPPQILIKNTPVPADPPTAFNKDKLNSFITQYSTGQVSVEIEWELQKENSKRWNPEIQYTSNYYKSNNVEFAVNTEGVYSEPRPIGTRYLTRNL

SEQ ID NO: 601 - protein, 736 aa, Artificial Sequence
  source: /note="Description of Artificial Sequence: Synthetic polypeptide"
MAADGYLPDWLEDNLSEGIREWWALKPGAPQPKANQQHQDNARGLVLPGYKYLGPGNGLDKGEPVNAADAAALEHDRAYDQQLKAGDNPYLKYNHADAEFQERLKEDTSFGGNLGRAVFQAKKRLLEPLGLVEEAAKTAPGKKRPVEQSPQEPDSSAGIGKSGAQPAKKRLNFGQTGDTESVPDPQPIGEPPAAPSGVGSLTMASGGGAPVADNNEGADGVGSSSGNWHCDSQWLGDRVITTSTRTWALPTYNNHLYKQISNSTSGGSSNDNAYFGYSTPWGYFDFNRFHCHFSPRDWQRLINNNWGFRPKRLNFKLFNIQVKEVTDNNGVKTIANNLTSTVQVFTDSDYQLPYVLGSAHEGCLPPFPADVFMIPQYGYLTLNDGSQAVGRSSFYCLEYFPSQMLRTGNNFQFSYEFENVPFHSSYAHSQSLDRLMNPLIDQYLYYLSKTINGSGQNQQTLKFSVAGPSNMAVQGRNYIPGPSYRQQRVSTTVTQNNNSEFAWPGASSWALNGRNSLMNPGPAMASHKEGEDRFFPLSGSLIFGKQGTGRDNVDADKVMITNEEEIKTTNPVATESYGQVATNHQSAQAQAQTGWVQNQGILPGMVWQDRDVYLQGPIWAKIPHTDGNFHPSPLMGGFGMKHPPPQILIKNTPVPADPPTAFNKDKLNSFITQYSTGQVSVEIEWELQKKNSKRWNPEIQYTSNYYKSNNVEFAVNTEGVYSEPRPIGTRYLTRNL

SEQ ID NO: 602 - protein, 736 aa, Artificial Sequence
  source: /note="Description of Artificial Sequence: Synthetic polypeptide"
MAADGYLPDWLEDNLSEGIREWWALKPGAPQPKANQQHQDNARGLVLPGYKYLGPGNGLDKGEPVNAADAAALEHDKAYDQQLKAGDNPYLKYNHADAEFQERLKEDTSFGGNLGRAVFQAKKRLLEPLGLVEEAAKTAPGKKRPVEQSPQEPDSSAGIGKSGAQPAKKRLNFGQTGDTESVPDPQPIGEPPAAPSGVGSLTMASGGGAPVADNNEGADGVGSSSGNWHCDSQWLGDRVITTSTRTWALPTYNNHLYKQISNSTSGGSSNDNAYFGYSTPWGYFDFNRFHCHFSPRDWQRLINNNWGFRPKRLNFKLFNIQVKEVTDNNGVKTIANNLTSTVQVFTDSDYQLPYVLGSAHEGCLPPFPADVFMIPQYGYLTLNDGSQAVGRSSFYCLEYFPSQMLRTGNNFQFSYEFENVPFHSSYAHSQSLDRLMNPLIDQYLYYLSKTINGSGQNQQTLKFSVAGPSNMAVQGRNYIPGPSYRQQRVSTTVTQNNNSEFAWPGASSWALNGRNSLMNPGPAMASHKEGEDRFFPLSGSLIFGKQGTGRDNVDADKVMITNEEEIKTTNPVATESYGQVATNHQSAQARAQTGWVQNQGILPGMVWQDRDVYLQGPIWAKIPHTDGNFHPSPLMGGFGMKHPPPQILIKNTPVPADPPTAFNKDKLNSFITQYSTGQVSVEIEWELQKENSKRWNPEIQYTSNYYKSNNVEFAVNTEGVYSEPRPIGTRYLTRNL

SEQ ID NO: 603 - protein, 736 aa, Artificial Sequence
  source: /note="Description of Artificial Sequence: Synthetic polypeptide"
MAADGYLPDWLEDNLSEGIREWWALKPGAPQPKANQQHQDNARGLVLPGYKYLGPGNGLDKGEPVNAVDAAALEHDKAYDQQLKAGDNPYLKYNHADAEFQERLKEDTSFGGNLGRAVFQAKKRLLEPLGLVEEAAKTAPGKKRPVEQSPQEPDSSAGIGKSGAQPAKKRLNFGQTGDTESVPDPQPIGEPPAAPSGVGSLTMASGGGAPVADNNEGADGVGSSSGNWHCDSQWLGDRVITTSTRTWALPTYNNHLYKQISNSTSGGSSNDNAYFGYSTPWGYFDFNRFHCHFSPRDWQRLINNNWGFRPKRLNFKLFNIQVKEVTDNNGVKTIANNLTSTVQVFTDSDYQLPYVLGSAHEGCLPPFPADVFMIPQYGYLTLNDGSQAVGRSSFYCLEYFPSQMLRTGNNFQFSYEFENVPFHSSYAHSQSLDRLMNPLIDQYLYYLSKTINGSGQNQQTLKFSVAGPSNMAVQGRNYIPGPSYRQQRVSTTVTQNNNSEFAWPGASSWALNGRNSLMNPGPAMASHKEGEDRFFPLSGSLIFGKQGTGRDNVDADKVMITNEEEIKTTNPVATESYGQVATNHQSAQAQAQTGWVQNQGILPGMVWQDRDVYLQGPIWAKIPHTDGNFHPSPLMGGFGMKHPPPQILIKNTPVPADPPTAFNKDKLNSFITQYSTGQVSVEIEWELQKENSKRWNPEIQYTSNYYKSNNVEFAVNTEGVYSEPRPIGTRYLTRNL

SEQ ID NO: 604 - protein, 736 aa, Artificial Sequence
  source: /note="Description of Artificial Sequence: Synthetic polypeptide"
MAADGYLPDWLEDNLSEGIREWWALKPGAPQPKANQQHQDNARGLVLPGYKYLGPGNGLDKGEPVNAADAAALEHDKAYDQQLKAGDNPYLKYNHADAEFQERLKEDTSFGGNLGRAVFQAKKRLLEPLGLVEEAAKTAPGKKRPVEQSPREPDSSAGIGKSGAQPAKKRLNFGQTGDTESVPDPQPIGEPPAAPSGVGSLTMASGGGAPVADNNEGADGVGSSSGNWHCDSQWLGDRVITTSTRTWALPTYNNHLYKQISNSTSGGSSNDNAYFGYSTPWGYFDFNRFHCHFSPRDWQRLINNNWGFRPKRLNFKLFNIQVKEVTDNNGVKTIANNLTSTVQVFTDSDYQLPYVLGSAHEGCLPPFPADVFMIPQYGYLTLNDGSQAVGRSSFYCLEYFPSQMLRTGNNFQFSYEFENVPFHSSYAHSQSLDRLMNPLIDQYLYYLSKTINGSGQNQQTLKFSVAGPSNMAVQGRNYIPGPSYRQQRVSTTVTQNNNSEFAWPGASSWALNGRNSLMNPGPAMASHKEGEDRFFPLSGSLIFGKQGTGRDNVDADKVMITNEEEIKTTNPVATESYGQVATNHQSAQAQAQTGWVQNQGILPGMVWQDRDVYLQGPIWAKIPHTDGNFHPSPLMGGFGMKHPPPQILIKNTPVPADPPTAFNKDKLNSFITQYSTGQVSVEIEWELQKENSKRWNPEIQYTSNYYKSNNVEFAVNTEGVYSEPRPIGTRYLTRNL

SEQ ID NO: 605 - protein, 736 aa, Artificial Sequence
  source: /note="Description of Artificial Sequence: Synthetic polypeptide"
MAADGYLPDWLEDNLSEGIREWWALKPGAPQPKANQQHQDNARGLVLPGYKYLGPGNGLDKGEPVNAADAAALEHDKAYDQQLKAGDNPYLKYNHADAEFQERLKEDTSFGGNLGRAVFQAKKRLLEPLGLVEEAAKTAPGKKRPVEQSPQEPDSSAGIGKSGAQPAKKRLNFGQTGDTESVPDPQPIGEPPAAPSGVGSLTMASCGGAPVADNNEGADGVGSSSGNWHCDSQWLGDRVITTSTRTWALPTYNNHLYKQISNSTSGGSSNDNAYFGYSTPWGYFDFNRFHCHFSPRDWQRLINNNWGFRPKRLNFKLFNIQVKEVTDNNGVKTIANNLTSTVQVFTDSDYQLPYVLGSAHEGCLPPFPADVFMIPQYGYLTLNDGSQAVGRSSFYCLEYFPSQMLRTGNNFQFSYEFENVPFHSSYAHSQSLDRLMNPLIDQYLYYLSKTINGSGQNQQTLKFSVAGPSNMAVQGRNYIPGPSYRQQRVSTTVTQNNNSEFAWPGASSWALNGRNSLMNPGPAMASHKEGEDRFFPLSGSLIFGKQGTGRDNVDADKVMITNEEEIKTTNPVATESYGQVATNHQSAQAQAQTGWVQNQGILPGMVWQDRDVYLQGPIWAKIPHTDGNFHPSPLMGGFGMKHPPPQILIKNTPVPADPPTAFNKDKLNSFITQYSTGQVSVEIEWELQKENSKRWNPEIQYTSNYYKSNNVEFAVNTEGVYSEPRPIGTRYLTRNL

SEQ ID NO: 606 - protein, 736 aa, Artificial Sequence
  source: /note="Description of Artificial Sequence: Synthetic polypeptide"
MAADGYLPDWLEDNLSEGIREWWALKPGAPQPKANQQHQDNARGLVLPGYKYLGPGNGLDKGEPINAADAAALEHDKAYDQQLKAGDNPYLKYNHADAEFQERLKEDTSFGGNLGRAVFQAKKRLLEPLGLVEEAAKTAPGKKRPVEQSPQEPDSSAGIGKSGAQPAKKRLNFGQTGDTESVPDPQPIGEPPAAPSGVGSLTMASGGGAPVADNNEGADGVGSSSGNWHCDSQWLGDRVITTSTRTWALPTYNNHLYKQISNSTSGGSSNDNAYFGYSTPWGYFDFNRFHCHFSPRDWQRLINNNWGFRPKRLNFKLFNIQVKEVTDNNGVKTIANNLTSTVQVFTDSDYQLPYVLGSAHEGCLPPFPADVFMIPQYGYLTLNDGSQAVGRSSFYCLEYFPSQMLRTGNNFQFSYEFENVPFHSSYAHSQSLDRLMNPLIDQYLYYLSKTINGSGQNQQTLKFSVAGPSNMAVQGRNYIPGPSYRQQRVSTTVTQNNNSEFAWPGASSWALNGRNSLMNPGPAMASHKEGEDRFFPLSGSLIFGKQGTGRDNVDADKVMITNEEEIKTTNPVATESYGQVATNHQSAQAQAQTGWVQNQGILPGMVWQDRDVYLQGPIWAKIPHTYGNFHPSPLMGGFGMKHPPPQILIKNTPVPADPPTAFNKDKLNSFITQYSTGQVSVEIEWELQKENSKRWNPEIQYTSNYYKSNNVEFAVNTEGVYSEPRPIGTRYLTRNL

SEQ ID NO: 607 - protein, 736 aa, Artificial Sequence
  source: /note="Description of Artificial Sequence: Synthetic polypeptide"
MAADGYLPDWLEDNLSEGIREWWALKPGAPQPKANQQHQDNARGLVLPGYKYLGPGNGLDKGEPVNAADAAALEHDKAYDQQLKAGDNPYLKYNHADAEFQERLKEDTSFGGNLGRAVFQAKKRLLEPLGLVEEAAKTAPGKKRPVEQSPQEPDSSAGIGKSGAQPAKKRLNFGQTGDTESVPDPQPIGEPPAAPSGVGSLTMASGGGAPVADNNEGADGVGSSSGNWHCDSQWLGDRVITTSTRTWALPTYNNHLYKQISNSTSGGSSNDNAYFGYSTPWGYFDFNRFHCHFSPHDWQRLINNNWGFRPKRLNFKLFNIQVKEVTDNNGVKTIANNLTSTVQVFTDSDYQLPYVLGSAHEGCLPPFPADVFMIPQYGYLTLNDGSQAVGRSSFYCLEYFPSQMLRTGNNFQFSYEFENVPFHSSYAHSQSLDRLMNPLIDQYLYYLSKTINGSGQNQQTLKFNVAGPSNMAVQGRNYIPGPSYRQQRVSTTVTQNNNSEFAWPRASSWALNGRNSLMNPGPAMASHKEGEDRFFPLSGSLIFGKQGTGRDNVDADKVMITNEEEIKTTNPVATESYGQVATNHQSAQAQAQTGWVQNQGILPGMVWQDRDVYLQGPIWAKIPHTDGNFHPSPLMGGFGMKHPPPQILIKNTPVPADPPTAFNKDKLNSFITQYSTGQVSMEIEWELQKENSKRWNPEIQYTSNYYKSNNVEFAVNTEGVYSEPRPIGTRYLTRNL

SEQ ID NO: 608 - protein, 736 aa, Artificial Sequence
  source: /note="Description of Artificial Sequence: Synthetic polypeptide"
MAADGYLPDWLEDNLSEGIREWWALKPGAPQPKANQQHQDNARGLVLPGYKYLGPGNGLDKGEPVNAADAAALEHDKAYDQQLKAGDNPYLKYNHADAEFQERLKEDTSFGGNLGRAVFQAKKRLLEPLGLVEEAAKTAPGKKRPVEQSPQEPDSSAGIGKSGAQPAKKRLNFGQTGDTESVPDPQPIGEPPAAPSGVGSLTMASGGGAPVADNNEGADGVGSSSGNWHCDSQWLGDRVITTSTRTWALPTYNNHLYKQISNSTSGGSSNDNAYFGYSTPWGYFDFNRFHCHFSPRDWQRLINNNWGFRPKRLNFKLFNIQVKEVTDNNGVKTIANNLTSTVQVFTDSDYQLPYVLGSAHEGCLPPFPADVFMIPQYGYLTLNDGSQAVGRSSFYCLEYFPSQMLRTGNNFQFSYEFENVPFHSSYAHSQSLDRLMNPLIDQYLYYLSKTINGSGQNQQTLKFSVAGPSNMAVQGRNYIPGPSYRQQRVSTTVTQNNNSEFAWPRASSWALNGRNSLMNPGPAMASHKEGEDRFFPLSGSLIFGKQGTGRDNVDADKVMITNEEEIKTTNPVATESYGQVATNHQSAQAQAQTGWVQNQGILPGMVWQDRDVYLQGPIWAKIPHTDGNFHPSPLMGGFGMKHPPPQILIKNTPVPADPPTAFNKDKLNSFITQYSTGQVSVEIEWELQKENSKRWNPEIQYTSNYYKSNNVEFAVNTEGVYSEPRPIGTRYLTRNL

SEQ ID NO: 609 - protein, 736 aa, Artificial Sequence
  source: /note="Description of Artificial Sequence: Synthetic polypeptide"
MAADGYLPDWLEDNLSEGIREWWALKPGAPQPKANQQHQDNARGLVLPGYKYLGPGNGLDKGEPVNAADAAALEHDKAYDQQLKAGDNPYLKYNHADAEFQERLKEDTSFGGNLGRAVFQAKKRLLEPLGLVEEAAKTAPGKKRPVEQSPQEPDSSAGIGKSGAQPAKKRLNFGQTGDTESVPDPQPIGEPPAAPSGVGSLTMASGGGAPVADNNEGADGVGSSSGNWHCDSQWLGDRVITTSTRTWALPTYNNHLYKQISNSTSGGSSNDNAYFGYSTPWGYFDFNRFHCHFSPRDWQRLINNNWGFRPKRLNFKLFNIQVKEVTDNNGVKTIANNLTSTVQVFTDSDYQLPYVLGSAHEGCLPPFPADVFMIPQYGYLTLNDGSQAVGRSSFYCLEYFPSQMLRTGNNFQFSYEFENVPFHSSYAHSQSLDRLMNPLIDQYLYYLSKTINGSGQNQQTLKFSVAGPSNMAVQGRNYIPGPSYRQQRVSTTVTQNNNSEFAWPRASSWALNGRNSLMNPGPAMASHKEGEDRFFPLSGSLIFGKQGTGRDNVDADKVMITNEEEIKTTNPVATESYGQVATNHQSAQAQAQTGWVQNQGILPGMVWQDRDVYLQGPIWAKIPHTDGNFHPSPLMGGFGMKHPPPQILIKNTPVPADPPTAFNKDKLNSFITQYSTGQVSVEIEWERQKENSKRWNPEIQYTSNYYKSNNVEFAVNTEGVYSEPRPIGTRYLTRNL

SEQ ID NO: 610 - protein, 736 aa, Artificial Sequence
  source: /note="Description of Artificial Sequence: Synthetic polypeptide"
MAADGYLPDWLEDNLSEGIREWWALKPGAPQPKANQQHQDNARGLVLPGYKYLGPGNGLDKGEPVNAADAAALEHDKAYDQQLKAGDNPYLKYNHADAEFQERLKEDTSFGGNLGRAVFQAKKRLLEPLGLVEEAAKTAPGKKRPVEQSPQEPDSSAGIGKSGAQPAKKRLNFGQTGDTESVPDPQPIGEPPAAPSGVGSLTMASGGGAPVADNNEGADGVGSSSGNWHCDSQWLGDRVITTSTRTWALPTYNNHLYKQISNSTSGGSSNDNAYFGYSTPWGYFDFNRFHCHFSPRDWQRLINNNWGFRPKRLNFKLFNIQVKEVTDNNGVKTIANNLTSTVQVFADSDYQLPYVLGSAHEGCLPPFPADVFMIPQYGYLTLNDGSQAVGRSSFYCLEYFPSQMLRTGNNFQFSYEFENVPFHSSYAHSQSLDRLMNPLIDQYLYYLSKTINGSGQNQQTLKFSVAGPSNMAVQGRNYIPGPSYRQQRVSTTVTQNNNSEFAWPRASSWALNGRNSLMNPGPAMASHKEGEDRFFPLSGSLIFGKQGTGRDNVDADKVMITNEEEIKTTNPVATESYGQVATNHQSAQAQAQTGWVQNQGILPGMVWQDRDVYLQGPIWAKIPHTDGNFHPSPLMGGFGMKHPPPQILIKNTPVPADPPTAFNKDKLNSFITQYSTGQVSVEIEWELQKENSKRWNPEIQYTSNYYKSNNVEFAVNTEGVYSEPRPIGTRYLTRNL

SEQ ID NO: 611 - protein, 736 aa, Artificial Sequence
  source: /note="Description of Artificial Sequence: Synthetic polypeptide"
MAADGYLPDWLEDNLSEGIREWWALKPGAPQPKANQQHQDNARGLVLPGYKYLGPGNGLDKGEPVNAADAAALEHDKAYDQQLKAGDNPYLKYNHADAEFQERLKEDTSFGGNLGRAVFQAKKRLLEPLGLVEEAAKTAPGKKRPVEQSPQEPDSSAGIGKSGAQPAKKRLNFGQTGDTESVPDPQPIGEPPAAPSGVGSLTMASGGGAPVADNNEGADGVGSSSGNWHCDSQWLGDRVITTSTRTWALPTYNNHLYKQISNSTSGGSSNDNAYFGYSTPWGYFDFNRFHCHFSPRDWQRLINNNWGFRPKRLNFKLFNIQVKEVTDNNGVKTIANNLTSTVQVFTDSDYQLPYVLGSAHEGCLPPFPADVFMIPQYGYLTLNDGSQAVGRSSFYCLEYFPSQMLRTGNNFQFSYEFENVPFHSSYAHSQSLDRLMNPLIDQYLYYLSKTINGSGQNQQTLKFSVAGPSNMAVQGRNYIPGPSYRQQRVSTTVTQNNNSEIAWPRASSWALNGRNSLMNPGPAMASHKEGEDRFFPLSGSLIFGKQGTGRDNVDADKVMITNEEEIKTTNPVATESYGQVATNHQSAQAQAQTGWVQNQGILPGMVWQDRDVYLQGPIWAKIPHTDGNFHPSPLMGGFGMKHPPPQILIKNTPVPADPPTAFNKDKLNSFITQYSTGQVSVEIEWELQKENSKRWNPEIQYTSNYCKSNNVEFAVNTEGVYSEPRPIGTRYLTRNL

SEQ ID NO: 612 - protein, 736 aa, Artificial Sequence; identical to SEQ ID NO: 608
  source: /note="Description of Artificial Sequence: Synthetic polypeptide"

SEQ ID NO: 613 - DNA, 2208 bp, Artificial Sequence
  source: /note="Description of Artificial Sequence: Synthetic polynucleotide"
atggctgccgatggttatcttccagattggctcgaggacaaccttagtgaaggaattcgcgagtggtgggctttgaaacctggagcccctcaacccaaggcaaatcaacaacatcaagacaacgctcgaggtcttgtgcttccgggttacaaataccttggacccggcaacggactcgacaagggggagccggtcaacgcagcagacgcggcggccctcgagcacgacaaggcctacgaccagcagctcaaggccggagacaacccgtacctcaagtacaaccacgccgacgccgagttccaggagcggctcaaagaagatacgtcttttgggggcaacctcgggcgagcagtcttccaggccaaaaagaggcttcttgaacctcttggtctggttgaggaagcggctaagacggctcctggaaagaagaggcctgtagagcagtctcctcaggaaccggactcctccgcgggtattggcaaatcgggtgcacagcccgctaaaaagagactcaatttcggtcagactggcgacacagagtcagtcccagaccctcaaccaatcggagaacctcccgcagccccctcaggtgtgggatctcttacaatggcttcaggtggtggcgcaccagtggcagacaataacgaaggtgccgatggagtgggtagttcctcgggaaattggcattgcgattcccaatggctgggggacagagtcatcaccaccagcacccgaacctgggccctgcccacctacaacaatcacctctacaagcaaatctccaacagcacatctggaggatcttcaaatgacaacgcctacttcggctacagcaccccctgggggtattttgacttcaacagattccactgccacttctcaccacgtgactggcagcgactcatcaacaacaactggggattccggcctaagcgactcaacttcaagctcttcaacattcaggtcaaagaggttacggacaacaatggagtcaagaccatcgccaataaccttaccagcacggtccaggtcttcacggactcagactatcagctcccgtacgtgctcgggtcggctcacgagggctgcctcccgccgttcccagcggacgttttcatgattcctcagtacgggtatctgacgcttaatgatggaagccaggccgtgggtcgttcgtccttttactgcctggaatatttcccgtcgcaaatgctaagaacgggtaacaacttccagttcggctacgagtttgagaacgtacctttccatagcagctacgctcacagccaaagcctggaccgactaatgaatccactcatcgaccaatacttgtactatctctcaaagactattaacggttctggacagaatcaacaaacgctaaaattcagtgtggccggacccagcaacatggctgtccagggaagaaactacatacctggacccagctaccgacaacaacgtgtctcaaccactgtgactcaaaacaacaacagcgaatttgcttggcctggagcttcttcttgggctctcaatggacgtaatagcttgatgaatcctggacctgctatggccagccacaaagaaggagaggaccgtttctttcctttgtctggatctttaatttttggcaaacaaggaactggaagagacaacgtggatgcggacaaagtcatgataaccaacgaagaagaaattaaaactactaacccggtagcaacggagtcctatggacaagtggccacaaaccaccagagtgcccaagcacaggcgcagaccggctgggttcaaaaccaaggaatacttccgggtatggtttggcaggacagagatgtgtacctgcaaggacccatttgggccaaaattcctcacacggacggcaactttcacccttctccgctgatgggagggtttggaatgaagcacccgcctcctcagatcctcatcaaaaacacacctgtacctgcggatcctccaacggccttcaacaaggacaagctgaactctttcatcacccagtattctactggccaagtcagcgtggagatcgagtgggagctgcagaaggaaaacagcaagcgctgggacccggagatccagtacacttccaactattacaagtctaataatgttgaatttgctgttaatactgaaggtgtatatagtgaaccccgccccattggcaccagatacctgactcgtaatctg

SEQ ID NO: 614 - DNA, 2208 bp, Artificial Sequence
  source: /note="Description of Artificial Sequence: Synthetic polynucleotide"
atggctgccgatggttatcttccagattggctcgaggacaaccttagtgaaggaattcgcgagtggtgggctttgaaacctggagcccctcaacccaaggcaaatcaacaacatcaagacaacgctcgaggtcttgtgcttccgggttacaaataccttggacccggcaacggactcgacaagggggagccggtcaacgcagcagacgcggcggccctcgagcacgacaaggcctacgaccagcagctcaaggccggagacaacccgtacctcaagtacaaccacgccgacgccgagttccaggagcggctcaaagaagatacgtcttttgggggcaacctcgggcgagcagtcttccaggccaaaaagaggcttcttgaacctcttggtctggttgaggaagcggctaagacggctcctggaaagaagaggcctgtagagcagtctcctcaggaaccggactcctccgcgggtattggcaaatcgggtgcacagcccgctaaaaagagactcaatttcggtcagactggcgacacagagtcagtcccagaccctcaaccaatcggagaacctcccgcagccccctcaggtgtgggatctcttacaatggcttcaggtggtggcgcaccagtggcagacaataacgaaggtgccgatggagtgggtagttcctcgggaaattggcattgcgattcccaatggctgggggacagagtcatcaccaccagcacccgaacctgggccctgcccacctacaacaatcacctctacaagcaaatctccaacagcacatctggaggatcttcaaatgacaacgcctacttcggctacagcaccccctgggggtattttgacttcaacagattccactgccgcttctcaccacgtgactggcagcgactcatcaacaacaactggggattccggcctaagcgactcaacttcaagctcttcaacattcaggtcaaagaggttacggacaacaatggagtcaagaccatcgccaataaccttaccagcacggtccaggtcttcacggactcagactatcagctcccgtacgtgctcgggtcggctcacgagggctgcctcccgccgttcccagcggacgttttcatgattcctcagtacgggtatctgacgcttaatgatggaagccaggccgtgggtcgttcgtccttttactgcctggaatatttcccgtcgcaaatgctaagaacgggtaacaacttccagttcagctacgagtttgagaacgtacctttccatagcagctacgctcacagccaaagcctggaccgactaatgaatccactcatcgaccaatacttgtactatctctcaaagactattaacggttctggacagaatcaacaaacgctaaaattcagtgtggccggacccagcaacatggctgtccagggaagaaactacatacctggacccagctaccgacaacaacgtgtctcaaccactgtgactcaaaacaacaacagcgaatttgcttggcctggagcttcttcttgggctctcaatggacgtaatagcttgatgaatcctggacctgctatggccagccacaaagaaggagaggaccgtttctttcctttgtctggatctttaatttttggcaaacaaggaactggaagagacaacgtggatgcggacaaagtcatgataaccaacgaagaagaaattaaaactactaacccggtagcaacggagtcctatggacaagtggccacaaaccaccagagtgcccaagcacaggcgcagaccggctgggttcaaaaccaaggaatacttccgggtatggtttggcaggacagagatgtgtacctgcaaggacccatttgggccaaaattcctcacacggacggcaactttcacccttctccgctgatgggagggtttggaatgaagcacccgcctcctcagatcctcatcaaaaacgcccctgtacctgcggatcctccaacggccttcaacaaggacaagctgaactctttcatcacccagtattctactggccaagtcagcgtggagatcgagtgggagctgcagaaggaaaacagcaagcgctggaacccggagatccagtacacttccaactattacaagtctaataatgttgaatttgctgttaatactgaaggtgtatatagtgaaccccgccccattggcaccagatacctgactcgtaatctg

SEQ ID NO: 615 - DNA, 2208 bp, Artificial Sequence
  source: /note="Description of Artificial Sequence: Synthetic polynucleotide"
atggctgccgatggttatcttccagattggctcgaggacaaccttagtgaaggaattcgcgagtggtgggctttgaaacctggagcccctcaacccaaggcaaatcaacaacatcaagacaacgctcgaggtcttgtgcttccgggttacaaataccttggacccggcaacggactcgacaagggggagccggtcagcgcagcagacgcggcggccctcgagcacgacaaggcctacgaccagcagctcaaggccggagacaacccgtacctcaagtacaaccacgccgacgccgagttccaggagcggctcaaagaagatacgtcttttgggggcaacctcgggcgagcagtcttccaggccaaaaagaggcttcttgaacctcttggtctggttgaggaagcggctaagacggctcctggaaagaagaggcctgtagagcagtctcctcaggaaccggactcctccgcgggtattggcaaatcgggtgcacagcccgctaaaaagagactcaatttcggtcagactggcgacacagagtcagtcccagaccctcaaccaatcggagaacctcccgcagccccctcaggtgtgggatctcttacaatggcttcaggtggtggcgcaccagtggcagacaataacgaaggtgccgatggagtgggtagttcctcgggaaattggcattgcgattcccaatggctgggggacagagtcatcaccaccagcacccgaacctgggccctgcccacctacaacaatcacctctacaagcaaatctccaacagcacatctggaggatcttcaaatgacaacgcctacttcggctacagcaccccctgggggtattttgacttcaacagattccactgccacttctcaccgcgtgactggcagcgactcatcaacaacaactggggattccggcctaagcgactcaacttcaagctcttcaacattcaggtcaaagaggttacggacaacaatggagtcaagaccatcgccaataaccttaccagcacggtccaggtcttcacggactcagactatcagctcccgtacgtgctcgggtcggctcacgagggctgcctcccgccgttcccagcggacgttttcatgattcctcagtacgggtatctgacgcttaatgatggaagccaggccgtgggtcgttcgtccttttactgcctggaatatttcccgtcgcaaatgctaagaacgggtaacaacttccagttcagctacgagtttgagaacgtacctttccatagcagctacgctcacagccaaagcctggaccgactaatgaatccactcatcgaccaatacttgtactatctctcaaagactattaacggttctggacagaatcaacaaacgctaaaattcagtgtggccggacccagcaacatggctgtccagggaagaaactacatacctggacccagctaccgacaacaacgtgtctcaaccactgtgactcaaaacaacaacagcgaatttgcttggcctggagcttcttcttgggctctcaatggacgtaatagcttgatgaatcctggacctgctatggccagccacaaagaaggagaggaccgtttctttcctttgtctggatctttaatttttggcaaacaaggaactggaagagacaacgtggatgcggacaaagtcatgataaccaacgaagaagaaattaaaactactaacccggtagcaacggagtcctatggacaagtggccacaaaccaccagagtgcccaagcacaggcgcagaccggctgggttcaaaaccaaggaatacttccgggtatggtttggcaggacagagatgtgtacctgcaaggacccatttgggccaaaattcctcacacggacggcaactttcacccttctccgctgatgggagggtttggaatgaagcacccgcctcctcagatcctcatcaaaaacacacctgtacctgcggatcctccaacggccttcaacaaggacaagctgaactctttcatcacccagtattctactggccaagtcagcgtggagatcgagtgggagctgcagaaggaaaacagcaagcgctggaacccggagatccagtacacttccaactattacaagtctaataatgttgaatttgctgttaatactgaaggtgtatatagtgaaccccgccccattggcaccagatacctgactcgtaatctg

SEQ ID NO: 616 - DNA, 2208 bp, Artificial Sequence
  source: /note="Description of Artificial Sequence: Synthetic polynucleotide"
atggctgccgatggttatcttccagattggctcgaggacaaccttagtgaaggaattcgcgagtggtgggctttgaaacctggagcccctcaacccaaggcaaatcaacaacatcaagacaacgctcgaggtcttgtgcttccgggttacaaataccttggacccggcaacggactcgacaagggggagccggtcaacgcagcagacgcggcggccctcgagcacgacaaggcctacgaccagcagctcaaggccggagacaacccgtacctcaagtacaaccacgccgacgccgagttccaggagcggctcaaagaagatacgtcttttgggggcaacctcgggcgagcagtcttccaggccaaaaagaggcttcttgaacctcttggtctggttgaggaagcggctaagacggctcctggaaagaagaggcctgtagagcagtctcctcaggaaccggactcctccgcgggtattggcaaatcgggtgcacagcccgctaaaaagagactcaatttcggtcagactggcgacacagagtcagtcccagaccctcaaccaatcggagaacctcccgcagccccctcaggtgtgggatctcttacaatggcttcaggtggtggcgcaccagtggcagacaataacgaaggtgccgatggagtgggtagttcctcgggaaattggcattgcgattcccaatggctgggggacagagtcatcaccaccagcacccgaacctgggccctgcccacctacaacaatcacctctacaagcaaatctccaacagcacatctggaggatcttcaaatgacaacgcctacttcggctacagcaccccctgggggtattttgacttcaacagattccactgccacttctcaccacgtgactggcagcgactcatcaacaacaactggggattccggcctaagcgactcaacttcaagctcttcaacattcaggtcaaagaggttacggacaacaatggagtcaagaccatcgccaataaccttaccagcacggtccaggtcttcacggactcagactatcagctcccgtacgtgctcgggtcggctcacgagggctgcctcccgccgttcccagcggacgttttcatgattcctcagtacgggtatctgacgcttaatgatggaagccaggccgtgggtcgttcgtccttttactgcctggaatatttcccgtcgcaaatgctaagaacgggtaacaacttccagttcagctacgagtttgagaacgtacctttccatagcagctacgctcacagccaaagcctggaccgactaatgaatccactcatcgaccaatacttgtactatctctcaaagactattaacggttctggacagaatcaacaaacgctaaaattcagtgtggccggacccagcaacacggctgtccagggaagaaactacatacctggacccagctaccgacaacaacgtgtctcaaccactgtgactcaaaacaacaacagcgaatttgcttggcctggagcttcttcttgggctctcaatggacgtaatagcttgatgaatcctggacctgctatggccagccacaaagaaggagaggaccgtttctttcctttgtctggatctttaatttttggcaaacaaggaactggaagagacaacgtggatgcggacaaagtcatgataaccaacgaagaagaaattaaaactactaacccggtagcaacggagtcctatggacaagtggccacaaaccaccagagtgcccaagcacaggcgcagaccggctgggttcaaaaccaaggaatacttccgggtatggtttggcaggacagagatgtgtacctgcaaggacccatttgggccaaaattcctcacacggacggcaactttcacccttctccgctgatgggagggtttggaatgaagcacccgcctcctcagatcctcatcaaaaacacacctgtacctgcggatcctccaacggccttcaacaaggacaagctgaactctttcatcacccagtattctactggccaagtcagcgtggagatcgagtgggagctgcagaaggaaaacagcaagcgctggaacccggagatccagtacacttccaactattacaagtctaataatgttgaatttgctgttaatactgaaggtgtatatagtgaaccccgccccattggcaccagatacctgactcgtaatctg

SEQ ID NO: 617 - DNA, 2208 bp, Artificial Sequence
  source: /note="Description of Artificial Sequence: Synthetic polynucleotide"
atggctgccgatggttatcttccagattggctcgaggacaaccttagtgaaggaattcgcgagtggtgggctttgaaacctggagcccctcaacccaaggcaaatcaacaacatcaagacaacgctcgaggtcttgtgcttccgggttacaaataccttggacccggcaacggactcgacaagggggagccggtcaacgcagcagacgcggcggccctcgagcacgacaaggcctacgaccagcagctcaaggccggagacaacccgtacctcaagtacaaccacgccgacgccgagttccaggagcggctcaaagaagatacgtcttttgggggcaacctcgggcgagcagtcttccaggccaaaaagaggcttcttgaacctcttggtctggttgaggaagcggctaagacggctcctggaaagaagaggcctgtagagcagtctcctcaggaaccggactcctccgcgggtattggcaaatcgggtgcacagcccgctaaaaagagactcaatttcggtcagactggcgacacagagtcagtcccagaccctcaaccaatcggagaacctcccgcagccccctcaggtgtgggatctcttacaatggcttcaggtggtggcgcaccagtggcagacaataacgaaggtgccgatggagtgggtagttcctcgggaaattggcattgcgattcccaatggctgggggacagagtcatcaccaccagcacccgaacctgggccctgcccacctacaacaatcacctctacaagcaaatctccaacagcacatctggaggatcttcaaatgacaacgcctacttcggctacagcaccccctgggggtattttgacttcaacagattccactgccacttctcaccacgtgactggcagcgactcatcaacaacaactggggattccggcctaagcggctcaacttcaagctcttcaacattcaggtcaaagaggttacggacaacaatggagtcaagaccatcgccaataaccttaccagcacggtccaggtcttcacggactcagactatcagctcccgtacgtgctcgggtcggctcacgagggctgcctcccgccgttcccagcggacgttttcatgattcctcagtacgggtatctgacgcttaatgatggaagccaggccgtgggtcgttcgtccttttactgcctggaatatttcccgtcgcaaatgctaagaacgggtagcaacttccagttcagctacgagtttgagaacgtacctttccatagcagctacgctcacagccaaagcctggaccgactaatgaatccactcatcgaccaatacttgtactatctctcaaagactattaacggttctggacagaatcaacaaacgctaaaattcagtgtggccggacccagcaacatggctgtccagggaagaaactacatacctggacccagctaccgacaacaacgtgtctcaaccactgtgactcaaaacaacaacagcgaatttgcttggcctggagcttcttcttgggctctcaatggacgtaatagcttgatgaatcctggacctgctatggccagccacaaagaaggagaggaccgtttctttcctttgtctggatctttaatttttggcaaacaaggaactggaagagacaacgtggatgcggacaaagtcatgataaccaacgaagaagaaattaaaactactaacccggcagcaacggagtcctatggacaagtggccacaaaccaccagagtgcccaagcacaggcgcagaccggctgggttcaaaaccaaggaatacttccgggtatggtttggcaggacagagatgtgtacctgcaaggacccatttgggccaaaattcctcacacggacggcaactttcacccttctccgctgatgggagggtttggaatgaagcacccgcctcctcagatcctcatcaaaaacacacctgtacctgcggatcctccaacggccttcaacaaggacaagctgaactctttcatcacccagtattctactggccaagtcagcgtggagatcgagtgggagctgcagaaggaaaacagcaagcgctggaacccggagatccagcacacttccaactattacaagtctaataatgttgaatttgctgttaatactgaaggtgtatatagtgaaccccgccccattggcaccagatacctgactcgtaatctg

SEQ ID NO: 618 - DNA, 2208 bp, Artificial Sequence
  source: /note="Description of Artificial Sequence: Synthetic polynucleotide"
atggctgccgatggttatcttccagattggctcgaggacaaccttagtgaaggaattcgcgagtggtgggctttgaaacctggagcccctcaacccaaggcaaatcaacaacatcaagacaacgctcgaggtcttgtgcttccgggttacaaataccttggacccggcaacggactcgacaagggggagccggtcaacgcagcagacgcggcggccctcgagcacgacaaggcctacgaccagcagctcaaggccggagacaacccgtacctcaagtacaaccacgccgacgccgagttccaggagcggctcaaagaagatacgtcttttgggggcaacctcgggcgagcagtcttccaggccaaaaagaggcttcttgaacctcttggtctggttgaggaagcggctaagacggctcctggaaagaagaggcctgtagagcagtctcctcaggaaccggactcctccgcgggtattggcaaatcgggtgcacagcccgctaaaaagagactcaatttcggtcagactggcgacacagagtcagtcccagaccctcaaccaatcggagaacctcccgcagccccctcaggtgtgggatctcttacaatggcttcaggtggtggcgcaccagtggcagacaataacgaaggtgccgatggagtgggtagttcctcgggaaattggcattgcgattcccaatggctgggggacagagtcatcaccaccagcacccgaacctgggccctgcccacctacaacaatcacctctacaagcaaatctccaacagcacatctggaggatcttcaaatgacaacgcctacttcggctacagcaccccctgggggtattttgacttcaacagattccactgccacttctcaccacgtgactggcagcgactcatcaacaacaactggggattccggcctaagcgactcaacttcaggctcttcaacattcaggtcaaagaggttacggacaacaatggagtcaagaccatcgccaataaccttaccagcacggtccaggtcttcacggactcagactatcagctcccgtacgtgctcgggtcggctcacgagggctgcctcccgccgttcccagcggacgttttcatgattcctcagtacgggtatctgacgcttaatgatggaagccaggccgtgggtcgttcgtccttttactgcctggaatatttcccgtcgcaaatgctaagaacgggtaacaacttccagttcagctacgagtttgagaacgtacctttccatagcagctacgctcacagccaaagcctggaccgactaatgaatccactcatcgaccaatacttgtactatctctcaaagactattaacggttctggacagaatcaacaaacgctaaaattcagtgtggccggacccagcaacatggctgtccagggaagaaactacatacctggacccagctaccgacaacaacgtgtctcaaccactgtgactcaaaacaacaacagcgaatttgcttggcctggagcttcttcttgggctctcaatggacgtaatagcttgatgaatcctggacctgctatggccagccacaaagaaggagaggaccgtttctttcctttgtctggatctttaatttttggcaaacaaggaactggaagagacaacgtggatgcggacaaagtcatgataaccaacgaagaagaaattaaaactactaacccggtagcaacggagtcctatggacaagtggccacaaaccaccagagtgcccaagcacaggcgcagaccggctgggttcaaagccaaggaatacttccgggtatggtttggcaggacagagatgtgtacctgcaaggacccatttgggccaaaattcctcacacggacggcaactttcacccttctccgctgatgggagggtttggaatgaagcacccgcctccccagatcctcatcaaaaacacacctgtacctgcggatcctccaacggccttcaacaaggacaagctgaactctttcatcacccagtattctactggccaagtcagcgtggagatcgagtgggagctgcagaaggaaaacagcaagcgctggaacccggagatccagtacacttccaactattacaagtctaataatgttgaatttgctgttaatactgaaggtgtatatagtgaaccccgccccattggcaccagatacctgactcgtaatctg

SEQ ID NO: 619 - DNA, 2205 bp, Artificial Sequence
  source: /note="Description of Artificial Sequence: Synthetic polynucleotide"
atggctgccgatggttatcttccagattggctcgaggacaaccttagtgaaggaattcgcgagtggtgggctttgaaacctggagcccctcaacccaaggcaaatcaacaacatcaagacaacgcccgaggtcttgtgcttccgggttacaaataccttggacccggcaacggactcgacaagggggagccggtcaacgcagcagacgcggcggccctcgagcacgacaaggcctacgaccagcagctcaaggccggagacaacccgtacctcaagtacaaccacgccgacgccgagttccaggagcggctcaaagaagatacgtcttttgggggcaacctcgggcgagcagtcttccaggccaaaaagaggcttcttgaacctcttggtctggttgaggaagcggctaagacggctcctggaaagaagaggcctgtagagcagtctcctcaggaaccggactcctccgcgggtattggcaaatcgggtgcacagcccgctaaaaagagactcaatttcggtcagactggcgacacagagtcagtcccagaccctcaaccaatcggagaacctcccgcagccccctcaggtgtgggatctcttacaatggcttcaggtggtggcgcaccagtggcagacaataacgaaggtgccgatggagtgggtagttcctcgggaaattggcattgcgattcccaatggctgggggacagagtcatcaccaccagcacccgaacctgggccctgcccacctacaacaatcacctctacaagcaaatctccaacagcacatctggaggatcttcaaatgacaacgcctacttcggctacagcaccccctggaggtattttgacttcaacagattccactgccacttctcaccacgtgactggcagcgactcatcaacaactggggattccggcctaagcgactcaacttcaagctcttcaacattcaggtcaaagaggttacggacaacaatggagtcaagaccatcgccaataaccttaccagcacggtccaggccttcacggactcagactatcagctcccgtacgtgctcgggtcggctcacgagggctgcctcccgccgttcccagcggacgttttcatgattcctcagtacgggtatctgacgcttaatgatggaagccaggccgtgggtcgttcgtccttttactgcctggaatatttcccgtcgcaaatgctaagaacgggtaacaacttccagttcagctacgagtttgagaacgtacctttccatagcagctacgctcacagccaaagcctggaccgactaatgaatccactcatcgaccaatacttgtactatctctcaaagactattaacggttctggacagaatcaacaaacgctaaaattcagtgtggccggacccagcaacatggctgtccagggaagaaactacatacctggacccagctaccgacaacaacgtgtctcaaccactgtgactcaaaacaacaacagcgaatttgcttggcctggagcttcttcttgggctctcaatggacgtaatagcttgatgaatcctggacctgctatggccagccacaaagaaggagaggaccgtttctttcctttgtctggatctttaatttttggcaaacaaggaactggaagagacaacgtggatgcggacaaagtcatgataaccaacgaagaagaaattaaaactactaacccggtagcaacggagtcctatggacaagtggccacaaaccaccagagtgcccaagcacaggcgcagaccggctgggttcaaaaccaaggaatacttccgggtatggtttggcaggacagagatgtgtacctgcaaggacccatttgggccaaaattcctcacacggacggcaactttcacccttctccgctgatgggagggtttggaatgaagcacccgcctcctcagatcctcatcaaaaacacacctgtacctgcggatcctccaacggccttcaacaaggacgagctgaactctttcatcacccagtattctactggccaagtcagcgtggagatcgagtgggagctgcagaaggaaaacagcaagcgctggaacccggagatccagtacacttccaactattacaagtctaataatgttgaatttgctgttaatactgaaggtgtatatagtgaaccccgccccattggcaccagatacctgactcgtaatctg

SEQ ID NO: 620 - DNA, 2205 bp, Artificial Sequence
  source: /note="Description of Artificial Sequence: Synthetic polynucleotide"
atggctgccgatggttatcttccagattggctcgaggacaaccttagtgaaggaattcgcgagtggtgggctttgaaacctggagcccctcaacccaaggcaaatcaacaacatcaagacaacgctcgaggtcttgtgcttccgggttacaaataccttggacccggcaacggactcgacaagggggagccggtcaacgcagcagacgcggcggccctcgagcacgacaaggcctacgaccagcagctcaaggccggagacaacccgtacctcaagtacaaccacgccgacgccgagttccaggagcggctcaaagaagatacgtcttttgggggcaacctcgggcgagcagtcttccaggacaaaaagaggcttcttgaacctcttggtctggttgaggaagcggctaagacggctcctggaaagaagaggcctgtagagcagtctcctcaggaaccggactcctccgcgggtattggcaaatcgggtgcacagcccgctaaaaagagactcaatttcggtcagactggcgacacagagtcagtcccagaccctcaaccaatcggagaacctcccgcagccccctcaggtgtgggatctcttacaatggcttcaggtggtggcgcaccagtggcagacaataacgaaggtgccgatggagtgggtagttcctcgggaaattggcattgcgattcccaatggctgggggacagagtcatcaccaccagcacccgaacctgggccctgcccacctacaacaatcacctctacaagcaaatctccaacagcacatctggaggatcttcaaatgacaacgcctacttcggctacagcaccccctgggggtattttgacttcaacagattccactgccacttctcaccacgtgactggcagcgactcatcaacaactggggattccggcctaagcgactcaacttcaagctcttcaacattcaggtcaaagaggttacggacaacaatggagtcaagaccatcgccaataaccttaccagcacggtccaggtcttcacggactcagactatcagctcccgtacgtgctcgggtcggctcacgagggctgcctcccgccgttcccagcggacgttttcatgattcctcagtacgggtatctgacgcttaatgatggaagccaggccgtgggtcgttcgtccttttactgcctggaatatttcccgtcgcaaatgctaagaacgggtaacaacttccaattcagctacgagtttgagaacgtacctttccatagcagctacgctcacagccaaagcctggaccgactaatgaatccactcatcgaccaatacttgtactatctctcaaagactattaacggttctggacagaatcaacaaacgctaaaattcagtgtggccggacccagcaacatggctgtccagggaagaaactacatacctggacccagctaccgacaacaacgtgtctcaaccactgtgactcaaaacaacaacagcgaatttgcttggcctggagcttcttcttgggctctcaatggacgtaatagcttgatgaatcctggacctgctatggccagccacaaagaaggagaggaccgtttctttcctttgtctggatctttaatttttggcaaacaaggaactggaagagacaacgtggatgcggacaaagtcatgataaccaacgaagaagaaattaaaactactaacccggtagcaacggagtcctatggacaagtggccacaaaccaccagagtgcccaagcacaggcgcagaccggctgggttcaaaaccaaggaatacttccgggtatggtttggcaggacagagatgtgtacctgcaaggacccatttgggccaaaattcctcacacggacggcaactttcacccttctccgctgatgggagggtttggaatgaagcacccgcctcctcagatcctcatcaaaaacacacctgtacctgcggatcctccaacggccttcaacaaggacaagctgaactctttcatcacccagtattctactggccaagtcagcgtggagatcgagtgggagctgcagaaggaaaacagcaagcgctggaacccggagatccagtacacttccaactattacaagtctaataatgttgaatttgctgttaatactgaaggtgtatatagtgaaccccgccccattggcaccagatacctgactcgtaatctg

SEQ ID NO: 621 - DNA, 2208 bp, Artificial Sequence
  source: /note="Description of Artificial Sequence: Synthetic polynucleotide"
atggctgccgatggttatcttccagattggctcgaggacaaccttagtgaaggaattcgcgagtggtgggctttgaaacctggagcccctcaacccaaggcaaatcaacaacatcaagacaacgctcgaggtcttgtgcttccgggttacaaataccttggacccggcaacggactcgacaagggggagccggtcaacgcagcagacgcggcggccctcgagcacgacaaggcctacgaccagcagctcaaggccggagacaacccgtacctcaagtacaaccacgccgacgccgagttccaggagcggctcaaagaagatacgtcttttgggggcaacctcgggcgagcagtcttccaggccaaaaagaggcttcttgaacctcttggtctggttgaggaagcggctaagacggctcctggaaagaagaggcctgtagagcagtctcctcaggaaccggactcctccgcgggtattggcaaatcgggtgcacagcccgctaaaaagagactcaatttcggtcagactggcgacacagagtcagtcccagaccctcaaccaatcggagaacctcccgcagccccctcaggtgtgggatctcttacaatggcttcaggtggtggcgcaccagtggcagacaataacgaaggtgccgatggagtgggtagttcctcgggaaattggcattgcgattcccaatggctgggggacagagccatcaccaccagcacccgaacctgggccctgcccacctacaacaatcacctctacaagcaaatctccaacagcacatctggaggatcttcaaatgacaacgcctacttcggctacagcaccccctgggggtattttgacttcaacagattccactgccacttctcaccacgtgactggcagcggctcatcaacaacaactggggattccggcctaagcgactcaacttcaagctcttcaacattcaggtcaaagaggttacggacaacaatggagtcaagaccatcgccaataaccttaccagcacggtccaggtcttcacggactcagactatcagctcccgtacgtgctcgggtcggctcacgagggctgcctcccgccgttcccagcggacgttttcatgattcctcagtacgggtatctgacgcttaatgatggaagccaggccgtgggtcgttcgtccttttactgcctggaatatttcccgtcgcaaatgctaagaacgggtaacaacttccagttcagctacgagtttgagaacgtacctttccatagcagctacgctcacagccaaagcctggaccgactaatgaatccactcatcgaccaatacttgtactatctctcaaagactattaacggttctggacagaatcaacaaacgctaaaattcagtgtggccggacccagcaacatggctgtccagggaagaaactacatacctggacccagctaccgacaacaacgtgtctcaaccactgtgactcaaaacaacaacagcgaatttgcttggcctggagcttcttcttgggctctcaatggacgtaatagcttgatgaatcctggacctgctatggccagccacaaagaaggagaggaccgtttctttcctttgtctggatctttaatttttggcaaacaaggaactggaagagacaacgtggatgcggacaaagtcatgacaaccaacgaagaagaaattaaaactactaacccggtagcaacggagtcctatggacaagtggccacaaaccaccagagtgcccaagcacaggcgcagaccggctgggttcaaaaccaaggaatacttccgggtatggtttggcaggacagagatgtgtacctgcaaggacccatttgggccaaaattcctcacacggacggcaactttcacccttctccgctgatgggagggtttggaatgaagcacccgcctcctcagatcctcatcaaaaacacacctgtacctgcggatcctccaacggccttcaacaaggacaagctgaactctttcatcacccagtattctactggccaagtcagcgtggagatcgagtgggagctgcagaaggaaaacagcaagcgctggaacccggagatccagtacacttccaactattacaagtctaataatgttgaatttgctgttaatactgaaggtgtatatagtgaaccccgccccattggcaccagatacctgactcgtaatctg

SEQ ID NO: 622 - DNA, 2208 bp, Artificial Sequence
  source: /note="Description of Artificial Sequence: Synthetic polynucleotide"
atggctgccgatggttatcttccagattggctcgaggacaaccttagtgaaggaattcgcgagtggtgggctttgaaacctggagcccctcaacccaaggcaaatcaacaacatcaagacaacgctcgaggtcttgtgcttccgggttacaaataccttggacccggcaacggactcgacaagggggagccggtcaatgcagcagacgcggcggccctcgagcacgacaaggcctacgaccagcagctcaaggccggagacaacccgtacctcaagtacaaccacgccgacgccgagttccaggagcggctcaaagaagatacgtcttttgggggcaacctcgggcgagcagtcttccagaccaaaaagaggcttcttgaacctcttggtctggttgaggaagcggctaagacggctcctggaaagaagaggcctgtagagcagtctcctcaggaaccgggctcctccgcgggtattggcaaatcgggtgcacagcccgctaaaaagagactcaatttcggtcagactggcgacacagagtcagtcccagaccctcaaccaatcggagaacctcccgcagccccctcaggtgtgggatctcttacaatggcttcaggtggtggcgcaccagtggcagacaataacgaaggtgccgatggagtgggtagttcctcgggaaattggcattgcgattcccaatggctgggggacagagtcatcaccaccagcacccgaacctgggccctgcccacctacaacaatcacctctacaagcaaatctccaacagcacatctggaggatcttcaaatgacaacgcctacttcggctacagcaccccctgggggtattttgacttcaacagattccactgccacttctcaccacgtgactggcagcgactcatcaacaacaactggggattccggcctaagcgactcaacttcaagctcttcaacattcaggtcaaagaggttacggacaacaatggagtcaagaccatcgccaataaccttaccagcacggtccaggtcttcacggactcagactatcagctcccgtacgtgctcgggtcggctcacgagggctgcctcccgccgttcccagcggacgttttcatgattcctcagtacgggtatctgacgcttaatgatggaagccaggccgtgggtcgttcgtccttttactgcctggaatatttcccgtcgcaaatgctaagaacgggtaacaacttccagttcagctacgagtttgagaacgtacctttccatagcagctacgctcacagccaaagcctggaccgactaatgaatccactcatcgaccaatacttgcactatctctcaaagactattaacggttctggacagaatcaacaaacgctaaaattcagtgtggccggacccagcaacatggctgtccagggaagaaactacatacctggacccagctaccgacaacaacgtgtctcaaccactgtgactcaaaacaacaacagcgaatttgcttggcctggagcttcttcttgggctctcaatggacgtaatagcttgatgaatcctggacctgctatggccagccacaaagaaggagaggaccgtttctttcctttgtctggatctttaatttttggcaaacaaggaactggaagagacaacgtggatgcggacaaagtcatgataaccaacgaagaagaaattaaaactactaacccggtagcaacggagtcctatggacaagtggccacaaaccaccagagtgcccaagcacaggcgcagaccggctgggttcaaaaccaaggaatacttccgggtatggtttggcaggacagagatgtgtacctgcaaggacccatttgggccaaaattcctcacacggacggcaactttcacccttctccgctgatgggagggtttggaatgaagcacccgcctcctcagatcctcatcaaaaacacacctgtacctgcggatcctccaacggccttcaacaaggacaagctgaactctttcatcacccagtattctactggccaagtcagcgtggagatcgagtgggagctgcagaaggaaaacagcaagcgctggaacccggagatccagtacacttccaactattacaagtctaataatgttgaatttgctgttaatactgaaggtgtatatagtgaaccccgccccattggcaccagatacctgactcgtaatctg

SEQ ID NO: 623 - DNA, 2208 bp, Artificial Sequence
  source: /note="Description of Artificial Sequence: Synthetic polynucleotide"
atggctgccgatggttattttccagattggctcgaggacaaccttagtgaaggaattcgcgagtggtgggctttgaaacctggagcccctcaacccaaggcaaatcaacaacatcaagacaacgctcgaggtcttgtgcttccgggttacaaataccttggacccggcaacggactcgacaagggggagccggtcaacgcagcagacgcggcggccctcgagcacgacaaggcctacgaccagcagctcaaggccggagacaacccgtacctcaagtacaaccacgccgacgccgagttccaggagcggctcaaagaagatacgtcttttgggggcaacctcgggcgagcagtcttccaggccaaaaagaggcttcttgaacctcttggtctggttgaggaagcggctaagacggctcctggaaagaagaggcctgtagagcagtctcctcaggaaccggactcctccgcgggtattggcaaatcgggtgcacagcccgctaaaaagagactcaatttcggtcagactggcgacacagagtcagtcccagaccctcaaccaatcggagaatctcccgcagccccctcaggtgtgggatctcttacaatggcttcaggtggtggcgcaccagtggcagacaataacgaaggtgccgatggagtgggtagttcctcgggaaattggcattgcgattcccaatggctgggggacagagtcatcaccaccagcacccgaacctgggccctgcccacctacaacaatcacctctacaagcaaatctccaacagcacatctggaggatcttcaaatgacaacgcctacttcggctacagcaccccctgggggtattttgacttcaacagattccactgccacttctcaccacgtgactggcagcgactcatcaacaacaactggggattccggcctaagcgactcaacttcaagctcttcaacattcaggtcaaagaggttacggacaacaatggagtcaagaccatcgccaataaccttaccagcacggtccaggtcttcacggactcagactatcagctcccgtacgtgctcgggtcggctcacgagggctgcctcccgccgttcccagcggacgttttcatgattcctcagtacgggtatctgacgcttaatgatggaagccaggccgtgggtcgttcgtccttttactgcctggaatatctcccgtcgcaaatgctaagaacgggtaacaacttccagttcagctacgagtttgagaacgtacctttccatagcagctacgctcacagccaaagcctggaccgactaatgaatccactcatcgaccaatacttgcactatctctcaaagactattaacggttctggacagaatcaacaaacgctaaaattcagtgtggccggacccagcaacatggctgtccagggaagaaactacatacctggacccagctaccgacaacaacgtgtctcaaccactgtgactcaaaacaacaacagcgaatttgcttggcctggagcttcttcttgggctctcaatggacgtaatagcttgatgaatcctggacctgctgtggccagccacaaagaaggagaggaccgtttctttcctttgtctggatctttaatttttggcaaacaaggaactggaagagacaacgtggatgcggacaaagtcatgataaccaacgaagaagaaattaaaactactaacccggtagcaacggagtcctatggacaagtggccacaaaccaccagagtgcccaagcacaggcgcagaccggctgggttcaaaaccaaggaatacttccgggtatggtttggcaggacagagatgtgtacctgcaaggacccatttgggccaaaattcctcacacggacggcaactttcacccttctccgctgatgggagggtttggaatgaagcacccgcctcctcagatcctcatcaaaaacacacctgtacctgcggatcctccaacggccttcaacaaggacaagctgaactctttcatcacccagtattctactggccaagtcagcgtggagatcgagtgggagctgcagaaggaaaacagcaagcgctggaacccggagatccagtacacttccaactattacaagtctaataatgttgaatttgctgttaatactgaaggtgtatatagtgaaccccgccccattggcaccagatacctgactcgtaatctg

SEQ ID NO: 624 - DNA, 2208 bp, Artificial Sequence
  source: /note="Description of Artificial Sequence: Synthetic polynucleotide"
atggctgccgatggttatcttccagattggctcgaggacaaccttagtgaaggaattcgcgagtggtgggctttgaaacctggagcccctcaacccaaggcaaatcaacaacatcaagacaacgctcgaggtcttgtgcttccgggttacaaataccttggacccggcaacggactcgacaagggggagccggtcaacgcagcagacgcggcggccctcgagcacgacaaggcctacgaccagcagctcaaggccggagacaacccgtacctcaagtacaaccacgccgacgccgagttccaggagcggctcaaagaagatacgtcttttgggggcaacctcgggcgagcagtcttccaggccaaaaagaggcttcttgaacctcttggtccggttgaggaagcggctaagacggctcctggaaagaagaggcctgtagagcagtctcctcaggaaccggactcctccgcgggtattggcaaatcgggtgcacagcccgctaaaaagagactcaatttcggtcagactggcgacacagagtcagtcccagaccctcaaccaatcggagaacctcccgcagccccctcaggtgtgggatctcttacaatggcttcaggtggtggcgcaccagtggcagacaataacgaaggtgccgatggagtgggtagttcctcgggaaattggcattgcgattcccaatggctgggggacagagtcatcaccaccagcacccgaacctgggccctgcccacctacaacaatcacctctacaagcaaatctccaacagcacatctggaggatcttcaaatgacaacgcctacttcggctacagcaccccctgggggtattttgacttcaacagattccactgccacttctcaccacgtgactggcagcgactcatcaacaacaactggggattccggcctaagcgactcaacttcaagctcttcaacattcaggtcaaagaggttacggacaacaatggagtcaagaccatcgccaataaccttaccagcacggtccaggtcttcacggactcagactatcagctcccgtacgtgctcgggtcggctcacgagggctgcctcccgccgttcccagcggacgttttcatgattcctcagtacgggtatctgacgcttaatgatggaagccaggccgtgggtcgttcgtccttttactgcctggaatatttcccgtcgcaaatgctaagaacgggtaacaacttccagttcagctacgagtttgagaacgtacctttccatagcagctacgctcacagccaaagcctggaccgactaatgaatccactcatcgaccaatacttgtactatctctcaaagactattaacggttctggacagaatcaacaaacgctaaaattcagtgtggccggacccagcaacatggctgtccagggaagaaactacatacctggacccagctaccgacaacaacgtgtctcaaccactgtgactcaaaacaacaacagcgaatttgcttggcctggagcttcttcttgggctctcaatggacgtaatagcttgatgaatcctggacctgctatggccagccacaaagaaggagaggaccgtttctttcctttgtctggatctttaatttttggcaaacaaggaactggaagagacaacgtggatgcggacaaagtcatgataaccaacgaagaagaaattaaaactactaacccggtagcaacggagtcctatggacaagcggccacaaaccaccagagtgcccaagcacaggcgcagaccggctgggttcaaaaccaaggaatacttccgggtatggtttggcaggacagagatgtgtacctgcaaggacccatttgggccaaaattcctcacacggacggcaactttcacccttctccgctgatgggagggtttggaatgaagcacccgcctcctcagatcctcatcaaaaacacacctgtacctgcggatcctccaacggccttcaacaaggacaagctgaactctttcatcacccagtattctactggccaagtcagcgtggagatcgagtgggagctgcagaaggaaaacagcaagcgctggaacccggagatccagtacacttccaactattacaagtctaataatgttgaatttgctgttaatactgaaggtgtatatagtgaaccccgccccattggcaccagatacctgactcgtaatctg

SEQ ID NO: 625 - DNA, 2208 bp, Artificial Sequence
  source: /note="Description of Artificial Sequence: Synthetic polynucleotide"
atggctgccgatggttatcttccagattggctcgaggacaaccttagtgaaggaattcgcgagtggtgggctttgaaacctggagcccctcaacccaaggcaaatcaacaacatcaagacaacgctcggggtcttgtgcttccgggttacaaataccttggacccggcaacggactcgacaagggggagccggtcaacgcagcagacgcggcggccctcgagcacgacaaggcctacgaccagcagctcaaggccggagacaacccgtacctcaagtacaaccacgccgacgccgagttccaggagcggctcaaagaagatacgtcttttgggggcaacctcgggcgagcagtcttccaggccaaaaagaggcttcttgaacctcttggtccggttgaggaagcggctaagacggctcctggaaagaagaggcctgtagagcagtctcctcaggaaccggactcctccgcgggtattggcaaatcgggtgcacagcccgctaaaaagagactcaatttcggtcagactggcgacacagagtcagtcccagaccctcaaccaatcggagaacctcccgcagccccctcaggtgtgggatctcttacaatggcttcaggtggtggcgcaccagtggcagacaataacgaaggtgccgatggagtgggtagttcctcgggaaattggcattgcgattcccaatggctgggggacagagtcatcaccaccagcacccgaacctgggccctgcccacctacaacaatcacctctacaagcaaatctccaacagcacatctggaggatcttcaaatgacaacgcctacttcggctacagcaccccctgggggtattttgacttcaacagattccactgccacttctcaccacgtgactggcggcgactcatcaacaacaactggggattccggcctaagcgactcaacttcaagctcttcaacattcaggtcaaagaggttacggacaacaatggagtcaagaccatcgccaataaccttaccagcacggtccaggtcttcacggactcagactatcagctcccgtacgtgctcgggtcggctcacgagggctgcctcccgccgttcccagcggacgttttcatgattcctcagtacgggtatctgacgcttaatgatggaagccaggccgtgggtcgttcgtccttttactgcctggaatatttcccgtcgcaaatgctaagaacgggtaacaacttccagttcagctacgagtttgagaacgtacctttccatagcagctacgctcacagccaaagcctggaccgactaatgaatccactcatcgaccaatacttgtactatctctcaaagactattaacggttctggacagaatcaacaaacgctaaaattcagtgtggccggacccagcaacatggctgtccagggaagaaactacatacctggacccagctaccgacaacaacgtgtctcaaccactgtgactcaaaacaacaacagcgaatttgcttggcctggagcttcttcttgggctctcaatggacgtaatagcttgatgaatcctggacctgctatggccagccacaaagaaggagaggaccgtttctttcctttgtctggatctttaatttttggcaaacaaggaactggaagagacaacgtggatgcggacaaagtcatgataaccaacgaagaagaaattaaaactactaacccggtagcaacggagtcctatggacaagtggccacaaaccaccagagtgcccaagcacaggcgcagaccggctgggttcaaaaccaaggaatacttccgggtatggtttggcaggacagagatgtgtacctgcaaggacccatttgggccaaaattcctcacacggacggcaactttcacccttctccgctgatgggagggtttggaatgaagcacccgcctcctcagatcctcatcaaaaacacacctgtacctgcggatcctccaacggccttcaacaaggacaagctgaactctttcatcacccagtattctactggccaagtcagcgtggagatcgagtgggagctgcagaaggaaaacagcaagcgctggaacccggagatccagtacacttccaactattacaagtctaataatgttgaatttgctgttaatactgaaggtgtatatagtgaaccccgccccattggcaccagatacctgactcgtaatctg

SEQ ID NO: 626 - DNA, 2208 bp, Artificial Sequence
  source: /note="Description of Artificial Sequence: Synthetic polynucleotide"
atggctgccgatggttatcttccagattggctcgaggacaaccttagtgaaggaattcgcgagtggtgggctttgaaacctggagcccctcaacccaaggcaaatcaacaacatcaagacaacgctcgaggtcttgtgcttccgggttacaaataccttggacccggcaacggactcgacaagggggagccggtcaacgcagcagacgcggcggccctcgagcacgacaaggcctacgaccagcagctcaaggccggagacaacctgtacctcaagtacaaccacgccgacgccgagttccaggagcggctcaaagaagatacgtcttttgggggcaacctcgggcgagcagtcttccaggccaaaaagaggcttcttgaacctcttggtctggttgaggaagcggctaagacggctcctggaaagaagaggcctgtagagcagtctcctcaggaaccggactcctccgcgggtattggcaaatcgggtgcacagcccgctaaaaagagactcaatttcggtcagactggcgacacagagtcagtcccagaccctcaaccaatcggagaacctcccgcagccccctcaggtgtgggatctcttacaatggcttcaggtggtggcgcaccagtggcagacaataacgaaggtgccgatggagtgggtagttcctcgggaaattggcattgcgattcccaatggctgggggacagagtcatcaccaccagcacccgaacctgggccctgcccacctacaacaatcacctctacaagcaaatctccaacagcacatctggaggatcttcaaatgacaacgcctacttcggctacagcaccccctgggggtattttgacttcaacagattccactgccacttctcaccacgtgactggcagcgactcatcaacaacaactggggattccggcctaagcgactcaacttcaagctcttcaacattcaggtcaaagaggttacggacaacaatggagtcaagaccatcgccaataaccttaccagcacggtccaggtcttcacggactcagactatcagctcccgtacgtgctcgggtcggctcacgagggctgcctcccgccgttcccagcggacgttttcatgattcctcagtacgggtatctgacgcttaatgatggaagccaggccgtgggtcgttcgtccttttactgcctggaatatttcccgtcgcaaatgctaagaacgggtaacaacttccagttcagctacgagtttgagaacgtacctttccatagcagctacgctcacagccaaagcctggaccgactaatgaatccactcatcgaccaatacttgcactatctctcaaagactattaacggttctggacagaatcaacaaacgctaaaattcagtgtggccggacccagcaacatggctgtccagggaagaaactacatacctggacccagctaccgacaacaacgtgtctcaaccactgtgactcaaaacaacaacagcgaatttgcttggcctggagcttcttcttgggctctcaatggacgtaatagcttgatgaatcctggacctgctatggccagccacaaagaaggagaggaccgtttctttcctttgtctggatctttaatttttggcaaacaaggaactggaagagacaacgtggatgcggacaaagtcatgataaccaacgaagaagaaattaaaactactaacccggtagcaacggagtcctatggacaagtggccacaaaccaccagagtgcccaagcacaggcgcagaccggctgggttcaaaaccaaggaatacttccgggtatggtttggcaggacagagatgtgtacctgcaaggacccatttgggccaaaattcctcacacggacggcaactttcacccttctccgctgatgggagggtttggaatgaagcacccgcctcctcagatcctcatcaaaaacacacctgtacctgcggatcctccaacggccttcaacaaggacaagctgaactctttcatcacccagtattctactggccaagtcagcgtggagatcgagtgggagctgcagaaggaaaacagcaagcgctggaacccggagatccagtacacttccaactattacaagtctaataatgttgaatttgctgttaatactgaaggtgtatatagtgaaccccgccccattggcaccagatacctgactcgtaatctg

SEQ ID NO: 627 - DNA, 2208 bp, Artificial Sequence
  source: /note="Description of Artificial Sequence: Synthetic polynucleotide"
atggctgccgatggttatcttccagattggctcgaggacaaccttagtgaaggaattcgcgagtggtgggctttgaaacctggagcccctcaacccaaggcaaatcaacaacatcaagacaacgctcgaggtcttgtgcttccgggttacaaataccttggacccggcaacggactcgacaagggggagccggtcaacgcagcagacgcggcggccctcgagcacgacaaggcctacgaccagcagctcaaggccggagacaacccgtacctcaagtacaaccacgccgacgccgagttccaggagcggctcaaagaagatacgtcttttgggggcaacctcgggcgagcagtcttccaggccaaaaagaggcttcttgaacctcttggtctggttgaggaagcggctaagacggctcctggaaagaagaggcctgtagagcagtctcctcaagaaccggactcctccgcgggtattggcaaatcgggtgcacagcccgctaaaaagagactcaatttcggtcagactggcgacacagagtcagtcccagaccctcaaccaatcggagaacctcccgcagccccctcaggtgtgggatctcttacaatggcttcaggtggtggcgcaccagtggcagacaataacgaaggtgccgatggagtgggtagttcctcgggaaattggcattgcgattcccaatggctgggggacagagtcatcaccaccagcacccgaacctgggccctgcccacctacaacaatcacctctacaagcaaatctccaacagcacatctggaggatcttcaaatgacaacgcctacttcggctacagcaccccctgggggtattttgacttcaacagattccactgccacttctcaccacgtgactggcagcgactcatcaacaacaactggggattccggcctaagcgactcaacttcaagctcttcaacattcaggtcaaagaggttacggacaacaatggagtcaagaccatcgccaataaccttaccagcacggtccaggtcttcacggactcagactatcagctcccgtacgtgctcgggtcggctcacgagggctgcctcccgccgttcccagcggacgttttcatgattcctcagtacgggtatctgacgcttaatgatggaagccaggccgtgggtcgttcgtccttttactgcctggaatatttcccgtcgcaaatgctaagaacgggtaacaacttccagttcagctacgagtttgagaacgtacctttccatagcagctacgctcacagccaaagcctggaccgactaatgaatccactcatcgaccaatacttgcactatctctcaaagactattaacggttctggacagaatcaacaaacgctaaaattcagtgtggccggacccagcaacatggctgtccagggaagaaactacatacctggacccagctaccgacaacaacgtgtctcaaccactgtgactcaaaacaacaacagcgaatttgcttggcctggagcttcttcttgggctctcaatggacgtaatagcttgatgaatcctggacctgctatggccagccacaaagaaggagaggaccgtttctttcctttgtctggatctttaatttttggcaaacaaggaactggaagagacaacgtggatgcggacaaagtcatgataaccaacgaagaagaaattaaaactactaacccggtagcaacggagtcctatggacaagtggccacaaaccaccagagtgcccaagcacaggcgcagaccggctgggttcaaaaccaaggaatacttccgggtatggtttggcaggacagagatgtgtacctgcaaggacccatttgggccaaaattcctcacacggacggcaactttcacccttctccgctgatgggagggtttggaatgaagcacccgcctcctcagatcctcatcaaaaacacacctgtacctgcggatcctccaacggccttcaacaaggacaagctgaactctttcatcacccagtattctactggccaagtcagcgtggagatcgagtgggagctgcagaaggaaaacagcaagcgctggaacccggagatccagtacacttccaactattacaagtctaataatgttgaatttgctgttaatactgaaggtgtatatagtgaaccccgccccattggcaccagatacctgactcgtaatctg

SEQ ID NO: 628 - DNA, 2208 bp, Artificial Sequence
  source: /note="Description of Artificial Sequence: Synthetic polynucleotide"
  modified_base (1325)..(1325): a, c, t, or g
atggctgccgatggttatcttccagattggctcgaggacaaccttagtgaaggaattcgcgagtggtgggctttgaaacctggagcccctcaacccaaggcaaatcaacaacatcaagacaacgctcgaggtcttgtgcttccgggttacaaataccttggacccggcaacggactcgacaagggggagccggtcaacgcagcagacgcggcggccctcgagcacgacaaggcctacgaccagcagctcaaggccggagacaacccgtacctcaagtacaaccacgccgacgccgagttccaggagcggctcaaagaagatacgtcttttgggggcaacctcgggcgagcagtcttccaggccaaaaagaggcttcttgaacctcttggtctggttgaggaagcggctaagacggctcctggaaagaagaggcctgtagagcagtctcctcaggaaccggactcctccgcgggtattggcaaatcgggtgcacagcccgctaaaaagagactcaatttcggtcagactggcgacacagagtcagtcccagaccctcaaccaatcggagaacctcccgcagccccctcaggtgtgggatctcttacaatggcttcaggtggtggcgcaccagtggcagacaataacgaaggtgccgatggagtgggtagttcctcgggaaattggcattgcgattcccaatggctgggggacagagtcatcaccaccagcacccgaacctgggccctgcccacctacaacaatcacctctacaagcaaatctccaccagcacatctggaggatcttcaaatgacaacgcctacttcggctacagcaccccctgggggtattttgacttcaacagattccactgccacttctcaccacgtgactggcagcgactcatcaacaacaactggggattccggcctaagcgactcaacttcaagctcttcaacattcaggtcaaagaggttacggacaacaatggagtcaagaccatcgccaataaccttaccagcacggtccaggtcttcacggactcagactatcagctcccgtacgtgctcgggtcggctcacgagggctgcctcccgccgttcccagcggacgttttcatgattcctcagtacgggtatctgacgcttaatgatggaagccaggccgtgggtcgttcgtccttttactgcctggaatatttcccgtcgcaaatgctaagaacgggtaacaacttccagttcagctacgagtttgagaacgtacctttccatagcagctacgctcacagccaaagcctggaccgactaatgaatccactcatcgaccnatacttgcactatctctcaaagactattaacggttctggacagaatcaacaaacgctaaaattcagtgtggccggacccagcaacatggctgtccagggaagaaactacatacctggacccagctaccgacaacaacgtgtctcaaccactgtgactcaaaacaacaacagcgaatttgcttggcctggagcttcttcttgggctctcaatggacgtaatagcttgatgaatcctggacctgctatggccagccacaaagaaggagaggaccgtttctttcctttgtctggatctttaatttttggcaaacaaggaactggaagagacaacgtggatgcggacaaagtcatgataaccaacgaagaagaaattaaaactactaacccggtagcaacggagtcctatggacaagtggccacaaaccaccagagtgcccaagcacaggcgcagaccggctgggttcaaaaccaaggaatacttccggatatggtttggcaggacagagatgtgtacctgcaaggacccatttgggccaaaattcctcacacggacggcaactttcacccttctccgctgatgggagggtttggaatgaagcacccgcctcctcagatcctcatcaaaaacacacctgtacctgcggatcctccaacggccttcaacaaggacaagctgaactctttcatcacccagtattctactggccaagtcagcgtggagatcgagtgggagctgcagaaggaaaacagcaagcgctggaacccggagatccagtacacttccaactattacaagtctaataatgttgaatttgctgttaatactgaaggtgtatatagtgaaccccgccccattggcaccagatacctgactcgtaatctg

SEQ ID NO: 629 - DNA, 2208 bp, Artificial Sequence
  source: /note="Description of Artificial Sequence: Synthetic polynucleotide"
atggctgccgatggttatcttccagattggctcgaggacaaccttagtgaaggaattcgcgagtggtgggctttgaaacctggagcccctcaacccaaggcaaatcaacaacatcaagacaacgctcgaggtcttgtgcttccgggttacaaataccttggacccggcaacggactcgacaagggggagccggtcaacgcagcagacgcggcggccctcgagcacgacaaggcctacgaccagcagctcaaggccggagacaacccgtacctcaagtacaaccacgccgacgccgagttccaggagcggctcaaagaagatacgtcttttgggggcaacctcgggcgagcagtcttccaggccaaaaagaggcttcttgaacctcttggtctggttgaggaagcggctaagacggctcctggaaagaagaggcctgtagagcagtctcctcaggaaccggactcctccgcgggtattggcaaatcgggtgcacagcccgctaaaaagagactcaatttcggtcagactggcgacacagagtcagtcccagaccctcaaccaatcggagaacctcccgcagccccctcaggtgtgggatctcttacaatggcttcaggtggtggcgcaccagtggcagacaataacgaaggtgccgatggagtgggtagttcctcgggaaattggcattgcgattcccaatggctgggggacagagtcatcaccaccagcacccgaacctgggccctgcccacctacaacaatcacctctacaagcaaatctccaacagcacatctggaggatcttcaaatgacaacgcctacttcggctacagcaccccctgggggtattttgacttcaacagattccactgccacttctcaccacgtgactggcagcgactcatcaacaacaactggggattccggcctaagcgactcaacttcaagctcttcaacattcaggtcaaagaggttacggacaacaatggagtcaagaccatcgccaataaccttaccagcacggtccaggtcttcacggactcagactatcagctcccgtacgtgctcgggtcggctcacgagggctgcctcccgccgttcccagcggacgttttcatgattcctcagtacgggtatctgacgcttaatgatggaagccaggccgtgggtcgttcgtccttttactgcctggaatatttcccgtcgcaaatgctaagaacgggtaacaacttccagttcagctacgagtttgagaacgtacctttccatagcagctacgctcacagccaaagcctggaccgactaatgaatccactcatcgaccaatacttgcactatctctcaaagactattaacggttctggacagaatcaacaaacgctaaaattcagtgtggccggacccagcaacatggctgtccagggaagaaactacatacctggacccagctaccgacaacaacgtgtctcaaccactgtgactcaaaacaacaacagcgaatttgcttggcctggagcttcttcttgggctctcaatggacgtaatagcttgatgaatcctggacctgctatggccagctacaaagaaggagaggacagtttctttcctttgtctggatctttaatttttggcaaacaaggaactggaagagacaacgtggatgcggacaaagtcatgataaccaacgaagaagaaattaaaactactaacccggtagcaacggagtcctatggacaagtggccacaaaccaccagagtgcccaagcacaggcgcagaccggctgggttcaaaaccaaggaatacttccgggtatggtttggcaggacagagatgtgtacctgcaaggacccatttgggccaaaattcctcacacggacggcaactttcacccttctccgctgatgggagggtttggaatgaagcacccgcctcctcagaccctcatcaaaaacacacctgtacctgcggatcctccaacggccttcaacaaggacaagctgaactctttcatcacccagtattctactggccaagtcagcgtggagatcgagtgggagctgcagaaggaaaacagcaagcgctggaacccggagatccagtacacttccaactattacaagtctaataatgttgaatttgctgttaatactgaaggtgtatatagtgaaccccgccccattggcaccagatacctgactcgtaatctg

SEQ ID NO: 630 - DNA, 2208 bp, Artificial Sequence; identical to SEQ ID NO: 613
  source: /note="Description of Artificial Sequence: Synthetic polynucleotide"

SEQ ID NO: 631 - DNA, 2208 bp, Artificial Sequence
  source: /note="Description of Artificial Sequence: Synthetic polynucleotide"
atggctgccgatggttatcttccagattggctcgaggacaaccttagtgaaggaattcgcgagtggtgggctttgaaacctggagcccctcaacccagggcaaatcaacaacatcaagacaacgctcgaggtcttgtgcttccgggttacaaataccttggacccggcaacggactcgacaagggggagccggtcaacgcagccgacgcggcggccctcgagcacgacaaggcctacgaccagcagctcaaggccggagacaacccgtacctcaagtacaaccacgccgacgccgagttccaggagcggctcaaagaagatacgtcttttgggggcaacctcgggcgagcagtcttccaggccaaaaagaggcttcttgaacctcttggtctggttgaggaagcggctaagacggctcctggaaagaagaggcctgtagagcagtctcctcaggaaccggactcctccgcgggtattggcaaatcgggtgcacagcccgctaaaaagagactcaatttcggtcagactggcgacacagagtcagtcccagaccctcaaccaatcggagaacctcccgcagccccctcaggtgtgggatctcttacaatggcttcaggtggtggcgcaccagtggcagacaataacgaaggtgccgatggagtgggtagttcctcgggaaattggcattgcgattcccaatggctgggggacagagtcatcaccaccagcacccgaacctgggccctgcccacctacaacaatcacctctacaagcaaatctccaacagcacatctggaggatcttcaaatgacaacgcctacttcggctacagcaccccctgggggtattttgacttcaacagattccactgccacttctcaccacgtgactggcagcgactcatcaacaacaactggggattccggcctaagcgactcaacttcaagctcttcaacattcaggtcaaagaggttacggacaacaatggagtcaagaccatcgccaataaccttaccagcacggtccaggtcttcacggactcagactgtcagctcccgtacgtgctcgggtcggctcacgagggctgcctcccgccgttcccagcggacgttttcatgattcctcagtacgggtatctgacgcttaatgatggaagccaggccgtgggtcgttcgtccttttactgcctggaatatttcccgtcgcaaatgctaagaacgggtaacaacttccagttcagctacgagtttgagaacgtacctttccatagcagctacgctcacagccaaagcctggaccgactaacgaatccactcatcgaccaatacttgtactatctctcaaagactattaacggttctggacagaatcaacaaacgctaaaattcagtgtggccggacccagcaacatggctgtccagggaagaaactacatacctggacccagctaccgacaacaacgtgtctcaaccactgtgactcaaaacaacaacagcgaatttgcttggcctggagcttcttcttgggctctcaatggacgtaatagcttgatgaatcctggacctgctatggccagccacaaagaaggagaggaccgtttctttcctttgtctggatctttaatttttggcaaacaaggaactggaagagacaacgtggatgcggacaaagtcatgataaccaacgaagaagaaattaaaactactaacccggtagcaacggagtcccatggacaagtggccacaaaccaccagagtgcccaagcacaggcgcagaccggctgggttcaaaaccaaggaatacttccgggtatggtttggcaggacagagatgtgtacctgcaaggacccatttgggccaaaattcctcacacggacggcaactttcacccttctccgctgatgggagggtttggaatgaagcacccgcctcctcagatcctcatcaaaaacacacctgtacctgcggatcctccaacggccttcaacaaggacaagctgaactctttcatcacccagtattctactggccaagtcagcgtggagatcgagtgggagctgcagaaggaaaacagcaagcgctggaacccggagatccagtacacttccaactattacaagtctaataatgttgaatttgctgttaatactgaaggtgtatatagtgaaccccgccccattggcaccagatacctgactcgtaatctg

SEQ ID NO: 632 - DNA, 2208 bp, Artificial Sequence
  source: /note="Description of Artificial Sequence: Synthetic polynucleotide"
atggctgccgatggttatcttccagattggctcgaggacaaccttagtgaaggaattcgcgagtggtgggctttgaaacctggagcccctcaacccaaggcaaatcaacaacatcaagacaacgctcgaggtcttgtgcttccgggttacaaataccttggacccggcaacggactcgacaagggggagccggtcaacgcagcagacgcggcggccctcgagcacgacaaggcctacgaccagcagctcaaggccggagacaacccgtacctcaagtacaaccacgccgacgccgagttccaggagcggctcaaagaagatacgtcttttgggggcaacctcgggcgagcagtcttccaggccaaaaagaggcttcttgaacctcttggtctggttgaggaagcggctaagacggctcctggaaagaagaggcctgtagagcagtctcctcaggaaccggactcctccgcgggtattggcaaatcgggtgcacagcccgctaagaagagactcaatttcggtcagactggcgacacagagtcagtcccagaccctcaaccaatcggagaacctcccgcagccccctcaggtgtgggatctcttacaatggcttcaggtggtggcgcaccagtggcagacaataacgaaggtgccgatggagtgggtagttcctcgggaaattggcattgcgattcccaatggctgggggacagagtcatcaccaccagcacccgaacctgggccctgcccacctacaacaatcacctctacaagcaaatctccaacagcacatctggaggatcttcaaatgacaacgcctacttcggctacagcaccccctgggggtattttgacttcaacagattccactgccacttctcaccacgtgactggcagcgactcatcaacaacaactggggattccggcctaagcgactcaacttcaagctcttcaacattcaggtcaaagaggttacggacaacaatggagtcaagaccatcgccaataaccttaccagcacggtccaggtcttcacggactcagactatcagctcccgtacgtgctcgggtcggctcacgagggctgcctcccgccgttcccagcggacgttttcatgattcctcagtacgggtatctgacgcttaatgatggaagccaggccgtgggtcgttcgtccttttactgcctggaatatttcccgtcgcaaatgctaagaacgggtaacaacttccagttcagctacgagtttgagaacgtacctttccatagcagctacgctcacagccaaagcctggaccgactaatgaatccacccatcgaccaatacttgtactatctctcaaagactattaacggttctggacagaatcaacaaacgctaaaattcagtgtggccggacccagcaacatggctgtccagggaagaaactacatacctggacccagctaccgacaacaacgtgtctcaaccactgtgactcaaaacaacaacagcgaatttgcttggcctggagcttcttcttgggctctcaatggacgtaatagcttgatgaatcctggacctgctatggccagccacaaagaaggagaggaccgtttctttcctttgtctggatctttaatttttggcaaacaaggaactggaagagacaacgtggatgcggacaaagtcatgataaccaacgaagaagaaattaaaactactaacccggtagcaacggagtcctatggacaagtggccacaaaccaccagagtgcccaagcacaggcgcagaccggctgggttcaaaaccaaggaatacttccgggtatggtttggcaggacagagatgtgtacctgcaaggacccatttgggccaaaattcctcacacggacggcaactttcacccttctccgctgatgggagggtttggaatgaagcacccgcctcctcagatcctcatcaaaaacacacctgtacctgcggatcctccaacggccttcaacaaggacaagctgaactctttcatcacccagtattctactggccaagtcagcgtggagatcgagtgggagctgcagaaggaaaacagcaagcgctggaacccggagatccagtacacttccaactattacaagtctaataatgttgaatttgctgttaatactgaaggtgtatatggtgaaccccgccccattggcaccagatacctgactcgtaatctg

SEQ ID NO: 633 - DNA, 2208 bp, Artificial Sequence
  source: /note="Description of Artificial Sequence: Synthetic polynucleotide"
atggctgccgatggttatcttccagattggctcgaggacaaccttagtgaaggaattcgcgagtggtgggctttgaaacctggagcccctcaacccaaggcaaatcaacaacatcaagacaacgctcgaggtcttgtgcttccgggttacaaataccttggacccggcaacggactcgacaagggggagccggtcaacgcagcagacgcggcggccctcgagcacgacaaggcctacgaccagcagctcaaggccggagacaacccgtacctcaagtacaaccacgccgacgccgagttccaggagcggctcaaagaagatacgtcttttgggggcaacctcgggcgagcagtcttccaggccaaaaagaggcttcttgaacctcttggtctggttgaggaagcggctaagacggctcctggaaagaagaggcctgtagagcagtctcctcaggaaccggactcctccgcgggtattggcaaatcgggtgcacagcccgctaaaaagagactcaatttcggtcagactggcgacacagagtcagtcccagaccctcaaccaatcggagaacctcccgcagccccctcaggtgtgggatctcttacaatggcttcaggtggtggcgcaccagtggcagacaataacgaaggtgccgatggagtgggtagttcctcgggaaattggcattgcgattcccaatggctgggggacagagtcatcaccaccagcacccgaacctgggccctgcccacctacaacaatcacctctacaagcaaatctccaacagcacatctggaggatcttcaaatgacaacgcctacttcggctacagcaccccctgggggtattttgacttcaacagattccactgccacttctcaccacgtgaccggcagcgactcatcaacaacaactggggattccggcctaagcgactcaacttcaagctcttcaacattcaggtcaaagaggttacggacaacaatggagtcaagaccatcgccaataaccttaccagcacggtccaggtcttcacggactcagactatcagctcccgtacgtgctcgggtcggctcacgagggctgcctcccgccgttcccagcggacgttttcatgattcctcagtacgggtatctgacgcttaatgatggaagccaggccgtgggtcgttcgtccttttactgcctggaatatttcccgtcgcaaatgctaagaacgggtaacaacttccagttcagctacgagtttgagaacgtacctttccatagcagctacgctcacagccaaagcctggaccgactaatgaatccactcatcgaccaatacttgtactatctctcaaagactattaacggttctggacagaatcaacaaacgctaaaattcagtgtggccggacccagcaacatggctgtccagggaagaaactacatacctggacccagctaccgacaacaacgtgtctcaaccactgtgactcaaaacaacaacagcgaatttgcttggcctggagcttcttcttgggctctcaatggacgtaatagcttgatgaatcctggacctgctatggccagccacaaagaaggagaggaccgtttctttcctttgtctggatctttaatttttggcaaacaaggaactggaagagacaacgtggatgcggacaaagtcatgataaccaacgaagaagaaattaaaactactaacccggtagcaacggagtcctatggacaagtggccacaaaccaccagagtgcccaagcacaggcgcagaccggctgggttcaaaaccaaggaatacttccgggtatggtttggcaggacagagatgtgtacctgcaaggacccatttgggccaaaattcctcacacggacggcaactttcacccttctccgctgatgggagggtttggaatgaagcacccgcctcctcagatcctcatcaaaaacacacctgtacctgcggatcctccaacggccttcaacaaggacaagctgaactctttcatcacccagtattctactggccaagtcagcgtggagatcgagtgggagctgcagaaggaaaacagcaagcgctggaacccggagatccagtacacttccaactattacaagtctaataatgttgaatttgctgttaatactgaaggtgtatatagtgaaccccgccccattggcaccagatacctgactcgtaatctg

SEQ ID NO: 634 - DNA, 2208 bp, Artificial Sequence
  source: /note="Description of Artificial Sequence: Synthetic polynucleotide"
atggctgccgatggttatcttccagattggctcgaggacaaccttagtgaaggaattcgcgagtggtgggctttgaaacctggagcccctcaacccaaggcaaatcaacaacatcaagacaacgctcgaggtcttgtgcttccgggttacaaataccttggacccggcaacggactcgacaagggggagccggtcaacgcagcagacgcggcagccctcgagcacgacaaggcctacgaccagcagctcaaggccggagacaacccgtacctcaagtacaaccacgccgacgccgagttccaggagcggctcaaagaagatacgtcttttgggggcaacctcgggcgagcagtcttccaggccaaaaagaggcttcttgaacctcttggtctggttgaggaagcggctaagacggctcctggaaagaagaggcctgtagagcagtctcctcaggaaccggactcctccgcgggtattggcaaatcgggtgcacagcccgctaaaaagagactcaatttcggtcagactggcgacacagagtcagtcccagaccctcaaccaatcggagaacctcccgcagccccctcaggtgtgggatctcttacaatggcttcaggtggtggcgcaccagtggcagacaataacgaaggtgccgatggagtgggtagttcctcgggaaattggcattgcaattcccaatggctgggggacagagtcatcaccaccagcacccgaacctgggccctgcccacctacaacaatcacctctacaagcaaatctccaacagcacatctggaggatcttcaaatgacaacgcctacttcggctacagcaccccctgggggtattttgacttcaacagattccactgccacttctcaccacgtgactggcagcgactcatcaacaacaactggggattccggcctaagcgactcaacttcaagctcttcaacattcaggtcaaagaggttacggacaacaatggagtcaagaccatcgccaataaccttaccagcacggtccaggtcttcacggactcagactatcagctcccgtacgtgctcgggtcggctcacgagggctgcctcccgccgttcccagcggacgttttcatgattcctcagtacgggtatctgacgcttaatgatggaagccaggccgtgggtcgttcgtccttttactgcctggaatatttcccgtcgcaaatgctaagaacgggtaacaacttccagttcagctacgagtttgagaacgtacctttccatagcagctacgctcacagccaaagcctggaccgactaatgaatccactcatcgaccaatacttgtactatctctcaaagactattaacggttctggacagaatcaacaaacgctaaaattcagtgtggccggacccggcaacatggctgtccagggaagaaactacatacctggacccagctaccgacaacaacgtgtctcaaccactgtgactcaaaacaacaacagcgaatttgcttggcctggagcttcttcttgggctctcaatggacgtaatagcttgatgaatcctggacctgctatggccagccacaaagaaggagaggaccgtttctttcctttgtctggatctttaatttttggcaaacaaggaactggaagagacaacgtggatgcggacaaagtcatgataaccaacgaagaagaaattaaaactactaacccggtagcaacggagtcctatggacaagtggccacaaaccaccagagtgcccaagcacaggcgcagaccggctgggttcaaaaccaaggaatacttccgggtatggtttggcaggacagagatgtgtacctgcaaggacccatttgggccaaaattcctcacacggacggcaactttcacccttctccgctgatgggagggtttggaatgaagcacccgcctcctcagatcctcatcaagaacacacctgtacctgcggatcctccaacggccttcaacaaggacaagctgaactctttcatcacccagtattctactggccaagtcagcgtggagatcgagtgggagctgcagaaggaaaacagcaagcgctggaacccggagatccagtacacttccaactattacaagtctaataatgttgaatttgctgttaatactgaaggtgtatatagtgaaccccgccccattggcaccagatacctgactcgtaatctg

SEQ ID NO: 635 - DNA, 2208 bp, Artificial Sequence
  source: /note="Description of Artificial Sequence: Synthetic polynucleotide"
atggctgccgatggttatcttccagattggctcgaggacaaccttagtgaaggaattcgcgagtggtgggctttgaaacctggagcccctcaacccaaggcaaatcaacaacatcaagacaacgctcgaggtcttgtgcttccgggttacagataccttggacccggcaacggactcgacaagggggagccggtcaacgcagcagacgcggcggccctcgagcacgacaaggcctacgaccagcagctcaaggccggagacaacccgtacctcaagtacaaccacgccgacgccgagttccaggagcggctcaaagaagatacgtcttttgggggtaacctcgggcgagcagtcttccaggccaaaaagaggcttcttgaacctcttggtctggttgaggaagcggctaagacggctcctggaaagaagaggcctgtagagcagtctcctcaggaaccggactcctccgcgggtatcggcaaatcgggtgcacagcccgctaaaaagagactcaatttcggtcagactggcgacacagagtcagtcccagaccctcaaccaatcggagaacctcccgcagccccctcaggtgtgggatctcttacaatggcttcaggtggtggcgcaccagtggcagacaataacgaaggtgccgatggagtgggtagttcctcgggaaattggcattgcgattcccaatggctgggggacagagtcatcaccaccagcacccgaacctgggccctgcccacctacaacaatcacctctacaagcaaatctccaacagcacatctggaggatcttcaaatgacaacgcctacttcggctacagcaccccctgggggtattttgacttcaacagattccactgccacttctcaccacgtgactggcagcgactcatcaacaacaactggggattccggcctaagcgactcaacttcaagctcttcaacattcaggtcaaagaggttacggacaacaatggagtcaagaccgtcgccaataaccttaccagcacggtccaggtcttcacggactcagactatcagctcccgtacgtgctcgggtcggctcacgagggctgcctcccgccgttcccagcggacgttttcatgattcctcagtacgggtatctgacgcttaatgatggaagccaggccgtgggtcgttcgtccttttactgcctggaatatttcccgtcgcaaatgctaagaacgggtaacaacttccagttcagctacgagtttgagaacgtacctttccatagcagctacgctcacagccaaagcctggaccgactaatgaatccactcatcgaccaatacttgtactatctctcaaagactattaacggttctggacagaatcaacaaacgctaaaattcagtgtggccggacccagcaacatggctgtccagggaagaaactacatacctggacccagctaccgacaacaacgtgtctcaaccactgtgactcaaaacaacaacagcgaatttgcttggcctggagcttcttcttgggctctcaatggacgtaatagcttgatgaatcctggacctgctatggccagccacaaagaaggagaggaccgtttctttcctttgtctggatctttaatttttggcaaacaaggaactggaagagacaacgtggatgcggacaaagtcatgataaccaacgaagaagaaattaaaactactaacccggtagcaacggagtcctatggacaagtggccacaaaccaccagagtgcccaagcacaggcgcagaccggctgggttcaaaaccaaggaatacttccgggtatggtttggcaggacagagatgtgtacctgcaaggacccatttgggccaaaattcctcacacggacggcaactttcacccttctccgctgatgggagggtttggaatgaagcacccgcctcctcagatcctcatcaaaaacacacctgtacctgcggatcctccaacggccttcaacaaggacaagctgaactctttcatcacccagtattctactggccaagtcagcgtggagatcgagtgggagctgcagaaggaaaacagcaagcgctggaacccggagatccagtacacttccaactattacaagtctaataatgttgaatttgctgttaatactgaaggtgtatatagtggaccccgccccattggcaccagatacctgactcgtaatctg

SEQ ID NO: 636 - DNA, 2208 bp, Artificial Sequence
  source: /note="Description of Artificial Sequence: Synthetic polynucleotide"
atggctgccgatggttatcttccagattggctcgaggacaaccttagtgaaggaattcgcgagtggtgggctttgaaacctggagcccctcaacccaaggcaaatcaacaacatcaagacaacgctcgaggtcttgtgcttccgggttacaaataccttggacccggcaacggactcgacaagggggagccggtcaacgcagcagacgcggcggccctcgagcacgacaaggcctacgaccagcagctcaaggccggagacaacccgtacctcaagtacaaccacgccgacgccgagttccaggagcggctcaaagaagatacgtcttttgggggcaacctcgggcgagcagtcttccaggccaaaaagaggcttcttgaacctcttggtctggttgaggaagcggctaagacggctcctggaaagaagaggcctgtagagcagtctcctcaggaaccggactcctccgcgggtattggcaaatcgggtgcacagcccgctaaaaagagactcaatttcggtcagactggcgacacagagtcagtcccagaccctcaaccaatcggagaacctcccgcagccccctcaggtgtgggatctcttacaatggcttcaggtggtggcgcaccagtggcagacaataacgaaggtgccgatggagtgggtagttcctcgggaaattggcattgcgattcccaatggctgggggacagagtcatcaccaccagcacccgaacctgggccctgcccacctacaacaatcacctctacaagcaaatctccaacagcacatctggaggatcttcaaatgacaacgcctacttcggctacagcaccccctgggggtattttgacttcaacagattccactgccacttctcaccacgtgactggcagcgactcatcaacaacaactggggattccggcctaagcgactcaacttcaagctcttcaacattcaggtcaaagaggttacggacaacaatggagtcaagaccatcgccaataaccttaccagcacggtccaggtcttcacggactcagactatcagctcccgtacgtgctcgggtcggctcacgagggctgcctcccgccgttcccagcggacgttttcatgattcctcagtacgggtatctgacgcttaatgatggaagccaggccgtgggtcgttcgtccttttactgcctggaatatttcccgtcgcaaatgctaagaacgggtaacaacttccagttcagctacgagtttgagaacgtacctttccatagcagctacgctcacagccaaagcctggaccgactaatgaatccactcatcgaccaatacttgtactatctctcaaagactattaacggttctggacagaatcaacaaacgctaaaattcagtgtggccggacccagcaacatggctgtccagggaagaaactacatacctggacccagctaccgacaacaacgtgtctcaaccactgtgactcaaaacaacaacagcgaatttgcttggcctggagcttcttcttgggctctcaatggacgtaatagcttgatgaatcctggacctgctatggccagccacaaagaaggagaggaccgtttctttcctttgtctggatctttaatttttggcaaacaaggaactggaagagacaacgtggatgcggacaaagtcatgataaccaacgaagaagaaattaaaactactaacccggtagcaacggagtcctatggacaagtggccacaaaccaccagagtgcccaagcacaggcgcagaccggctgggttcaaaaccaaggaatacttccgggtatggtttggcaggacagagatgtgtacctgcaaggacccatttgggccaaaattcctcacacggacggcaactttcacccttctccgctgatgggagggtttggaatgaagcacccgcctcctcagatcctcatcaaaaacacacctgtacctgcggatcctccaacggccttcaacaaggacaagctgaactctttcatcacccagtattctactggccaagtcagcgtggagatcgagtgggagctgcagaaggaaaacagcaagcgctggaacccggagatccagtacacttccaactattacaagtctaataatgttgaatttgctgttaatactgaaggtgtatatagtgaaccccgccccattggcaccagatacctgactcgtaatctg

SEQ ID NO: 637 - DNA, 2208 bp, Artificial Sequence
  source: /note="Description of Artificial Sequence: Synthetic polynucleotide"
atggctgccgatggttatcttccagattggctcgaggacaaccttagtgaaggaattcgcgagtggtgggctttgaaacctggagcccctcaacccaaggcaaatcaacaacgtcaagacaacgctcgaggtcttgtgcttccgggttacaaataccttggacccggcaacggactcgacaagggggagccggtcaacgcagcagacgcggcggccctcgagcacgacaaggcctacgaccagcagctcaaggccggaggcaacccgtgcctcaagtacaaccacgccgacgccgagttccaggagcggctcaaagaagatacgtcttttgggggcaacctcgggcgagcagtcttccaggccaaaaagaggcttcttgaacctcttggtctggttgaggaagcggctaagacggctcctggaaagaagaggcctgtagagcagtctcctcaggaaccggactcctccgcgggtattggcagatcgggtgcacagcccgctaaaaagagactcaatttcggtcagactggcgacacagagtcagtcccagaccctcaaccaatcggagaacctcccgcagccccctcaggtgtgggatctcttacaatggcttcaggtggtggcgcaccagtggcagacaataacgaaggtgccgatggagtgggtagttcctcgggaaattggcattgcgattcccaatggctgggggacagagtcatcaccaccagcacccgaacctgggccctgcccacctacaacaatcacctctacaagcaaatctccaacagcacatctggaggatcttcaaatgacaacgcctacttcggctacagcaccccctgggggtattttgacttcaacagattccactgccacttctcaccacgtgactggcagcgactcatcaacaacaactggggattccggcctaagcgactcaacttcaagctcttcaacattcaggtcaaagaggttacggacaacaatggagtcaaggccatcgccaataaccttaccagcacggtccaggtcttcacggactcagactatcagctcccgtacgtgctcgggtcggctcacgagggctgcctcccgccgttcccagcggacgttttcatgattcctcagtacgggtatctgacgcttaatgatggaagccaggccgtgggtcgttcgtccttttactgcctggaatatttcccgtcgcaaatgctaagaacgggtaacaacttccagttcagctacgagtttgagaacgtacctttccatagcagctacgctcacagccaaagcctggaccgactaatgaatccactcatcgaccaatacttgtactatctctcaaagactattgacggttctggacagaatcaacaaacgctaaaattcagtgtggccggacccagcaacatggctgtccagggaagaaactacatacctggacccagctaccgacaacaacgtgtctcaaccactgtgactcaaaacaacaacagcgaatttgcttggcctggagcttcttcttgggctctcaatggacgtaatagcttgatggatcctggacctgctatggccagccacaaagaaggagaggaccgtttctttcctttgtctggatctttaatttttggcaaacaaggaactggaagagacaacgtggatgcggacaaagtcatgataaccaacgaagaagaaattaaaactactaacccggtagcaacggagtcctatggacaagtggccacaaaccaccagagtgcccaagcacaggcgcagaccggctgggttcaaaaccaaggaatacttccgggtatggtttggcaggacagagatgtgtacctgcaaggacccatttgggccaaaattcctcacacgggcggcaactttcacccttctccgctgatgggagggtttggaatgaagcacccgcctcctcagatcctcatcaaaaacacacctgtacctgcggatcctccaacggccttcaacaaggacaagctgaactctttcatcacccagtattctactggccaagtcagcgtggagatcgagtgggagctgcagaaggaaaacagcaagcgctggaacccggagatccagtacacttccaactattacaagtctaataatgttgaatttgctgttaatactgaaggtgtatatagtgaaccccgccccattggcaccagatacctgactcgtaatctg

SEQ ID NO: 638 - DNA, 2208 bp, Artificial Sequence
  source: /note="Description of Artificial Sequence: Synthetic polynucleotide"
atggctgccgatggttatcttccagattggctcgaggacaaccttagtgaaggaattcgcgagtggtgggctttgaaacctggagcccctcaacccaaggcaaatcaacaacatcaagacaacgctcgaggtcttgtgcttccgggttacaaataccttggacccggcaacggactcgacaagggggagccggtcaacgcagcagacgcggcggccctcgagcacgacaaggcctacgaccagcagctcaaggccggagacaacccgtacctcaagtacaaccacgccgacgccgagttccaggagcggctcaaagaagatacgtcttttgggggcaacctcgggcgagcagtcttccaggccaaaaagaggcttcttgaacctcttggtctggttgaggaagcggctaagacggctcctggaaagaagaggcctgtagagcagtctcctcaggaaccggactcctccgcgggtattggcaaatcgggtgcacagcccgctaaaaagagactcaatttcggtcagactggcgacacagagtcagtcccagaccctcaaccaatcggagaacctcccgcagccccctcaggtgtgggatctcttacaatggcttcaggtggtggcgcaccagtggcagacaataacgaaggtgccgatggagtgggtagttcctcgggaaattggcattgcgattcccaatggctgggggacagagtcatcaccaccagcacccgaacctgggccctgcccacctacaacaatcacctctacaagcaaatctccaacagcacatctggaggatcttcaaatgacaacgcctacttcggctacagcaccccctgggggtattttgacttcaacagattccactgccacttctcaccacgtgactggcagcgactcatcaacaacaactggggattccggcctaagcgactcaacttcaagctcttcaacattcaggtcaaagaggttacggacaacaatggagtcaagaccatcgccaataaccttaccagcacggtccaggtcttcacggactcagactatcagctcccgtacgtgctcgggtcggctcacgagggctgcctcccgccgttcccagcggacgttttcatgattcctcagtacgggtatctgacgcttaatgatggaagccaggccgtgggtcgttcgtccttttactgcctggaatatttcccgtcgcaaatgctaagaacgggtaacaacttccagttcagctacgagtttgagaacgtacctttccatagcagctacgctcacagccaaagcctggaccgactaatgaatccactcatcgaccaatacttgtactatctctcaaagactattaacggttctggacagaatcaacaaacgctaaaattcagtgtggccggacccagcaacatggctgtccagggaagaaactacatacctggacccagctaccgacaacaacgtgtctcaaccactgtgactcaaaacaacaacagcgaatttgcttggcctggagcttcttcttgggctctcaatggacgtaatagcttgatgaatcctggacctgctatggccagccacaaagaaggagaggaccgtttctttcctttgtctggatctttaatttttggcaaacaaggaactggaagagacaacgtggatgcggacaaagtcatgataaccaacgaagaagaaattaaaactactaacccggtagcaacggagtcctatggacaagtggccacaaaccaccagagtgcccaagcacaggcgcagaccggctgggttcaaaaccaaggaatacttccgggtatggtttggcaggacagagatgtgtacctgcaaggacccatttgggccaaaattcctcacacggacggcaactttcacccttctccgctgatgggagggtttggaatgaagcacccgcctcctcagatcctcatcaaaaacacacctgtacctgcggatcctccaacggccttcaacaaggacaagctgaactctttcatcacccagtattctactggccaagtcagcgtggagatcgagtgggagctgcagaaggaaaacagcaagcgctggaacccggagatccagtacacttccaactattacaagcctaataatgttgaatttgctgttaatactgaaggtgtatatagtgaaccccgccccattggcaccagatacctgactcgtaatctg

SEQ ID NO: 639 - DNA, 2208 bp, Artificial Sequence
  source: /note="Description of Artificial Sequence: Synthetic polynucleotide"
atggctgccgatggttatcttccagattggctcgaggacaaccttagtgaaggaattcgcgagtggtgggctttgaaacctggagcccctcaacccaaggcaaatcaacaacatcaagacaacgctcgaggtcttgtgcttccgggttacaaataccttggacccggcaacggactcgacaagggggagccggtcaacgcagcagacgcggcggccctcgagcacaacaaggcctacgaccagcagctcaaggccggagacaacccgtacctcaagtgcaaccacgccgacgccgagttccaggagcggctcaaagaagatacgtcttttgggggcaacctcgggcgagcagtcttccaggccaaaaagaggcctcttgaacctcttggtctggttgaggaagcggctaagacggctcctggaaagaagaggcctgtagagcagtctcctcaggaaccggactcctccgcgggtattggcaaatcgggtgcacagcccgctaaaaagagactcaatttcggtcagactggcgacacagagtcagtcccagaccctcaaccaatcggagaacctcccgcagccccctcaggtgtgagatctcttacaatggcttcaggtggtggcgcaccagtggcagacaataacgaaggtgccgatggagtgggtagttcctcgggaaattggcattgcgattcccaatggctgggggacagagtcatcaccaccagcacccgaacctgggccctgcccacctacaacaatcacctctacaagcaaatctccaacagcacatctggaggatcttcaaatgacaacgcctacctcggctacagcaccccctgggggtattttgacttcaacagattccactgccacttctcaccacgtgactggcagcgactcatcaacaacaactggggattccggcctaagcgactcaacttcaagctcttcaacattcaggtcaaagaggttacggacaacaatggagtcaagaccatcgccaataaccttaccagcacggtccaggtcttcacggactcagactatcagctcccgtacgtgctcgggtcggctcacgagggctgcctcccgccgttcccagcggacgttttcatgattcctcagtacgggtatctgacgcttaatgatggaagccaggccgtgggtcgttcgtccttttactgcctggaatatttcccgtcgcaaatgctaagaacgggtaacaacttccagttcagctacgagtttgagaacgtacctttccatagcagctacgctcacagccaaagcctggaccgactaatgaatccactcatcgaccaatacttgtactatctctcaaagactattaacggttctggacagaatcaacaaacgctaaaattcagtgtggccggacccagcaacatggctgtccagggaagaaactacatacctggacccagctaccgacaacaacgtgtctcaaccactgtgactcaaaacaacaacagcgaatttgcttggcctggagcttcttcttgggctctcaatggacgtaatagcttgatgaatcctggacctactatggccagccacaaagaaggagaggaccgtttctttcctttgtctggatctttaatttttggcaaacaaggaactggaagagacaacgtggatgcggacaaagtcatgataaccaacgaagaagaaattaaaactactaacccggtagcaacggagtcctatggacaagtggccacaaaccaccagagtgcccaagcacaggcgcagaccggctgggttcaaaaccaaggaatacttccgggtatggtttggcaggacagagatgtgtacctgcaaggacccatttgggccaaaattcctcacacggacggcaactttcacccttctccgctgatgggagggtttggaatgaagcacccgcctcctcagatcctcatcaaaaacacacctgtacctgcggatcctccaacggccttcaacaaggacaagctgaactctttcatcacccagtattctactggccaagtcagcgtggagatcgagtgggagctgcagaaggaaaacagcaagcgctggaacccggagatccagtacacttccaactattacaagtctaataatgttgaatttgctgttaatactgaaggtgtatatagtgaaccccgccccattggcaccagatacctgactcgtaatctg

SEQ ID NO: 640 - DNA, 2208 bp, Artificial Sequence
  source: /note="Description of Artificial Sequence: Synthetic polynucleotide"
atggctgccgatggttatcttccagattggctcgaggacaaccttagtgaaggaattcgcgagtggtgggctttgaaacctggagcccctcaacccaaggcaaatcaacaacatcaagacaacgctcgaggtcttgtgcttccgggttacaaataccttggacccggcaacggactcgacaagggggagccggtcaacgcagcagacgcggcggccctcgtgcacgacaaggcctacgaccagcagctcaaggccggagacaacccgtacctcaagtgcaaccacgccgacgccgagttccaggagcggctcaaagaagatacgtcttttgggggcaacctcgggcgagcagtcttccaggccaaaaagaggcttcttgaacctcttggtctggttgaggaagcggctaagacggctcctggaaagaagaggcctgtagagcagtctcctcaggaaccggactcctccgcgggtattggcaaatcgggtgcacagcccgctaaaaagagactcaatttcggtcagactggcgacacagagtcagtcccagaccctcaaccaatcggagaacctcccgcagccccctcaggtgtgggatctcttacaatggcttcaggtggtggcgcaccagtggcagacaataacgaaggtgccgatggagtgggtagttcctcgggaaattggcattgcgattcccaatggctgggggacagagtcatcaccaccagcacccgaacctgggccctgcccacctacaacaatcacctctacaagcaaatctccaacagcacatctggaggatcttcaaatgacaacgcctacctcggctacagcaccccctgggggtattttgacttcaacagattccactgccacttctcaccacgtgactggcagcgactcatcaacaacaactggggattccggcctaagcgactcaacttcaagctcttcaacattcaggtcaaagaggttacggacaacaatggagtcaagaccatcgccaataaccttaccagcacggtccaggtcttcacggactcagactatcagctcccgtacgtgctcgggtcggctcacgagggctgcctcccgccgttcccagcggacgttttcacgattcctcagtacgggtatctgacgcttaatgatggaagccaggccgtgggtcgttcgtccttttactgcctggaatatttcccgtcgcaaatgctaagaacgggtaacaacttccagttcagctacgagtttgagaacgtacctttccatagcagctacgctcacagccaaagcctggaccgactaatgaatccactcatcgaccaatacttgtactatctctcaaagactattaacggttctggacagaatcaacaaacgctaaaattcagtgtggccggacccagcaacatggctgtccagggaagaaactacatacctggacccagctaccgacaacaacgtgtctcaaccactgtgactcaaaacaacaacagcgaatttgcttggcctggagcttcttcttgggctctcaatggacgtaatagcttgatgaatcctggacctgctatggccagccacaaagaaggagaggaccgtttctttcctttgtctggatctttaatttttggcaaacaaggaactggaagagacaacgtggatgcggacaaagtcatgataaccaacgaagaagaaattaaaactactaacccggtagcaacggagtcctatggacaagtggccacaaaccaccagagtgcccaagcacaggcgcagaccggctgggttcaaaaccaaggaatacttccgggtatggtttggcaggacagagatgtgtacctgcaaggacccatttgggccaaaattcctcacacggacggcaactttcacccttctccgctgatgggagggtttggaatgaagcacccgcctcctcagatcctcatcaaaaacacacctgtacctgcggatcctccaacggccttcaacaaggacaagctgaactctttcatcacccagtattctactggccaagtcagcgtggagatcgagtgggagctgcagaaggaaaacagcaagcgctggaacccggagatccagtacacttccaactattacaagtctaataatgttgaatttgctgttaatactgaaggtgtatatagtgaaccccgccccattgggccccgatacctgactcgtaatttt

SEQ ID NO: 641 - DNA, 2208 bp, Artificial Sequence
  source: /note="Description of Artificial Sequence: Synthetic polynucleotide"
atggctgccgatggttatcttccagattggctcgaggacaaccttagtgaaggaattcgcgagtggtgggctttgaaacctggagcccctcaacccaaggcaaatcaacaacatcaagacaacgctcgaggtcttgtgcttccgggttacaaataccttggacccggcaacggactcgacaagggggagccggtcaacgcagcagacgcggcggccctcgagcacaacaaggcctacgaccagcagctcaaggccggagacaacccgtacctcaagtgcaaccacgccgacgccgagttccaggagcggctcaaagaagatacgtcttttgggggcaacctcgggcgagcagtcttccaggccaaaaagaggcttcttgaacctcttggtctggttgaggaagcggctaagacggctcctggaaagaagaggcctgtagagcagtctcctcaggaaccggactcctccgcgggtattggcaaatcgggtgcacagcccgctaaaaagagactcaatttcggtcagactggcgacacagagtcagtcccagaccctcaaccaatcggagaacctcccgcagccccctcaggtgtgagatctcttacaatggcttcaggtggtggcgcaccagtggcagacaataacgaaggtgccgatggagtgggtagttcctcgggaaattggcattgcgattcccaatggctgggggacagagtcatcaccaccagcacccgaacctgggccctgcccacctacaacaatcacctctacaagcaaatctccaacagcacatctggaggatcttcaaatgacaacgcctacctcggctacagcaccccctgggggtattttgacttcaacagattccactgccacttctcaccacgtgactggcagcgactcatcaacaacaactggggattccggcctaagcgactcaacttcaagctcttcaacattcaggtcaaagaggttacggacaacaatggagtcaagaccatcgccaataaccttaccagcacggtccaggtcttcacggactcagactatcagctcccgtacgtgctcgggtcggctcacgagggctgcctcccgccgttcccagcggacgttttcatgattcctcagtacgggtatctgacgcttaatgatggaagccaggccgtgggtcgttcgtccttttactgcctggaatatttcccgtcgcaaatgctaagaacgggtaacaacttccagttcagctacgagtttgagaacgtacctttccatagcagctacgctcacagccaaagcctggaccgactaatgaatccactcatcgaccaatacttgtactatctctcaaagactattaacggttctggacagaatcaacaaacgctaaaattcagtgtggccggacccagcaacatggctgtccagggaagaaactacatacctggacccagctaccgacaacaacgtgtctcaaccactgtgactcaaaacaacaacagcgaatttgcttggcctggagcttcttcttgggctctcaatggacgtaatagcttgatgaatcctggacctgctatggccagccacaaagaaggagaggaccgtttctttcctttgtctggatctttaatttttggcaaacaaggaactggaagagacaacgtggatgcggacaaagtcatgataaccaacgaagaagaaattaaaactactaacccggtagcaacggagtcctatggacaagtggccacaaaccaccagagtgcccaagcacaggcgcagaccggctgggttcaaaaccaaggaatacttccgggtatggtttggcaggacagagatgtgtacctgcaaggacccatttgggccaaaattcctcacacggacggcaactttcacccttctccgctgatgggagggtttggaatgaagcacccgcctcctcagatcctcatcaaaaacacacctgtacctgcggatcctccaacggccttcaacaaggacaagctgaactctttcatcacccagtattctactggccaagtcagcgtggagatcgagtgggagctgcagaaggaaaacagcaagcgctggaacccggagatccagtacacttccaactattacaagtctaataatgttgaatttgctgttaatactgaaggtgtatatagtgaaccccgccccattggcaccagatacctgactcgtaatctg

SEQ ID NO: 642 - DNA, 2208 bp, Artificial Sequence
  source: /note="Description of Artificial Sequence: Synthetic polynucleotide"
atggctgccgatggttatcttccagattggctcgaggacaaccttagtgaaggaattcgcgagtggtgggctttgaaacctggagcccctcaacccaaggcaaatcaacaacatcaagacaacgctcgaggtcttgtgcttccgggttacaaataccttggacccggcaacggactcgacaagggggagccggtcaacgcagcagacgcggcggccctcgagcacgacaaggcctacgaccagcagctcaaggccggagacaacccgtacctcaagtgcaaccacgccgacgccgagttccaggagcggctcaaagaagatacgtcttttgggggcaacctcgggcgagcagtcttccaggccaaaaagaggcttcttgaacctcttggtctggttgaggaagcggctaagacggctcctggaaagaagaggcctgtagagcagtctcctcaggaaccggactcctccgcgggtattggcaaatcgggtgcacagcccgctaaaaagagactcaatttcggtcagactggcgacacagagtcagtcccagaccctcaaccaatcggagaacctcccgcagccccctcaggtgtgggatctcttacaatggcttcaggcggtggcgcaccagtggcagacaataacgaaggtgccgatggagtgggtagttcctcgggaaattggcattgcgattcccaatggctgggggacagagtcatcaccaccagcacccgaacctgggccctgcccacctacaacaatcacctctacaagcaaatctccaacagcacatctggaggatcttcaaatgacaacgcctacctcggctacagcaccccctgggggtattttgacttcaacagattccactgccacttctcaccacgtgactggcagcgactcatcaacaacaactggggattccggcctaagcgactcaacttcgagctcttcaacattcaggtcaaagaggttacggacaacaatggagtcaagaccatcgccaataaccttaccagcacggtccaggtcttcacggactcagactatcagctcccgtacgtgctcgggtcggctcacgagggctgcctcccgccgttcccagcggacgttttcatgattcctcagtacgggtatctgacgcttaatgatggaagccaggccgtgggtcgttcgtccttttactgcctggaatatttcccgtcgcaaatgctaagaacgggtaacaacttccagtccagctacgagtttgagaacgtacctttccatagcagctacgctcacagccaaagcctggaccgactaatgaatccactcatcgaccaatacttgtactatctctcaaagactattaacggttctggacagaatcaacaaacgctaaaattcagtgtggccggacccagcaacatggctgtccagggaagaaactacatacctggacccagctaccgacaacaacgtgcctcaaccactgtgactcaaaacaacaacagcgaatttgcttggcctggagcttcttcttgggctctcaatggacgtaatagcttgatgaatcctggacctgctatggccagccacaaagaaggggaggaccgtttctttcctttgtctggatctttaatttttggcaaacaaggaactggaagagacaacgtggatgcggacaaagtcatgataaccaacgaagaagaaattaaaactactaacccggtagcaacggagtcctatggacaagtggccacaaaccaccagagtgcccaagcacaggcgcagaccggctgggttcaaaaccaaggaatacttccgggtatggtttggcaggacagagatgtgtacctgcaaggacccatttgggccaaaattcctcacacggacggcaactttcacccttctccgctgatgggagggtttggaatgaagcacccgcctcctcagatcctcatcaaaaacacacctgtacctgcggatcctccaacggccttcaacaaggacaagctgaactctttcatcacccagtattctactggccaagtcagcgtggagatcgagtgggagctgcagaaggaaaacagcaagcgctggaacccggagatccagtacacttccaactattacaagtctaataatgttgaatttgctgttaatactgaaggtgtatatagtgaaccccgccccattggcaccagatacctgactcgtaatctg

SEQ ID NO: 643 - DNA, 2208 bp, Artificial Sequence
  source: /note="Description of Artificial Sequence: Synthetic polynucleotide"
atggctgccgatggttatcttccagattggctcgaggacaaccttagtgaaggaattcgcgagtggtgggctttgaaacctggagcccctcaacccaaggcaaatcaacaacatcaagacaacgctcgaggtcttgtgcttccgggttacaaataccttggacccggcaacggactcgacaagggggagccggtcaacgcagcagacgcggcggccctcgagcacgacaaggcctacgaccagcagctcaaggccggagacaacccgtacctcaagtgcaaccacgccgacgccgagttccaggagcggctcaaagaagatacgtcttttgggggcaacctcgggcgagcagtcttccaggccaaaaagaggcttcttgaacctcttggtctggttgaggaagcggctaagacggctcctggaaagaagaggcctgtagagcagtctcctcaggaaccggactcctccgcgggtattggcaaatcgggtgcacagcccgctaaaaagagactcaatttcggtcagactggcgacacagagtcagtcccagaccctcaaccaatcggagaacctcccgcagcccccccaggtgtgggatctcttacaatggcttcaggtggtggcgcaccagtggcggacaataacgaaggtgccgatggagtgggtagttcctcgggaaattggcattgcgattcccaatggctgggggacagagtcatcaccaccagcacccgaacctgggccctgcccacctacaacaatcacctctacaagcaaatctccaacagcacatctggaggatcttcaaatgacaacgcctacctcggctacagcaccccctgggggtattttgacttcaacagattccactgccacttctcaccacgtgactggcagcgactcatcaacaacaactggggattccggcctaagcgactcaacttcaagctcttcaacattcaggtcaaagaggttacggacaacaatggagtcaagaccatcgccaataaccttaccagcacggtccaggtcttcacggactcagactatcagctcccgtacgtgctcgggtcggctcacgagggctgcctcccgccgttcccagcggacgttttcatgattcctcagtacgggtatctgacgcttaatgatggaagccaggccgtgggtcgttcgtccttttactgcctggaatatttcccgtcgcaaatgctaagaacgggtaacaacttccagttcagctacgagtttgagaacgtacctttccatagcagctacgctcacagccaaagcctggaccgactaatgaatccactcatcgaccaatacttgtactatctctcaaagactattagcggttctggacagaatcaacaaacgctaaaattcagtgtggccggacccagcaacatggctgtccagggaagaaactacatacctggacccagctaccgacaacaacgtgtctcaaccactgtgactcaaaacaacagcagcgaatttgcttggcctggagcttcttcttgggctctcaatggacgtaatagcttgatgaatcctggacctgctatggccagccacaaagaaggagaggaccgtttctttcctttgtctggatctttaatttttggcaaacaaggaactggaagagacaacgtggatgcggacaaagtcatgataaccaacgaagaagaaattaaaactactaacccggtagcaacggagtcctatggacaagtggccacaaaccaccagagtgcccaagcacaggcgcagaccggctgggttcaaaaccaaggaatactttcgggtatggtttggcaggacagagatgtgtacctgcaaggacccatttgggccaaaattcctcacacggacggcaactttcacccttctccgctgatgggagggtttggaatgaagcacccgcctcctcagatcctcatcaaaaacacacctgtacctgcggatcctccaacggccttcaacaaggacaagctgaactctttcatcacccagtattctactggccaagtcagcgtggagatcgagtgggagctgcagaaggaaaacagcaagcgctggaacccggagatccagtacacttccaactattacaagtctaataatgttgaatttgctgttaatactgaaggtgtatatagtgaaccccgccccattggcaccagatacctgactcgtaatctg

SEQ ID NO: 644 - DNA, 2208 bp, Artificial Sequence
  source: /note="Description of Artificial Sequence: Synthetic polynucleotide"
atggctgccgatggttatcttccagattggctcgaggacaaccttagtgaaggaattcgcgagtggtgggctttgaaacctggagcccctcaacccaaggcaaatcaacaacatcaagacaacgctcgaggtcttgtgcttccgggttacaaataccttggacccggcaacggactcgacaagggggagccggtcaacgcagcagacgcggcggccctcgagcacgacaaggcctacgaccagcagctcaaggccggagacaacccgtacctcaagtgcaaccacgccgacgccgagttccaggagcggctcaaagaagatacgtcttttgggggcaacctcgggcgagcagtcttccaggccaaaaagaggcttcttgaacctcttggtctggttgaggaagcggctaagacggctcctggaaagaagaggcctgtagagcagtctcctcaggaaccggactcctccgcgggtattggcaaatcgggtgcacagcccgctaaaaagagactcaatttcggtcagactggcgacacagagtcagtcccagaccctcaaccaatcggagaacctcccgcagccccctcaggtgtgggatctcttacaatggcttcaggtggtggcgcaccagtggcagacaataacgaaggtgccgatggagtgggtagttcctcgggaaattggcattgcgattcccaatggctgggggacagagtcatcaccaccagcacccgaacctgggccctgcccacctacaacaatcacctctacaagcaaatctccaacagcacatctggaggatcttcaaatgacaacgcctacctcggctacagcaccccctgggggtattttgacttcaacagattccactgccacttctcaccacgtgactggcagcgactcatcaacaacaactggggattccggcctaagcgactcaacttcaagctcttcaacattcaggtcaaagaggttacggacaacaatggagtcaagaccatcgccaataaccttaccagcacggtccaggtcttcacggactcagactatcagctcccgtacgtgctcgggtcggctcacgagggctgcctcccgccgttcccagcggacgttttcatgattcctcagtacgggtatctgacgcttaatgatggaagccaggccgtgggtcgttcgtccttttactgcctggaatatttcccgtcgcaaatgctaagaacgggtaacaacttccagttcagctacgagtttgagaacgtacctttccatagcagctacgctcacagccaaagcctggaccgactaatgaatccactcatcgaccaatacttgtactatctctcaaagactattaacggttctggacagaatcaacaaacgctaaaattcagtgtggccggacccagcaacatggctgtccagggaagaaactacatacctggacccagctaccgacaacaacgtgtctcaaccactgtgactcaaaacaacaacagcgaatttgcttggcctggagcttcttcttgggctctcaatggacgtaatagcttgatgaatcctggacctgctatggccagccacaaagaaggagaggaccgtttctttcctttgtctggatctttaatttttggcaaacaaggaactggaagagacaacgtggatgcggacaaagtcatgataaccaacgaagaagaaattaaaactactaacccggtagcaacggagtcctatggacaagtggccacaaaccaccagagtgcccaagcacaggcgcagaccggctgggttcaaaaccaaggaatacttccgggtatggtttggcaggacagagatgtgtacctgcaaggacccatttgggccaaaattcctcacacggacggcaactttcacccttctccgctgatgggagggtttggaatgaagcacccgcctcctcagatcctcatcaaaaacacacctgtacctgcggatcctccaacggccttcaacaaggacaagctgaactctttcatcacccagtattctactggccaagtcagcgtggagatcgagtgggagctgcagaaggaaaacagcaagcgctggaacccggagatccagtacacttccaactattacaagtctaataatgttgaatttgctgttaatactgaaggtgtatatagtgaaccccgccccattggcaccagatacctgactcgtaatctg

SEQ ID NO: 645 - DNA, 2208 bp, Artificial Sequence; identical to SEQ ID NO: 644
  source: /note="Description of Artificial Sequence: Synthetic polynucleotide"

SEQ ID NO: 646 - DNA, 2208 bp, Artificial Sequence
  source: /note="Description of Artificial Sequence: Synthetic polynucleotide"
atggctgccgatggttatcttccagattggctcgaggacaaccttagtgaaggaattcgcgagtggtgggctttgaaacctggagcccctcaacccaaggcaaatcaacaacatcaagacaacgctcgaggtcttgtgcttccgggttacaaataccttggacccggcaacggactcgacaagggggagccggtcaacgcagcagacgcggcggccctcgagcacgacaaggcctacgaccagcagctcaaggccggagacaacccgtacctcaagtgcaaccacgccgacgccgagttccaggagcggctcaaagaagatacgtcttttgggggcaacctcgggcgagcagtcttccaggccaaaaagaggcttcttgaacctcttggtctggttgaggaagcggctaagacggctcctggaaagaagaggcctgtagagcagtctcctcaggaaccggactcctccgcgggtattggcaaatcgggtgcacagcccgctaaaaagagactcaatttcggtcagactggcgacacagagtcagtcccagaccctcaaccaatcggagaacctcccgcagccccctcaggtgtgggatctcttacaatggcttcaggtggtggcgcaccagtggcagacaataacgaaggtgccgatggagtgggtagttcctcgggaaattggcattgcgattcccaatggctgggggacagagtcatcaccaccagcacccgaacctgggccctgcccacctacaacaatcacctctacaagcaaatctccaacagcacatctggaggatcttcaaatgacaacgcctacctcgactacagcaccccctgggggtattttgacttcaacagattccactgccacttctcaccacgtgactggcagcggctcatcaacaacaactggggattccggcctaagcgactcaacttcaagctcttcaacattcaggtcaaagaggttacggacaacaatggagtcaagaccatcgccaataaccttaccagcacggtccaggtcttcacggactcagactatcagctcccgtacgtgctcgggtcggctcacgagggctgcctcccgccgttcccagcggacgttttcatgattcctcagtacgggtatctgacgcttaatgatggaagccaggccgtgggtcgttcgtccttttactgcctggaatatttcccgtcgcaaatgctaagaacgggtaacaacttccagttcagctacgagtttgagaacgtacctttccatagcagctacgctcacagccaaagcctggaccgactaatgaatccactcatcgaccaatacttgtactatctctcaaagactattaacggttctggacagaatcaacaaacgctaaaattcagtgtggccggacccagcaacatggctgtccagggaagaaactacatacctggacccagctaccgacaacaacgtgtctcaaccactgtgactcaaaacaacaacagcgaatttgcttggcctggagcttcttcttgggctctcaatggacgtaatagcttgatgaatcctggacctgctatggccagccacaaagaaggagaggaccgtttctttcctttgtctggatctttaatttttggcaaacaaggaactggaagagacaacgtggatgcggacaaagtcatgataaccaacgaagaagaaattaaaactactaacccggtagcaacggagtcctatggacaagtggccacaaaccaccagagtgcccaagcacaggcgcagaccggctgggttcaaaaccaaggaatacttccgggtatggtttggcagggcagagatgtgtacctgcaaggacccatttgggccaaaattcctcacacggacggcaactttcacccttctccgctgatgggagggtttggaatgaagcacccgcctcctcagatcctcatcaaaaacacacctgtacctgcggatcctccaacggccttcaacaaggacaagctgaactctttcatcacccagtattctactggccaagtcagcgtggagatcgagtgggagctgcagaaggaaaacagcaagcgctggaacccggagatccagtacacttccaactattacaagtctaataatgttgaatttgctgttaatactgaaggtgtatatagtgaaccccgccccattggcaccagatacctgactcgtaatctg

SEQ ID NO: 647 - DNA, 2208 bp, Artificial Sequence; identical to SEQ ID NO: 644
  source: /note="Description of Artificial Sequence: Synthetic polynucleotide"

SEQ ID NO: 648 - DNA, 2208 bp, Artificial Sequence
  source: /note="Description of Artificial Sequence: Synthetic polynucleotide"
atggctgccgatggttatcctccagattggctcgaggacaaccttagtgaaggaattcgcgagtggtgggctttgaaacctggagcccctcaacccaaggcaaatcaacaacatcaagacaacgctcgaggtcttgtgcttccgggttacaaataccttggacccggcaacggactcgacaagggggagccggtcaacgcagcagacgcggcggccctcgagcacgacaaggcctacgaccagcagctcaaggccggggacaacccgcacctcaagtacaaccacgccgacgccgagttccaggagcggctcaaagaagatacgtcttttgggggcaacctcgggcgagcagtcttccaggccaaaaagaggcttcttgaacctcttggtctggttgaggaagcggctaagacggctcctggaaagaagaggcccgtagagcagtctcctcaggaaccggactcctccgcgggtattggcaaatcgggtgcacagcccgctaagaagagactcaatttcggtcagactggcgacactgagtcagtcccagaccctcaaccaatcggagaacctcccgcagccccctcaggtgtgggatctcttacaatggcttcaggtggtggcgcaccagtggcagacaataacgaaggtgccgatggagtgggtagttcctcgggaaattggcattgcgattcccaatggctgggggacagagtcatcaccaccagcacccgaacctgggccctgcccacctacaacaatcacctctacaagcaaatctccaacagcacatctggaggatcttcaaatgacaacgcctacttcggctacagcaccccctgggggtattttgacttcaacagattccactgccacttctcaccacgtgactggcagcgactcatcaacaacaactggggattccggcctaagcgactcaacttcaagctcttcaacattcaggtcaaagaggttacggacaacaatggagtcaagaccatcgccaataaccttaccagcacggtccaggtcttcacggactcagactatcagctcccgtacgtgctcgggtcggctcacgagggctgcctcccgccgttcccagcggacgttttcatgattcctcagtacgggtatctgacgcttaatgatggaagccaggccgtgggtcgttcgtccttttactgcctggaatatttcccgtcgcaaatgctaagaacgggtaacaacttccagttcagctacgagtttgagaacgtacctttccatagcagctacgctcacagccaaagcctggaccgactaatgaatccactcatcgaccaatacttgtactatctctcaaagactattaacggttctggacagaatcaacaaacgctaaaattcagtgtggccggacccagcaacatggctgtccagggaagaaactacatacctggacccagctaccgacaacaacgtgtctcaaccactgtgactcaaaacaacaacagcgaatttgcttggcctggagcttcttcttgggctctcaatggacgtaatagcttgatgaatcctggacctgctatggccagccacaaagaaggagaggaccgtttctttcctttgtctggatctttaatttttggcaaacaaggaactggaagagacaacgtggatgcggacaaagtcatgataaccaacgaagaagaaattaaaactactaacccggtagcaacggagtcctatggacaagtggccacaaaccaccagagtgcccaagcacaggcgcagaccggctgggttcaaaaccaaggaatacttccgggtatggtttggcaggacagagatgtgtacctgcaaggacccatttgggccaaaattcctcacacggacggcaactttcacccttctccgctgatgggagggtttggagtgaagcacccgcctcctcagatcctcatcaaaaacacacctgtacctgcggatcctccaacggccttcaacaaggacaggctgaactctttcatcacccagtattctactggccaagtcagcgtggagatcgagtgggagctgcagaaggaaaacagcaagcgctggaacccggagatccagtacacttccaactattacaagtctaataatgttgaatttgctgttaatactgaaggtgtatatagtgaaccccgccccattggcaccagatacctgactcgtaatctg

SEQ ID NO: 649 - DNA, 2208 bp, Artificial Sequence
  source: /note="Description of Artificial Sequence: Synthetic polynucleotide"
atggctgccgatggttatcttccagattggctcgaggacaaccttagtgaaggaattcgcgagtggtgggctttgaaacctggagcccctcaacccaaggcaaatcaacaacatcaagacaacgctcgaggtcttgtgcttccgggttacaaataccttggacccggcaacggactcgacaagggggagccggtcaacgcagcagacgcggcggccctcgagcacgacaaggcctacgaccagcagctcaaggccggagacaacccgtacctcaagtacaaccacgccgacgccgagttccaggagcggctcaaagaagatacgtcttttgggggcaacctcgggcgagcagtcttccaggccaaaaagaggcttcttgaacctcttggtctggttgaggaagcggctaagacggctcctggaaagaagaggcctgtagagcagtctcctcaggaaccggactcctccgcgggtattggcaaatcgggtgcacagcccgctaaaaagagactcaatttcggtcagactggcgacacagagtcagtcccagaccctcaaccaatcggagaacctcccgcagccccctcaggtgtgggatctcttacaatggcttcaggtggtggcgcaccagtggcggacaataacgaaggtgccgatggagtgggtagttcctcgggaaattggcattgcgattcccaatggctgggggacagagtcatcaccaccagcacccgaacctgggccctgcccacctacaacaatcacctctacaagcaaatctccaacagcacatctggaggatcttcaaatgacaacgcctacttcggctacagcaccccctgggggtattttgacttcaacagattccactgccacttctcaccacgtgactggcagcgactcatcaacaacaactggggattccggcctaagcgactcaacttcaagctcttcaacattcaggtcaaagaggttacggacaacaatggagtcaagaccatcgccaataaccttaccagcacggtccaggtcttcacggactcagactatcagctcccgtacgtgctcgggtcggctcacgagggctgcctcccgccgttcccagcggacgttttcatgattcctcagtacgggtatctgacgcttaatgatggaagccaggccgtgggtcgttcgtccttttactgcctggaatatttcccgtcgcaaatgctaagaacgggtaacaacttccagttcagctacgagtttgagaacgtacctttccatagcagctacgctcacagccaaagcctggaccgactaatgaatccactcatcgaccaatacttgtactatctctcaaagactattaacggttctggacagaatcaacaaacgctaaaattcagtgtggccggacccagcaacatggctgtccagggaagaaactacatacctggacccagctaccgacaacaacgtgtctcaaccactgtgactcaaaacaacaacagcgaatttgcttggcctggagcttcttcttgggctctcaatggacgtaatagtttgatgaatcctggacctgctatggccagccacaaagaaggagaggaccgtttctttcctttgtctggatctttaatttttggcaaacaaggaactggaagagacaacgtggatgcggacaaagtcatgataaccaacgaagaagaaattaaaactactaacccggtagcaacggagtcctatggacaagtggccacaaaccaccagagtgcccaagcacaggcgcagaccggctgggttcaaaaccaaggaatacttccgggtatggtttggcaggacagagatgtgtacctgcaaggacccatttgggccaaaattcctcacacggacggcaactttcacccttctccgctgatgggagggtttggagtgaagcacccgcctcctcagatcctcatcaaaaacacacctgtacctgcggatcctccaacggccttcaacaaggacaagctgaactctttcatcacccagtattctactggccaagtcagcgtggagatcgagtgggagctgcagaaggaaaacagcaagcgctggaacccggagatccagtacacttccaactattacaagtctaataatgttgaatttgctgttaatactgaaggtgtatatagtgaaccccgccccattggcaccagatacctgactcgtaatctg

SEQ ID NO: 650 - DNA, 2208 bp, Artificial Sequence
  source: /note="Description of Artificial Sequence: Synthetic polynucleotide"
atggctgccgatggttatcttccagattggctcgaggacaaccttagtgaaggaattcgcgagtggtgggctttgaaacctggagcccctcaacccaaggcaaatcaacaacatcaagacaacgctcgaggtcttgtgcttccgggttacaaataccttggacccggcaacggactcgacaagggggagccggtcaacgcagcagacgcggcggccctcgagcacgacaaggcctacgaccagcagctcaaggccggagacaacccgtacctcaagtacaaccacgccgacgccgagttccaggagcggctcaaagaagatacgtcttttgggggcaacctcgggcgagcagtcttccaggccaaaaagaggcttcttgaacctcttggtctggttgaggaagcggctaagacggctcctggaaagaagaggcctgtagagcagtctcctcaggaaccggactcctccgcgggtattggcaaatcgggtgcacagcccgctaaaaagagactcaatttcggtcagactggcgacacagagtcagtcccagaccctcaaccaatcggagaacctcccgcagccccctcaggtgtgggatctcttacaatggcttcaggtggtggcgcaccagtggcagacaataacgaaggtgccgatggagtgggtagttcctcgggaaattggcattgcgattcccaatggctgggggacagagtcatcaccaccagcacccgaacctgggccctgcccacttacaacaatcacctctacaagcaaatctccaacagcacatctggaggatcttcaaatgacaacgcctacttcggctacagcaccccctgggggtattttgacttcaacagattccactgccacttctcaccacgtgactggcagcgactcaccaacaacaactggggattccggcctaagcgactcaacttcaagctcttcaacattcaggtcaaagaggttacggacaacaatggagtcaagaccatcgccaataaccttaccagcacggtccaggtcttcacggactcagactatcagctcccgtacgtgctcgggtcggctcacgagggctgcctcccgccgttcccagcggacgttttcatgattcctcagtacgggtatctgacgcttaatgatggaagccaggccgtgggtcgttcgtccttttactgcctggaatatatcccgtcgcaaatgctaagaacgggtaacaacttccagttcagctacgagtttgagaacgtacctttccatagcagctacgctcacagccaaagcctggaccgactaatgaatccactcatcgaccaatacttgtactatctctcaaagactattaacggttctggacagaatcaacaaacgctaaaattcagtgtggccggacccagcaacatggctgtccagggaagaaactacatacctggacccagctaccgacaacaacgtgtctcaaccactgtgactcaaaacaacaacagcgaatttgcttggcctggagcttcttcttgggctctcaatggacgtaatagcttgatgaatcctggacctgctatggccagccacaaagaaggagaggaccgtttctttcctttgtctggatctttaatttttggcaaacaaggaactggaagagacaacgtggatgcggacaaagtcatgataaccaacgaagaagaaattaaaactactaacccggtagcaacggagtcctatggacaagtggccacaaaccaccagagtgcccaagcacaggcgcagaccggctgggttcaaaaccaaggaatacttccgggtatggtttggcaggacagagatgtgtacctgcaaggacccatttgggccaaaattcctcacacggacggcaactttcacccttctccgctgatgggagggtttggagtgaagcacccgcctcctcagatcctcatcaaaaacacacctgtacctgcggatcctccaacggccttcaacaaggacaagctgaactctttcatcacccagtattctactggccaagtcagcgtggagatcgagtgggagctgcagaaggaaaacagcaagcgctggaacccggagatccagtacacttccaactattacaagtctaataatgttgaatttgctgttaatactgaaggtgtatatagtgaaccccgccccattggcaccagatacctgactcgtaatctg

SEQ ID NO: 651 - DNA, 2208 bp, Artificial Sequence
  source: /note="Description of Artificial Sequence: Synthetic polynucleotide"
atggctgccgatggttatcttccagattggctcgaggacaaccttagtgaaggaattcgcgagtggtgggctttgaaacctggagcccctcaacccaaggcaaatcaacaacatcaagacaacgctcgaggtcttgtgcttccgggttacaaataccttggacccggcaacggactcgacaagggggagccggtcaacgcagcagacgcggcggccctcgagcacgacaaggcctacgaccagcagctcaaggccggagacaacccgtacctcaagtacaaccacgccgacgccgagttccaggagcggctcaaagaagatacgtcttttgggggcaacctcgggcgagcagtcttccaggccaaaaagaggcttcttgaacctcttggtctggttgaggaagcggctaagacggctcctggaaagaagaggcctgtagagcagtctcctcaggaaccggactcctccgcgggtattggcaaatcgggtgcacagcccgctaaaaagagactcaatttcggtcagactggcgacacagagtcagtcccagaccctcaaccaatcggagaacctcccgcagccccctcaggtgtgggatctcttacaatggcttcaggtggtggcgcaccagtggcagacaataacgaaggtgccgatggagtgggtagttcctcgggaaattggcattgcgattcccaatggctgggggacagagtcatcaccaccagcacccgaacctgggccctgcccacctacaacaatcacctctacaagcaaatctccaacagcacatctggaggatcttcaaatgacaacgcctacttcggctacagcaccccctgggggtattttgacttcaacagattccactgccacttctcaccacgtgactggcagcgactcatcaacaacaactggggattccggcctaagcgactcaacttcaagctcttcaacattcaggtcaaagaggttacggacaacaatggagtcaagaccatcgccaataaccttaccagcacggtccaggtcttcacggactcagactatcagctcccgtacgtgctcgggtcggctcacgagggctgcctcccgccgttcccagcggacgttttcatgattcctcagtacgggtatctgacgcttaatgatggaagccaggccgtgggtcgttcgtccttttactgcctggaatatttcccgtcgcaaatgctaagaacgggtaacaacttccagtttagctacgagtttgagaacgtacctttccatagcagctacgctcacagccaaagcctggaccgactaatgaatccactcatcgaccaatacttgtactatctctcaaagactattaacggttctggacagaatcaacaaacgctaaaattcagtgtggccggacccagcaacatggctgtccagggaagaaactacatacctggacccagctaccgacaacaacgtgtctcaaccactgtgactcaaaacaacaacagcgaatttgcttggcctggagcttcttcttgggctctcaatggacgtaatagcttgatgaatcctggacctgctatggccagccacaaagaaggagaggaccgtttctttcctttgtctggatctttaatttctggcaaacaaggaactggaagagacaacgtggatgcgaacaaagtcatgataaccaacgaagaagaaattaaaactactaacccggtagcaacggagtcctatggacaagtggccacaaaccaccagagtgcccaagcacaggcgcagaccggctgggttcaaaaccaaggaatacttccgggtatggtttggcaggacagagatgtgtacctgcaaggacccatttgggccaaaattcctcacacggacggcaactttcacccttctccgctgatgggagggtttgaaatgaagcacccgcctcctcagatcctcatcaaaaacacacctgtacctgcggatcctccaacggccttcaacaaggacaagctgaactctttcatcacccagtattctactggccaagtcagcgtggagatcgagtgggagctgcagaaggaaaacagcaagcgctggaacccggagatccagtacacttccaactattacaagtctaataatgttgaatttgctgttaatactgaaggtgtatatagtgaaccccgccccattggcaccagatacctgactcgtaatctg

SEQ ID NO: 652 - DNA, 2208 bp, Artificial Sequence
  source: /note="Description of Artificial Sequence: Synthetic polynucleotide"
atggctgccgatggttatcttccagattggctcgaggacaaccttagtgaaggaattcgcgagtggtgggctttgaaacctggagcccctcaacccaaggcaaatcaacaacatcaagacaacgctcgaggtcttgtgcttccgggttacaaataccttggacccggcaacggactcgacaagggggagccggtcaacgcagcagacgcggcggccctcgagcacgacaaggcctacgaccagcagctcaaggccggagacaacccgtacctcaagtacaaccacgccgacgccgagttccaggagcggctcaaagaagatacgtcttttgggggcaacctcgggcgagcagtcttccaggccaaaaagaggcttcttgaacctcttggtctggttgaggaagcggctaagacggctcctggaaagaagaggcctgtagagcagtctcctcaggaaccggactcctccgcgggtattggcaaatcgggtgcacagcccgctaaaaagagactcaatttcggtcagactggcgacacagagtcagtcccagaccctcaaccaatcggagaacctcccgcagccccctcaggtgtgggatctcttacaatagcttcaggtggtggcgcaccagtggcagacaataacgaaggtgccgatggagtgggtagttcctcgggaaattggcattgcgattcccaatggctgggggacagagtcatcaccaccagcacccgaacctgggccctgcccacctacaacaatcacctctacaagcgaatctccaacagcacatctggaggatcttcaaatgacaacgcctacttcggctacagcaccccctgggggtattttgacttcaacagattccactgccacttctcaccacgtgactggcagcgactcatcaacaacaactggggattccggcctaagcgactcaacttcaagcttttcaacattcgggtcaaagaggttacggacaacaatggagtcaagaccatcaccaataaccttaccagcacggtccaggtcttcacggactcagactatcagctcccgtacgtgcttgggtcggctcacgagggctgcctcccgccgttcccagcggacgttttcatgattcctcagtacgggtatctgacgcttaatgatggaagccaggccgtgggtcgttcgtccttttactgcctggaatatttcccgtcgcaaatgctaagaacgggtaacaacttccagttcagctacgagtttgagaacgtacctttccatagcagctacgctcacagccaaagcctggaccgactaatgaatccactcatcgaccaatacttgtactatctctcaaagactattaacggttctggacagaatcaacaaacgctaaaattcagtgtggccggacccagcaacatggctgtccagggaagaaactacatacctggacccagctaccgacaacaacgtgtctcaaccactgtgactcgaaacaacaacagcgaatttgcttggcctggagcttcttcttgggctctcaatggacgtaatagcttgatgaatcctggacctgctatggccagccacaaagaaggagaggaccgtttctttcctttgtctggatctttaatttttggcaaacaaggaactggaagagacaacgtggatgcggacaaagtcatgataaccaacgaagaagaaattaaaactactaacccggtagcaacggagtcctatggacaagtggccacaaaccaccagagtgcccaagcacaggcgcagaccggctgggttcaaaaccaaggaatacttccgggtatggtttggcaggacagagatgtgtacctgcaaggacccatttgggccaaaattcctcacacggacggcaactttcacccttctccgctgatgggagggtttggagtgaagcacccgcctcctcagatcctcatcaaaaacacacctgtacctgcggatcctccaacggccttcaacaaggacaagctgaactctttcatcacccagtattctactggccaagtcagcgtggagatcgagtgggagctgcagaaggaaaacagcaagcgctggaacccggagatccagtacacttccaactattacaagtctaataatgttgaatttgctgttaatactgaaggtgtatatagtgaaccccgccccattggcaccagatacctgactcgtaatctg

SEQ ID NO: 653 - DNA, 2208 bp, Artificial Sequence
  source: /note="Description of Artificial Sequence: Synthetic polynucleotide"
atggctgccgatggttatcttccagattggctcgaggacaaccttagtgaaggaattcgcgagtggtgggctttgaaacctggagcccctcaacccaaggcaaatcaacaacatcaagacaacgctcgaggtcttgtgcttccgggttacaaataccttggacccggcaacggactcgacaagggggagccggtcaacgcagcagacgcggcggccctcgagcacgacaaggcctacgaccagcagctcaaggccggagacaacccgtacctcaagtacaaccacgccgacgccgagttccaggagcggctcaaagaagatacgtcttttgggggcaacctcgggcgagcagtcttccaggccaaaaagaggcttcttgaacctcttggtctggttgaggaagcggctaagacggctcctggaaagaagaggcctgtagagcagtctcctcaggaaccggactcctccgcgggtattggcaaatcgggcgcacagcccgctaaaaagagactcaatttcggtcagactggcgacacagagccagtcccagaccctcaaccaatcggagaacctcccgcagccccctcaggtgtgggatctcttacaatggcttcaggtggtggcgcaccagtggcagacaataacgaaggtgccgatggagtgggtagttcctcgggaaattggcattgcgattcccaatggctgggggacagagtcatcaccaccagcacccgaacctgggccctgcccacctacaacaatcacctctacaagcaaatctccaacagcacatctggaggatcttcaaatgacaacgcctacttcggctacagcaccccctgggggtattttgacttcaacagattccactgccacttctcaccacgtgactggcagcgactcatcaacaacaactggggattccggcctaagcgactcaacttcaagctcttcaacattcaggtcaaagaggttacggacaacaatggagtcaagaccatcgccaataaccttaccagcacggtccaggtcttcacggactcagactatcagctcccgtacgtgctcgggtcggctcacgagggctgcctcccgccgttcccagcgggcgttttcatgattcctcagtacgggtatctgacgcttaatgatggaagccaggccgtgggtcgttcgtccttttactgcctggaatatttcccgtcgcaaatgctaagaacgggtaacaacttccagttcagctacgagtttgagaacgtacctttccatagcagctacgctcacagccaaagcctggaccgactaatgaatccactcatcgaccaatacttgtactatctctcaaagactattaacggttctggacagaatcaacaaacgctaaaattcagtgtggccggacccagcaacatggctgtccagggaagaaactacatacctggacccagctaccgacaacaacgtgtctcaaccactgcgactcaaaacaacaacagcgaatttgcttggcctggagcttcttcttgggctctcaatggacgtaatagcttgatgaatcctggacctgctatggccagccacaaagaaggagaggaccgtttctttcctttgtctggatctttaatttttggcaaacaaggaactggaagagacaacgtggatgcggacaaagtcatgataaccaacgaagaagaaattaaaactactaacccggtagcaacggagtcctatggacaagtggccacaaaccaccagagtgcccaagcacaggcgcagaccggctgggttcaaaaccaaggaatacttccgggtatggtttggcaggacagagatgtgtacctgcaaggacccatttgggccaaaattcctcacacggacggcaactttcacccttctccgctgatgggagggtttggaatgaagcacccgcctcctcagatcctcatcaaaaacacacctgtacctgcggatcctccaacggccttcaacaaggacaagctgaactctttcatcacccagtattctactggccaagtcagcgtggagatcgagtgggagctgcagaaggaaaacagcaagcgctggaacccggagatccagtacacttccaactattacaagtctaataatgttgaatttgctgttaatactgaaggtgtatatagtgaaccccgccccattggcaccagatacctgactcgtaatctg

SEQ ID NO: 654 - DNA, 2208 bp, Artificial Sequence
  source: /note="Description of Artificial Sequence: Synthetic polynucleotide"
atggctgccgatggttatcttccagattggctcgaggacaaccttagtgaaggaattcgcgagtggtgggctttgaaacctggagcccctcaacccaaggcaaatcaacaacatcaagacaacgctcgaggtcttgtgcttccgggttacaaataccttggacccggcaacggactcgacaagggggagccggtcaacgcagcagacgcggcggccctcgagcacgacaaggcctacgaccagcagctcaaggccggagacaacccgtacctcaagtacaaccacgccgacgccgggttccaggagcggctcaaagaagatacgtcttttgggggcaacctcgggcgagcagtcttccaggccaaaaagaggcttcttgaacctcttggtctggttgaggaagcggctaagacggctcctggaaagaagaggcctgtagagcagtctcctcaggaaccggactcctccgcgggtattggcaaatcgggtgcacagcccgctaaaaagagactcaatttcggtcagactggcgacacagagtcagtcccagtccctcaaccaatcggagaacctcccgcagccccctcaggtgtgggatctcttacaatggcttcaggtggtggcgcaccagtggcagacaataacgaaggtgccgatggagtgggtagttcctcgggaaattggcattgcgattcccaatggctgggggacagagtcatcaccaccagcacccgaacctgggccctgcccacctacaacaatcacctctacaagcaaatctccaacagcacatctggaggatcttcaaatgacaacgcctacttcggctacagcaccccctgggggtattttgacttcaacagattccactgccacttctcaccacgtgactggcagcgactcatcaacaacaactggggattccggcctaagcgactcaacttcaagctcttcaacattcaggtcaaagaggttacggacaacaatggagtcaagaccatcgccaataaccttaccagcacggtccaggtcttcacggactcagactatcagctcccgtacgtgctcgggtcggctcacgagggctgcctcccgccgttcccagcggacgttttcatgattcctcagtacgggtatctgacgcttaatgatggaagccaggccgtgggtcgttcgtccttttactgcctggaatatttcccgtcgcaaatgctaagaacgggtaacaacttccagttcagctacgagtttgagaacgtacctttccatagcagctacgctcacagccaaagcctggaccgactaatgaatccactcatcgaccaatacttgtactatctctcaaagactattaacggttctggacagaatcaacaaacgctaaaattcagtgtggccggacccagcaacatggctgtccagggaagaaactacatacctggacccagctaccgacaacaacgtgtctcaaccactgtgactcaaaacaacaacagcgaatttgcttggcctggagcttcttcttgggctctcaatggacgtaatagcttgatgaatcctggacctgctatggccagccacaaagaaggagaggaccgtttctttcctttgtctggatctttaatttttggcaaacaaggagctggaagagacaacgtggatgcggacaaagtcatgataaccaacgaagaagaaattaaaactactaacccggtagcaacggagtcctatggacaagtggccacaaaccaccagagtgcccaagcacaggcgcagaccggctgggttcaaaaccaaggaatacttccgggtatggtttggcaggacagagatgtgtacctgcaaggacccatttgggccaaaattcctcacacggacggcaactttcacccttctccgctgatgggagggtttggaatgaagcacccgcctcctcagatcctcatcaaaaacacacctgtacctgcggatcctccaacggccttcaacaaggacaagctgaactctttcatcacccagtattctactggccaagtcagcgtggagatcgagtgggagctgcagaaggaaaacagcaagcgctggaacccggagatccagtacacttccaactattacaagtctaataatgttgaatttgctgttaatactgaaggtgtatatagtgaaccccgccccattggcaccagatacctgactcgtaatctg

SEQ ID NO: 655 - DNA, 2208 bp, Artificial Sequence
  source: /note="Description of Artificial Sequence: Synthetic polynucleotide"
  modified_base (377)..(377): a, c, t, or g
atggctgccgatggttatcttccagattggctcgaggacaaccttagtgaaggaattcgcgagaggtgggctttgaaacctggagcccctcaacccaaggcaaatcaacaacatcaagacaacgctcgaggtcttgtgcttccgggttacaaataccttggacccggcaacggactcgacaagggggagccggtcaacgcagcagacgcggcggccctcgagcacgacaaggcctacgaccagcagctcaaggccggagacaacccgtacctcaagtacaaccacgccgacgccgagttccaggagcggctcaaagaagatacgtcttttgggggcaacctcgggcgagcagtcttccaggccaaaaagaggcttcntgaacctcttggtctggttgaggaagcggctaagacggctcctggaaagaagaggcctgtagagcagtctcctcaggaaccggactcctccgcgggtattggcaaatcgggtgcacagcccgctaaaaagagactcaatttcggtcagactggcgacacagagtcagtcccagaccctcaaccaatcggagaacctcccgcagccccctcaggtgtgggatctcttacaatggcttcaggtggtggcgcaccagtggcagacaataacgaaggtgccgatggagtgggtagttcctcggggaattggcattgcgattcccaatggctgggggacagagtcatcaccaccagcacccgaacctgggccctgcccacctacaacaatcacctctacaagcaaatctccaacagcacatctggaggatcttcaaatgacaacgcctacttcggctacagcaccccctgggggtattttgacttcaacagattccactgccacttctcaccacgtgactggcagcgactcatcaacaacaactggggattccggcctaagcgactcaacttcaagctcttcaacattcaggtcaaagaggttacggacaacaatggagtcaagaccatcgccaataaccttaccagcacggtccaggtcttcacggactcagactatcagctcccgtacgtgctcgggtcggctcacgagggctgcctcccgccgttcccagcggacgttttcatgattcctcagtacgggtatctgacgcttaatgatggaagccaggccgtgggtcgttcgtccttttactgcctggaatatttcccgtcgcaaatgctaagaacgggtaacaacttccagttcagctacgagtttgagaacgtacctttccatagcagctacgctcacagccaaagcccggaccgactaatgaatccactcatcgaccaatacttgtactatctctcaaagactattaacggttctggacagaatcaacaaacgctaaaattcagtgtggccggacccagcaacatggctgtccagggaagaaactacatacctggacccagctaccgacaacaacgtgtctcaaccactgtgactcaaaacaacaacagcgaatttgcttggcctggagcttcttcttgggctctcaatggacgtaatagcttgatgaatcctggacctgctatggccagccacaaagaaggagaggaccgtttctttcctttgtctggatctttaatttttggcaaacaaggaactggaagagacaacgtggatgcggacaaagtcatgataaccaacgaagaagaaattaaaactactaacccggtagcaacggagtcctatggacaagtggccacaaaccaccagagtgcccaagcacaggcgcagaccggctgggttcaaaaccaaggaatacttccgggtatggtttggcaggacagagatgtgtacctgcaaggacccatttgggccaaaattcctcacacggacggcaactttcacccttctccgctgatgggagggtttggagtgaagcacccgcctcctcagatcctcatcaaaaacacacctgtacctgcggatcctccaacggccttcaacaaggacaagctgaactctttcatcacccagtattctactggccaagtcagcgtggagatcgagtgggagctgcagaaggaaaacagcaagcgctggaacccggagatccagtacacttccaactattacaagtctaataatgttgaatttgctgttaatactgaaggtgtatatagtgaaccccgccccattggcaccagatacctgactcgtaatctg

SEQ ID NO: 656 - DNA, 2208 bp, Artificial Sequence
  source: /note="Description of Artificial Sequence: Synthetic polynucleotide"
atggctgccgatggttatcttccagattggctcgaggacaaccttagtgaaggaattcgcgagtggtgggctttgaaacctggagcccctcaacccaaggcaaatcaacaacatcaagacaacgctcgaggtcttgtgcttccgggttacaaataccttggacccggcaacggactcgacaagggggagccggtcaacgcagcagacgcggcggccctcgagcacgacaaggcctacgaccagcagctcaaggccggagacaacccgtacctcaagtacaaccacgccgacgccgagttccaggagcggctcaaagaagatacgtcttttgggggcaacctcgggcgagcagtcttccaggccaaaaagaggcttcttgaacctcttggtctggttgaggaagcggctaagacggctcctggaaagaagaggcctgtagagcagtctcctcaggaaccggactcctccgcgggtattggcaaatcgggtgcacagcccgctaaaaagagactcaatttcggtcagactggcgacacagagtcagtcccagaccctcaaccaatcggagaacctcccgcagccccctcaggtgtgggatctcttacaatggcttcaggtggtggcgcaccagtggcagacaataacgaaggtgccgatggagtgggtagttcctcgggaaattggcattgcgattcccaatggctgggggacagagtcatcaccaccagcacccgaacctgggccctgcccacctacaacaatcacctctacaagcaaatctccaacagcacatctggaggatcttcaaatgacaacgcctacctcggctacagcaccccctgggggtattttgacttcaacagattccactgccacttctcaccacgtgactggcagcgactcatcaacaacaactggggattccggcctaagcgactcaacttcaagctcttcaacattcaggtcaaagaggttacggacaacaatggagtcaagaccatcgccaataaccttaccagcacggtccaggtcttcacggactcagactatcagctcccgtacgtgctcgggtcggctcacgagggctgcctcccgccgttcccagcggacgttttcatgattcctcagtacgggtatctgacgcttaatgatggaagccaggccgtgggtcgttcgtccttttactgcctggaatatttcccgtcgcaaatgctaagaacgggtaacaacttccagttcagctacgagtttgagaacgtacctttccatagcagctacgctcacagccaaagcctggaccgactaatgaatccactcatcgaccaatacttgtactatctctcaaagactattaacggttctggacagaatcaacaaacgctaaaattcagtgtggccggacccagcaacatggctgtccagggaagaaactacatacctggacccagctaccgacaacaacgtgtctcaaccactgtgactcaaaacaacaacagcgaatttgcttggcctggagcttcttcttgggctctcaatggacgtaatagcttgatgaatcctggacctgctatggccagccacaaagaaggagaggaccgtttctttcctttgtctggatctttaatttttggcaaacaaggaactggaagagacaacgtggatgcggacaaagtcatgataaccaacgaagaagaaattaaaactactaacccggtagcaacggagtcctatggacaagtggccacaaaccaccagagtgcccaagcacaggcgcagaccggctgggttcaaaaccaaggaatacttccgggtatggtttggcaggacagagatgtgtacctgcaaggacccatttgggccaaaattcctcacacggacggcaactttcacccttctccgctgatgggagggtttggaatgaagcacccgcctcctcagatcctcatcaaaaacacacctgtacctgcggatcctccaacggccttcaacaaggacaagctgaactctttcatcacccagtattctactggccaagtcagcgtggagatcgagtgggagctgcagaaggaaaacagcaagcgctggaacccggagatccagtacacttccaactattacaagtctaataatgttgaatttgctgttaatactgaaggtgtatatagtgaaccccgccccattggcaccagatacctgactcgtaatctg

SEQ ID NO: 657 - DNA, 2208 bp, Artificial Sequence
  source: /note="Description of Artificial Sequence: Synthetic polynucleotide"
atggctgccgatggttatcttccagattggctcgaggacaaccttagtgaaggaattcgcgagtggtgggctttgaaacctggagcccctcaacccaaggcaaatcaacaacatcaagacaacgctcgaggtcttgtgcttccgggttacaaataccttggacccggcaacggactcgacaagggggagccggtcaacgcagcagacgcggcggccctcgagcacgacaaggcctacgaccagcagctcaaggccggagacaacccgtacctcaagtacaaccacgccgacgccgagttccaggagcggctcaaagaagatacgtcttttgggggcaacctcgggcgagcagtcttccaggccaaaaagaggcttcttgaacctcttggtctggttgaggaagcggctaagacggctcctggaaagaagaggcctgtagagcagtctcctcaggaaccggactcctccgcgggtattggcaaatcgggtgcacagcccgctaaaaagagactcaatttcggtcagactggcgacacagagtcagtcccagaccctcaaccaatcggagaacctcccgcagccccctcaggtgtgggatctcttacaatggcttcaggtggtggcgcaccagtggcagacaataacgaaggtgccgatggagtgggtagttcctcgggaaattggcattgcgattcccaatggctgggggacagagtcatcaccaccagcacccgaacctgggccctgcccacctacaacaatcacctctacaagcaaatctccaacagcacatctggaggatcttcaaatgacaacgcctacttcggctacagcaccccctgggggtattttgacttcaacagattccactgccacttctcaccacgtgactggcagcgactcatcaacaacaactggggattccggcctaagcgactcaacttcaagctcttcaacattcaggtcaaagaggttacggacaacaatggagtcaagaccatcgccaataaccttaccagcacggtccaggtcttcacggactcagactatcagctcccgtacgtgctcgggtcggctcacgagggctgcctcccgccgttcccagcggacgttttcatgattcctcagtacgggtatctgacgcttaatgatggaagccaggccgtgggtcgttcgtccttttactgcctggaatatttcccgtcgcaaatgctaagaacgggtaacaacttccagttcagctacgagtttgagaacgtacctttccatagcagctacgctcacagccagagcctggaccgactaatgaatccactcatcgaccaatacttgtactatctctcaaagactattaacggttctggacagaatcaacaaacgctaaaattcagtgtggccggacccagcaacatggctgtccagggaagaaactacatacctggacccagctaccgacaacaacgtgtctcaaccactgtgactcaaaacaacaacagcgaatttgcttggcctggagcttcttcttgggctctcaatggacgtaatagcttgatgaatcctggacctgctatggccagccacaaagaaggagaggaccgtttctttcctttgtctggatctttaatttttggcaaacaaggaactggaagagacaacgtggatgcggacaaagtcatgataaccaacgaagaagaaattaaaactactaacccggtagcaacggagtcctatggacaagtggccacaaaccaccagagtgcccaagcacaggcgcagaccggctgggttcaaaaccaaggaatacttccgggtatggtttggcaggacagagatgtgtacctgcaaggacccatttgggccaaaattcctcacacggacggcaactttcacccttctccgctgatgggagggtttggaatgaagcacccgcctcctcagatcctcatcaaaaacacacctgtacctgcggatcctccaacggccttcaacaaggacaagctggactctttcatcacccagtattctactggccaagtcagcgtggagatcgagtgggagctgcagaaggaaaacagcaagcgctggaacccggtgatccagtacacttccaactattacaagtctaataatgttgaatttgctgttaatactgaaggtgtatatagtgaaccccgccccattggcaccagatacctgactcgtaatctg

SEQ ID NO: 658 - DNA, 2208 bp, Artificial Sequence
  source: /note="Description of Artificial Sequence: Synthetic polynucleotide"
atggctgccgatggttatcttccagattggctcgaggacaacctctctgagggcattcgcgagtggtgggacttgaaacctggagccccgaagcccaaagccaaccagcaaaagcaggacgacggccggggtctggtgcttcctggctacaagtacctcggacccttcaacggactcgacaagggggagcccgtcaacgcggcggacgcagcggccctcgagcacgacaaggcctacgaccagcagctcaaagcgggtgacaatccgtacctgcggtataaccacgccgacgccgagtttcaggagcgtctgcaagaagatacgtcttttgggggcaacctcgggcgagcagtcttccaggccaagaagcgggttctcgaacctctcggtctggttgaggaaggcgctaagacggctcctggaaagaaacgtccggtagagcagtcgccacaagagccagactcctcctcgggcatcggcaagacaggccagcagcccgctaaaaagagactcaattttggtcagactggcgactcagagtcagtccccgatccacaacctctcggagaacctccagcaacccccgctgctgtggggcctactacaatggcttcaggcggtggcgcaccaatggcagacaataacgaaggcgtcgacggagtgggtaatgcctcaggaaattggcattgcgattccacatggctgggcgacagagtcatcaccaccagcacccgcacctgggccttgcccacctacaataaccacctctacaagcaaatctccagtgcttcaacgggggccagcaacgacaaccactacttcggctacagcaccccctgggggtattttgatttcaacagattccactgccacttttcaccacgtgactggcagcgactcatcaacaacaattggggattccggcccaagagactcaacttcaaactcttcaacatccaagtcaaggaggtcacgacgaatgatggcgttacaaccatcgctaataaccttaccagcacggttcaagtcttctcggactcggagtaccagcttccgtacgtcctcggctctgcgcaccagggctgcctccctccgttcccggcggacgtgttcatgattccgcaatacggctacctgacgctcaacaatggcagccaagccgtgggacgttcatccttttactgcctggaatatttcccttctcagatgctgagaacgggcaacaactttaccttcagctacacctttgaggaagtgcctttccacagcagctacgcgcacagccagagcctggaccggctgatgaatcctctcatcgaccaatacctgtattacctgaacagaactcaaaatcagtccggaagtgcccaaaacaaggacttgctgtttagccgtgggtctccagctggcatgtctgttcagcccaaaaactggctacctggaccctgttatcggcagcagcgcgtttctaaaacaaaaacagacaacaacaacagcaattttacctggactggtgcttcaaaatataacctcaatgggcgtgaatccatcatcaaccctggcactgctatggcctcacacaaagacgacgaagacaagttctttcccatgagcggtgtcatgatttttggaaaagagagcgccggagcttcaaacactgcattggacaatgtcatgattacagacgaagaggaaattaaagccactaaccctgtggccaccgaaagatttgggaccgtggcagtcaatttccagagcagcagcacagaccctgcgaccggagatgtgcatgctatgggagcattacctggcatggtgtggcaagatagagacgtgtacctgcagggtcccatttgggccaaaattcctcacacagatggacactttcacccgtctcctcttatgggcggctttggactcaagaacccgcctcctcagatcctcatcaaaaacacgcctgttcctgcgaatcctccggcggagttttcagccacaaagcttgcttcattcatcacccaatactccacaggacaagtgagtgtggaaattgaatgggagctgcagaaagaaaacagcaagcgctggaatcccgaagtgcagtacacatccaattatgcaaaatctgccaacgttgattttactgtggacaacaatggactttatactgagcctcgccccattggcacccgttaccttacccgtcccctg

SEQ ID NO: 659 - DNA, 2208 bp, Artificial Sequence
  source: /note="Description of Artificial Sequence: Synthetic polynucleotide"
atggctgccgatggttatcttccagattggctcgaggacaacctctctgagggcattcgcgagtggtgggacttgaaacctggagccccgaagcccaaagccaaccagcaaaagcaggacgacggccggggtctggtgcttcctggctacaagtacctcggacccttcaacggactcgacaagggggagcccgtcaacgcggcggacgcagcggccctcgagcacgacaaggcctacgaccagcagctcaaagcgggtgacaatccgtacctgcggtataaccacgccgacgccgagtttcaggagcgtctgcaagaagatacgtcttttgggggcaacctcgggcgagcagtcttccaggccaagaagcgggttctcgaacctctcggtctggttgaggaaggcgctaagacggctcctggaaagagacgtccggtagagcagtcgccacaagagccagactcctcctcgggcatcggcaagacaggccagcagcccgctaaaaagagactcaattttggtcagactggcgactcagagtcagtccccgatccacaacctctcggagaacctccagcaacccccgctgctgtgggacctactacaatggcttcaggcggtggcgcaccaatggcagacaataacgaaggcgccgacggagtgggtaatgcctcaggaaattggcattgcgattccacatggctgggcgacagagtcatcaccaccagcacccgcacctgggccttgcccacctacaataaccacctctacaagcaaatctccagtgcttcaacgggggccagcaacgacaaccactacttcggctacagcaccccctgggggtattttgatttcaacagattccactgccacttttcaccacgtgactggcagcgactcatcaacaacaattggggattccggcccaagagactcaacttcaaactcttcaacatccaagtcaaggaggtcacgacgaatgatggcgtcacaaccatcgctaataaccttaccagcacggttcaagtcttctcggactcggagtaccagcttccgtacgtcctcggctctgcgcaccagggctgcctccctccgttcccggcggacgtgttcatgattccgcaatacggctacctgacgctcaacaatggcagccaagccgtgggacgttcatccttttactgcctggaatatttcccttctcagatgctgagaacgggcaacaactttaccttcagctacacctttgaggaagtgcctttccacagcagctacgcgcacagccagagcctggaccggctgatgaatcctctcatcgaccaatacctgtattacctgaacagaactcaaaatcagtccggaagtgcccaaaacaaggacttgctgtttagccgtgggtctccagctggcatgtctgttcagcccaaaaactggctacctggaccctgttatcggcagcagcgcgtttctaaaacaaaaacagacaacaacaacagcaattttacctggactggtgcttcaaaatataacctcaatgggcgtgaatccatcatcaaccctggcactgctatggcctcacacaaagacgacgaagacaagttctttcccatgagcggtgtcatgatttttggaaaagagagcgccggagcttcaaacactgcattggacaatgtcatgattacagacgaagaggaaattaaagccactaaccctgtggccaccgaaagatttgggaccgtggcagtcaatttccagagcagcagcacagaccctgcgaccggagatgtgcatgctatgggagcattacctggcatggtgtggcaagatagagacgtgtacctgcagggtcccatttgggccaaaattcctcacacagatggacactttcacccgtctcctcttatgggcggctttggactcaagaacccgcctcctcagatcctcatcaaaaacacgcctgttcctgcgaatcctccggcggagttttcagctacaaagtttgcttcgttcatcacccaatactccacaggacaagtgagtgtggaaattgaatgggagctgcagaaagaaaacagcaagcgctggaatcccgaagtgcagtacacatccaattatgcaaaatctgccaacgttgattttactgtggacaacaatggactttatactgagcctcgccccattggcacccgttaccttacccgtcccctg

SEQ ID NO: 660 - DNA, 2208 bp, Artificial Sequence
  source: /note="Description of Artificial Sequence: Synthetic polynucleotide"
atggctgccgatggttatcttccagattggctcgaggacaacctctctgagggcattcgcgagtggtgggacttgaaacctggagccccgaagcccaaagccaaccagcaaaagcaggacgacggccggggtctggtgcttcctggctacaagtacctcggacccttcaacggactcgacaagggggagcccgtcaacgcggcggacgcagcggccctcgagcacgacaaggcctacgaccagcagctcaaagcgggtgacaatccgtacccgcggtataaccacgccgacgccgagtttcaggagcgtctgcaagaagatacgtcttttgggggcaacctcgggcgagcagtcttccaggccaagaagcgggttctcgaacctctcggtctggttggggaaggcgctaagacggctcctggaaagaaacgtccggtagagcagtcgccacaagagccagactcctcctcgggcatcggcaagacaggccagcagcccgctaaaaagagactcaattttggtcagactggcgactcagagtcagtccccgatccacaacctctcggagaacctccagcaacccccgctgctgtgggacctactacaatggcttcaggcggtggcgcaccaatggcagacaataacgaaggcgccgacggagtgggtaatgcctcaggaaattggcattgcgattccacatggctgggcgacagagtcatcaccaccagcacccgcacctgggccttgcccacctacaataaccacctctacaagcaaatctccagtgcttcaacgggggccagcaacgacaaccactacttcggctacagcaccccctgggggtattttgatttcaacagattccactgccacttttcaccacgtgactggcagcgactcatcaacaacaattggggattccggcccaagagactcaacttcaaactcttcaacatccaagtcaaggaggtcacgacgaatgatggcgtcacaaccatcgctaataaccttaccagcacggttcaagtcttctcggactcggagtaccagcttccgtacgtcctcggctctgcgcaccagggctgcctccctccgttcccggcggacgtgttcatgattccgcaatacggctacctgacgctcaacaatggcagccaagccgtgggacgttcatccttttactgcctggaatatttcccttctcagatgctgagaacgggcaacaactttaccttcagctacacctttgaggaagtgcctttccacagcagctacgcgcacagccagagcctggaccggctgatgaatcctcccatcgaccaatacctgtattacctgaacagaactcaaaatcagtccggaagtgcccaaaacaaggacttgctgtttagccgtgggtctccagctggcatgtctgttcagcccaaaaactggctacctggaccctgttatcggcagcagcgcgtttctaaaacaaaaacagacaacaacaacagcaattttacctggactggtgcttcaaaatataacctcaatgggcgtgaatccatcatcaaccctggcactgctatggcctcacacaaagacgacgaagacaagttctttcccatgagcggtgtcatgatttttggaaaagagagcgccggagcttcaaacactgcattggacaatgtcatgattacagacgaagaggaaattaaagccactaaccctgtggccaccgaaagatttgggaccgtggcagtcaatttccagagcagcagcacagaccctgcgaccggagatgtgcatgctatgggagcattacctggcatggtgtggcaagatagagacgtgtacctgcagggtcccatttgggccaaaattcctcacacagatggacactttcacccgtctcctcttatgggcggctttggactcaagaacccgcctcctcagatcctcatcaaaaacacgcctgttcctgcgaatcctccggcggagttttcagctacaaagtttgcttcattcatcacccaatactccacaggacaagtgagtgtggaaattgaatgggagctgcagaaagaaaacagcaagcgctggaatcccgaagtgcagtacacatccaattatgcaaaatctgccaacgttgattttactgtggacaacaatggactttatactgagcctcgccccattggcacccgttaccttacccgtcccctg

SEQ ID NO: 661 - DNA, 2208 bp, Artificial Sequence
  source: /note="Description of Artificial Sequence: Synthetic polynucleotide"
atggctgccgatggttatcttccagattggctcgaggacaacctctctgagggcattcgcgagtggtgggacttgaaacctggagccccgaagcccaaagccaaccagcaaaagcaggacgacggccggggtctggtgcttcctggctacaagtacctcggacccttcaacggactcgacaagggggagcccgtcaacgcggcggacgcagcggccctcgagcacgacaaggcctacgaccagcagctcaaagcgggtgacaatccgtacctgcggtataaccacgccgacgccgagtttcaggagcgtctgcaagaagatacgtcttttgggggcaacctcgggcgagcagtcttccaggccaagaagcgggttctcgaacctctcggtctggttgaggaaggcgctaagacggctcctggaaagaaacgtccggtagagcagtcgccacaagagccagactcctcctcgggcatcggcaagacaggccagcagcccgctaaaaagagactcaattttggtcagactggcgactcagagtcagtccccgatccacgacctctcggagaacctccagcaacccccgctgctgtgggacctactacaatggcttcaggcggtggcgcaccaatggcagacaataacgaaggcgccgacggagtgggtaatgcctcaggaaattggcattgcgattccacatggctgggcgacagagtcatcaccaccagcacccgcacctgggccttgcccacctacaataaccacctctacaagcaaatctccagtgcttcaacgggggccagcaacgacaaccactacttcggctacagcaccccctgggggtattttgatttcaacagattccactgccacttttcaccacgcgactggcagcgactcatcaacaacaattggggattccggcccaagagactcaacttcaaactcttcaacatccaagtcaaggaggtcacgacgaatgatggcgtcacaaccatcgctaataaccttaccagcacggttcaagtcttctcggactcggagtaccagcttccgtacgtcctcggctctgcgcaccagggctgcctccctccgttcccggcggacgtgttcatgattccgcaatacggctacctgacgctcaacaatggcagccaagccgtgggacgttcatccttttactgcctggaatatttcccttctcagatgctgagaacgggcaacaactttaccttcagctacacctttgaggaagtgcctttccacagcagctacgcgcacagccagagcctggaccggctgatgaatcctctcatcgaccaatacctgtattacctgaacagaactcaaaatcagtccggaagtgcccaaaacaaggacttgctgtttagccgtgggcctccagctggcatgtctgttcagcccaaaaactggctacctggaccctgttatcggcagcagcgcgtttctaaaacaaaaacagacaacaacaacagcaattttacctggactggtgcttcaaaatataacctcaatgggcgtgaatccatcatcaaccctggcactgctatggcctcacacaaagacgacgaagacaagttctttcccatgagcggtgtcatgatttttggaaaagagagcgccggagcttcaaacactgcattggacaatgtcatgattacggacgaagaggaaattaaagccactaaccctgtggccaccgaaagatttgggaccgtggcagtcaatttccagagcagcagcacagaccctgcgaccggagatgtgcatgctatgggagcattacctggcatggtgtggcaagatagagacgtgtacctgcagggtcccatttgggccaaaattcctcacacagatggacactttcacccgtctcctcttatgggcggctttggactcaagaacccgcctcctcagatcctcatcaaaaacacgcctgttcctgcgaatcctccggcggagttttcagctacaaagtttgcttcattcatcacccaatactccacaggacaagtgagtgtggaaattgaatgggagctgcagaaagaaaacagcaagcgctggaatcccgaagtgcagtacacatccaattatgcaaaatctgccaacgttgattttactgtggacaacaatggactttatactgagcctcgccccattggcacccgttaccttacccgtcccctg

SEQ ID NO: 662 - DNA, 2208 bp, Artificial Sequence
  source: /note="Description of Artificial Sequence: Synthetic polynucleotide"
atggctgccgatggttatcttccagattggctcgaggacaacctctctgagggcattcgcgagtggtgggacttgaaacctggagccccgaagcccaaagccaaccagcaaaagcaggacgacggccggggtctggtgcttcctggctacaagtacctcggacccttcaacggactcgacaagggggagcccgtcaacgcggcggacgcagcggccctcgagcacgacaaggcctacgaccagcagctcaaagcgggtgacaatccgtacctgcggtataaccacgccgacgccgagtttcaggagcgtctgcaagaagatacgtcttttgggggcaacctcgggcgagcagtcttccaggccaagaagcgggttctcgaacctctcggtctggttgaggaaggcgctaagacggctcctggaaagaaacgtccggtagagcagtcgccacaagagccagactcctcctcgggcatcggcaagacaggccagcagcccgctaaaaagagactcaattttggtcagactggcggctcagagtcagtccccgatccacaacctctcggagaacctccagcaacccccgctgctgtgggacctactacaatggcttcaggcggtggcgcaccaatggcagacaataacgaaggcgccgacggagtgggtaatgcctcaggaaattggcattgcgattccacatggctgggcgacagagtcatcaccaccagcacccgcacctgggccttgcccacctacaataaccacctctacaagcaaatctccagtgcttcaacgggggccagcaacgacaaccactacttcggctacagcaccccctgggggtattttgatttcaacagattccactgccacttttcaccacgtgactggcagcgactcatcaacaacaattggggattccggcccaagagactcaacttcaaactcttcaacatccaagtcaaggaggtcacgacgaatgatggcgtcacaaccatcgctaataaccttaccagcacggttcaagtcttctcggactcggagtaccagcttccgtacgtcctcggctctgcgcaccagggctgcctccctccgttcccggcggacgtgttcatgattccgcaatacggctacctgacgctcaacaatggcagccaagccgtgggacgttcatccttttactgcctggaatatttcccttctcagatgctgagaacgggcaacaactttaccttcagctacacctttgaggaagtgcctttccacagcagctacgcgcacagccagagcctggaccggctgatgaatcctcccatcgaccaatacctgtattacctgaacagaactcaaaatcagtccgggagtgcccaaaacaaggacttgctgtttagccgtgggtctccagctggcatgtctgttcagcccaaaaactggctacctggaccctgttatcggcagcagcgcgtttctaaaacaaaaacagacaacaacaacagcaattttacctggactggtgcttcaaaatataacctcaatgggcgtgaatccatcatcaaccctggcactgctatggcctcacacaaagacgacgaagacaagttctttcccatgagcggtgtcatgatttttggaaaagagagcgccggagcttcaaacactgcattggacaatgtcatgattacagacgaagaggaaattaaagccactaaccctgtggccaccgaaagatttgggaccgtggcagtcaatttccagagcagcagcacagaccctgcgaccggagatgtgcatgctatgggagcattacctggcatggtgtggcaagatagagacgtgtacctgcagggtcccatttgggccaaaattcctcacacagatggacactttcacccgtctcctcttatgggcggctttggactcaagaacccgcctcctcagatcctcatcaaaaacacgcctgttcctgcgaatcctccggcggagttttcagctacaaagtttgcttcattcatcacccaatactccacaggacaagtgagtgtggaaattgaatgggagctgcagaaagaaaacagcaagcgctggaatcccgaagtgcagtacacatccaattatgcaaaatctgccaacgttgactttactgtggacaacaatggactttatactgagcctcgccccattggcacccgttaccttacccgtcccctg

SEQ ID NO: 663 - DNA, 2208 bp, Artificial Sequence
  source: /note="Description of Artificial Sequence: Synthetic polynucleotide"
atggctgccgatggttatcttccagattggctcgaggacaacctctctgagggcattcgcgagtggtgggacttgaaacctggagccccgaagcccaaagccaaccagcaaaagcaggacgacggccggggtctggtgcttcctggctacaagtacctcggacccttcaacggactcgacaagggggagcccgtcaacgcggcggacgcagcggccctcgagcacgacaaggcctacgaccagcagctcaaagcgggtgacaatccgtacctgcggtataaccacgccgacgccgagtttcaagagcgtctgcaagaagatacgtcttttgggggcaacctcgggcgagcagtcttccaggccaagaagcgggttctcgaacctctcggtctggttgaggaaggcgctaagacggctcctggaaagaaacgtccggtagagcagtcgccacaagagccagactcctcctcgggcatcggcaagacaggccagcagcccgctaaaaagagactcaattttggtcagactggcgactcagagtcagtccccgatccgcaacctctcggagaacctccagcaacccccgctgctgtgggacctactacaatggcttcaggcggtggcgcaccaatggcagacaataacgaaggcgccgacggagtgggtaatgcctcaggaaattggcattgcgattccacatggctgggcgacagagtcatcaccaccagcacccgcacctgggccttgcccacctacaataaccacctctacaagcaaatctccagtgcttcaacgggggccagcaacgacaaccactacttcggctacagcaccccctgggggtattttgatttcaacagattccactgccacttttcaccacgtgactggcagcgactcatcaacaacaattggggattccggcccaagagactcaacttcaaactcttcaacatccaagtcaaggaggtcacgacgaatgatggcgtcacaaccatcgctaataaccttaccagcacggttcaagtcttctcggactcggagtaccagcttccgtacgtcctcggctctgcgcaccagggctgcctccctccgttcccggcggacgtgttcatgattccgcaatacggctacctgacgctcaacaatggcagccaagccgtgggacgttcatccttttactgcctggaatatttcccttctcagatgctgagaacgggcaacaactttaccttcagctacacctttgaggaagtgcctttccacagcagctacgcgcacagccagagcctggaccggctgatgaatcctctcatcgaccaatacctgtattacctgaacagaactcaaaatcagtccggaagtgcccaaaacaaggacttgctgtttagccgtgggtctccagctggcatgtctgttcagcccaaaaactggctacctggaccctgttatcggcagcagcgcgtttctaaaacaaaaacagacaacaacaacagcaattttacctggactggtgcttcaaaatataacctcaatgggcgtgaatccatcatcaaccctggcactgctgtggcctcacacaaagacgacgaagacaagttctttcccatgagcggtgtcatgatttttggaaaagagagcgccggagcttcaaacactgcattggacaatgtcatgattacagacgaagaggaaattaaagccactaaccctgtggccaccgaaagatttgggaccgtggcagtcaatttccagagcagcagcacagaccctgcgaccggagatgtgcatgctatgggagcattacctggcatggtgtggcaagatagagacgtgtacctgcagggtcccatttgggccaaaattcctcacacagatggacactttcacccgtctcctcttatgggcggctttggactcaagaacccgcctcctcagatcctcatcaaaaacacgcctgttcctgcgaatcctccggcggagttttcagctacaaagtttgcttcattcatcacccaatactccacaggacaagtgagtgtggaaattgaatgggagctgcagaaagaaaacagcaagcgctggaatcccgaagtgcagtacacatccaattatgcaaaatctgccaacgttgattttactgtggacaacaatggactttatactgagcctcgccccattggcacccgttaccttacccgtcccctg

SEQ ID NO: 664 - DNA, 2208 bp, Artificial Sequence
  source: /note="Description of Artificial Sequence: Synthetic polynucleotide"
atggctgccgatggttatcttccagattggctcgaggacaacctctctgagggcattcgcgagtggtgggacttgaaacctggagccccgaagcccaaagccaaccagcaaaagcaggacgacggccggggtctggtgcttcctggctacaagtacctcggacccttcaacggactcgacaagggggagcccgtcaacgcggcggacgcagcggccctcgagcacgacaaggcctacgaccagcagctcaaagcgggtgacaatccgtacctgcggtataaccacgccgacgccgagtttcaggagcgtctgcaagaagatacgtcttttgggggcaacctcgggcgagcagtcttccaggccaagaagcgggttctcgaacctctcggtctggttgaggaaggcgctaagacggctcctggaaagaaacgtccggtagagcagtcgccacaagagccagactcctcctcgggcatcggcaagacaggccagcagcccgctaaaaagagactcaattttggtcagactggcgactcagagtcagtccccgatccacaacctctcggagaacctccagcaacccccgctgctgtgggacctactacaatggcttcaggcggtggcgcaccaatggcagacaataacgaaggcgccgacggagtgggtaatgcctcaggaaattggcattgcgattccacatggctgggcgacagagtcatcaccaccagcacccgcacctgggccttgcccacctacaataaccacctctacaagcaaatctccagtgcttcaacgggggccagcaacgacaaccactacttcggctacagcaccccctgggggtattttgatttcaacagattccactgccacttttcaccacgtgactggcagcaactcatcaacaacaattggggattccggcccaagagactcaacttcaaactcttcaacatccaagtcaaggaggtcacgacgaatgatggcgtcacaaccatcgctaataaccttaccagcacggttcaagtcttctcggactcggagtaccagcttccgtacgtcctcggctctgcgcaccagggctgcctccctccgttcccggcggacgtgttcatgattccgcaatacggctacctgacgctcaacaatggcagccaagccgtgggacgttcatccttttactgcctggaatatttcccttctcagatgctgagaacgggcaacaactttaccttcagctacacctttgaggaagtgcctttccacagcagctacgcgcacagccagagcctggaccggctgatgaatcctctcatcgaccaatacctgtattacctgaacagaactcaaaatcagtccggaagtgcccaaaacaaggacttgctgtttagccgtgggtctccagctggcatgtctgttcagcccaaaaactggctacctggaccctgttatcggcagcagcgcgtttctaaaacaaaaacagacaacaacaacagcaattttacctggactggtgcttcaaaatataacctcaatgggcgtgaatccatcatcaaccctggcactgctatggcctcacacaaagacgacgaagacaagttctttcccatgagcggtgtcatgatttttggaaaagagagcgccggagcttcaaacactgcattggacaatgtcatgattacagacgaagaggaaattaaagccactaaccctgtggccaccgaaagatttgggaccgtggcagtcaatttccagagcaccagcacagaccctgcgaccggagatgtgcatgctatgggagcattacctggcatggtgtggcaagatagagacgtgtacctgcagggtcccatttgggccaaaattcctcacacagatggacactttcacccgtctcctcttatgggcggctttggactcaagaacccgcctcctcagatcctcatcaaaaacacgcctgttcctgcgaatcctccggcggagttttcagctacaaagtttgcttcattcatcacccaatactccacaggacaagtgagtgtggaaattgaatgggagctgcagaaagaaaacagcaagcgctggaatcccgaagtgcagtacacatccaattatgcaaaatctgccgacgttgattttactgtggacaacaatggactttatactgagcctcgccccattggcacccgttaccttacccgtcccctg

SEQ ID NO: 665 - DNA, 2208 bp, Artificial Sequence
  source: /note="Description of Artificial Sequence: Synthetic polynucleotide"
atggctgccgatggttatcttccagattggctcgaggacaacctctctgagggcattcgcgagtggtgggacttgaaacctggagccccgaagcccaaagccaaccagcaaaagcaggacgacggccggggtctggtgcttcctggctacaagtacctcggacccttcaacggactcgacaagggggagcccgtcaacgcggcggacgcagcggccctcgagcacgacaaggcctacgaccagcagctcaaagcgggtgacaatccgtacctgcggtataaccacgccgacgccgagtttcaagagcgtctgcaagaagatacgtcttttgggggcaacctcgggcgagcagtcttccaggccaagaagcgggttctcgaacctctcggtctggttgaggaaggcgctaagacggctcctggaaagaaacgtccggtagagcagtcgccacaagagccagactcctcctcgggcatcggcaagacaggccagcagcccgctaaaaagagactcaattttggtcagactggcgactcagagtcagtccccgatccgcaacctctcggagaacctccagcaacccccgctgctgtgggacctactacaatggcttcaggcggtggcgcaccaatggcagacaataacgaaggcgccgacggagtgggtaatgcctcaggaaattggcattgcgattccacatggctgggcgacagagtcatcaccaccagcacccgcacctgggccttgcccacctacaataaccacctctacaagcaaatctccagtgcttcaacgggggccagcaacgacaaccactacttcggctacagcaccccctgggggtattttgatttcaacagattccactgccacttttcaccacgtgactggcagcgactcatcaacaacaattggggattccggcccaagagactcaacttcaaactcttcaacatccaagtcaaggaggtcacgacgaatgatggcgtcacaaccatcgctaataaccttaccagcacggttcaagtcttctcggactcggagtaccagcctccgtacgtcctcggctctgcgcaccagggctgcctccctccgttcccggcggacgtgttcatgattccgcaatacggccacctgacgctcaacaatggcagccaagccgtgggacgttcatccttttactgcctggaatatttcccttctcagatgctgagaacgggcaacaactttaccttcagctacacctttgaggaagtgcctttccacagcagctacgcgcacagccagagcctggaccggctgacgaatcctctcatcgaccaatacctgtattacctgaacagaactcaaaatcagtccggaagtgcccaaaacaaggacttgctgtttagccgtgggtctccagctggcatgtctgttcagcccaaaaactggctacctggaccctgttatcggcagcagcgcgtttctaaaacaaaaacagacaacaacaacagcaattttacctggactggtgcttcaaaatataacctcaatgggcgtgaatccatcatcaaccctggcactgctatggcctcacacaaagacgacgaagacaagttctttcccatgagcggtgtcatgatttttggaaaagagagcgccggagcttcaaacactgcattggacaatgtcatgattacagacgaagaggaaattaaagccactaaccctgtggccaccgaaagatttgggaccgtggcagtcaatttccagagcagcagcacagaccctgcgaccggagatgtgcatgctatgggagcattacctggcatggtgtggcaagatagagacgtgtacctgcagggtcccatttgggccaaaattcctcacacagatggacactttcacccgtctcctcttatgggcggctttggactcaagaacccgcctcctcagatcctcatcaaaaacacgcctgttcctgcgaatcctccggcggagttttcagctacaaagtttgcttcattcatcacccaatactccacaggacaagtgagtgtggaaattgaatgggagctgcagaaagaaaacagcaagcgctggaatcccgaagtgcagtacacatccaattatgcaaaatctgccaacgttgattttactgtggacaacaatggactttatactgagcctcgccccattggcacccgttaccttacccgtcccctg

SEQ ID NO: 666 - DNA, 2208 bp, Artificial Sequence
  source: /note="Description of Artificial Sequence: Synthetic polynucleotide"
atggctgccgatggttatcttccagattggctcgaggacaacctctctgagggcattcgcgagtggtgggacttgaaacctggagccccgaagcccaaagccaaccagcaagagcaggacgacggccggggtctggtgcttcctggctacaagtacctcggacccttcaacggactcgacaagggggagcccgtcaacgcggcggacgcagcggccctcgagcacgacaaggcctacgaccagcagctcaaagcgggtgacaatccgtacctgcggtataaccacgccgacgccgagtttcaggagcgtctgcaagaagatacgtcttttgggggcaacctcgggcgagcagtcttccaggccaagaagcgggttctcgaacctctcggtctggttgaggaaggcgctaagacggctcctggaaagaaacgtccggtagagcagtcgccacaagagccagactcctcctcgggcatcggcaagacaggccagcagcccgctaaaaagagactcaattttggtcagactggcgactcagagtcagtccccgatccacaacctctcggagaacctccagcaacccccgctgctgtgggacctactacaatggcttcaggcggtggcgcaccaatggcagacaataacgaaggcgccgacggagtgggtaatgcctcaggaaattggcattgcgattccacatggctgggcgacagagtcatcaccaccagcacccgcacctgggccttgcccacctacaataaccacctctacaagcaaatctccagtgcttcaacgggggccagcaacgacaaccactacttcggctacagcaccccctgggggtattttgatttcaacagattccactgccacttttcaccacgtgactggcagcgactcatcaacaacaattggggattccggcccaagagactcaacttcaaactcttcaacatccaagtcaaggaggtcacgacgaatgatggcgtcacaaccatcgctaataaccttaccagcacggttcaagtcttctcggactcggagtaccagcttccgtacgtcctcggctctgcgcaccagggctgcctccctccgttcccggcggacgtgttcatgattccgcaatacggctacctgacgctcaacaatggcagccaagccgtgggacgttcatccttttactgcctggaatatttcccttctcagatgctgagaacgggcaacaactttaccttcagctacacctttgaggaagtgcctttccacagcagctacgcgcacagccagagcctggaccggctgatgaatcctctcatcgaccaatacctgtattacctgaacagaactcaaaatcagtccggaagtgcccaaaacaaggacttgctgtttagccgtgggtctccagctggcatgtctgttcagcccaaaaactggctacctggaccctgttatcggcagcagcgcgtttctaaaacaaaaacagacaacaacaacagcaattttacctggactggtgcttcaaaatataacctcaatgggcgtgaatccatcatcaaccctggcactgctatggcctcacacaaagacgacgaagacaagttctttcccatgagcggtgtcatgatttttggaaaagagagcgccggagcttcaaacactgcattggacaatgtcatgattacagacgaagaggaaattaaagccactaaccctgtggccaccgaaagatttgggaccgtggcagtcaatttccagagcagcagcacagaccctgcgaccggagatgtgcatgctacgggaacattacctggcatggtgtggcaagatagagacgtgtacctgcagggtcccatttgggccaaaattcctcacacagatggacactttcacccgtctcctcttatgggcggctttggactcaagaacccgcctcctcagatcctcatcaaaaccacgcctgttcctgcgaatcctccggcggagttttcagctacaaagtttgcttcattcatcacccagtactccacaggacaagtgagtgtggaaattgaatgggagctgcagaaagaaaacagcaagcgctggaatcccgaagtgcagtacacatccaattatgcaaaatctgccaacgttgattttactgtggacgacaatggactttatactgagcctcgccccattggcacccgttaccttacccgtcccctg

SEQ ID NO: 667 - DNA, 2208 bp, Artificial Sequence
  source: /note="Description of Artificial Sequence: Synthetic polynucleotide"
atggctgccgatggttatcttccagattggctcgaggacaacctctctgagggcattcgcgagtggtgggacttgaaacctggagccccgaagcccaaagccaaccagcaaaagcaggacgacggccggggtctggtgcttcctggctacaagtacctcggacccttcaacggactcgacaagggggagcccgtcaacgcggcggacgcagcggccctcgagcacgacaaggcctacgaccagcagctcaaagcgggtgacaatccgtacctgcggtataaccacgccgacgccgagtttcaggagcgtctgcaagaagatacgtcttttgggggcaacctcgggcgagcagtcttccaggccaagaagcgggttctcgaacctctcggtctggttgaggaaggcgctaagacggctcctggaaagaaacgtccggtagagcagtcgctacaagagccagactcctcctcgggcatcggcaagacaggccagcagcccgctaaaaagagactcaattttggtcagactggcgactcagagtcagtccccgatccacaacctctcggagaacctccagcaacccccgctgctgtgggacctactacaatggcttcaggcggtggcgcaccaatggcagacaataacgaaggcgccgacggagtgggtaatgcctcaggaaattggcattgcgattccacatggctgggcgacagagtcatcaccaccagcacccgcacctgggccttgcccacctacaataaccacctctacaagcaaatctccagtgcttcaacgggggccagcaacgacaaccactacttcggctacagcaccccctgggggtattttgatttcaacagattccactgccacttttcaccacgtgactggcagcgactcatcaacaacaattggggattccggcccaagagactcaacttcaaactcttcaacatccaagtcaaggaggtcacgacgaatgatggcgtcacaaccatcgctaataaccttaccagcacggttcaagtcttctcggactcggagtaccagcttccgtacgtcctcggctctgcgcaccagggctgcctccctccgttcccggcggacgtgttcatgattccgcaatacggctacctgacgctcaacaatggcagccaagccgtgggacgttcatccttttactgcctggaatatttcccttctcagatgctgagaacgggcaacaactttaccttcagctacacctttgaggaagtgcctttccacagcagctacgcgcacagccagagcctggaccggctgatgaatcctctcatcgaccaatacctgtattacctgaacagaactcaaaatcagtccggaagtgcccaaaacaaggacttgctgtttagccgtgggtctccagctggcatgtctgttcagcccaaaaactggctacctggaccctgttatcggcagcagcgcgtttctaaaacaaaaacagacaacgacaacagcaattttacctggactggtgcttcaaaatataacctcaatgggcgtgaatccatcatcaaccctggcactgctatggcctcacacaaagacgacgaagacaagttctttcccatgagcggtgtcatgatttttggaaaagagagcgccggagcttcaaacactgcattggacaatgtcatgattacagacgaagaggaaattaaagccactaaccctgtggccaccgaaagatttgggaccgtggcagtcaatttccagagcagcagcacagaccctgcgaccggagatgtgcatgctatgggagcattacctggcatggtgtggcaagatagagacgtgtacctgcagggtcccatttgggccaaaattcctcacacagatggacactttcacccgtctcctcttatgggcggctttggactcaagaacccgcctcctcagatcctcatcaaaaacacgcctgttcctgcgaatcctccggcggagttttcagctacaaagtttgcttcattcatcacccaatactccacaggacaagtgagtgtggaaattgaatgggagctgcagaaagaaaacagcaagcgctggaatcccgaagtgcagtacacatccaattatgcaaaatctgccaacgttgattttactgtggacaacaatggactttatactgagcctcgccccattggcacccgttaccttacccgtcccctg

SEQ ID NO: 668 - DNA, 2208 bp, Artificial Sequence
  source: /note="Description of Artificial Sequence: Synthetic polynucleotide"
atggctgccgatggttatcttccagattggctcgaggacaacctctctgagggcattcgcgagtggtgggacttgaaacctggagctccgaagcccaaagccaaccagcaaaagcaggacgacggccggggtctggtgcttcctggctacaagtacctcggacccttcaacggactcgacaagggggagcccgtcaacgcggcggacgcagcggccctcgagcacgacaaggcctacgaccagcagctcaaagcgggtgacaatccgtacctgcggtataaccacgccgacgccgagtttcaggagcgtctgcaagaagatacgtcttttgggggcaacctcgggcgagcagtcttccaggccaagaagcgggttctcgaacctctcggtctggttgaggaaggcgctaagacggctcctggaaagaaacgtccggtagagcagtcgccacaagagccagactcctcctcgggcatcggcaagacaggccagcagcccgctaaaaagagactcaattttggtcagactggcgactcagagtcagtccccgatccacaacctctcggagaacctccagcaacccccgctgctgtgggacctactacaatggcttcaggcggtggcgcaccaatggcagacaataacgaaggcgccgacggagtgggtaatgcctcaggaaattggcattgcgattccacatggctgggcgacagagtcatcaccaccagcacccgcacctgggccttgcccacctacaataaccacctctacaagcaaatctccagtgcttcaacgggggccagcaacgacaaccactacttcggctacagcaccccctgggggtattttgatttcaacagattccactgccacttttcaccacgtgactggcagcgactcatcaacaacaattggggattccggcccaagagactcaacttcaaactcttcaacatccaagtcaaggaggtcacgacgaatgatggcgtcacaaccatcgctaataaccttaccagcacggttcaagtcttctcggactcggagtaccagcttccgtacgtcctcggctctgcgcaccagggctgcctccctccgttcccggcggacgtgttcatgattccgcaatacggctacctgacgctcaacaatggcagccaagccgtgggacgttcatccttttactgcctggaatatttcccttctcagatgctgagaacgggcaacaactttaccttcagctacacctttgaggaagcgcctttccacagcagctacgcgcacagccagagcctggaccggctgatgaatcctctcatcgaccaatacctgtattacctgaacagaactcaaaatcagtccggaagtgcccaaaacaaggacttgctgtttagccgtgggtctccagctggcatgtctgttcagcccaaaaactggctacctggaccctgttatcggcagcagcgcgtttctaaaacaaaaacagacaacaacaacagcaattttacctggactggtgcttcaaaatataacctcaatgggcgtgaatccatcatcaaccctggcactgctatggcctcacacaaagacgacgaagacaagttctttcccatgagcggtgtcatgatttttggaaaagagagcgccggagcttcaaacactgcattggacaatgtcatgattacagacgaagaggaaattaaagccactaaccctgtggccaccgaaagatttgggaccgtggcagtcaatttccagagcagcagcacagaccctgcgaccggagatgtgcatgctatgggagcattacctggcatggtgtggcaagatagagacgtgtacctgcagggtcccatttgggccaaaattcctcacacagatggacactttcacccgtctcctcttatgggcggctttggactcaagaacccgcctcctcagatcctcatcaaaaacacgcctgttcctgcgaatcctccggcggagttttcagctacaaagtttgcttcattcatcacccaatactccacaggacaagtgagtgtggaaattgaatgggagctgcagaaagaaaacagcaagcgctggaatcccgaagtgcagtacacatccaattatgcgaaatctgccaacgttgattttactgtggacaacaatggactttatactgagcctcgccccgttggcacccgttaccttacccgtcccctg

SEQ ID NO: 669 - DNA, 2208 bp, Artificial Sequence
  source: /note="Description of Artificial Sequence: Synthetic polynucleotide"
atggctgccgatggttatcttccagattggctcgaggacaacctctctgagggcattcgcgagtggtgggacttgaaacctggagccccgaagcccaaagccaaccagcaaaagcaggacgacggccggggtctggtgcttcctggctacaagtacctcggacccttcaacggactcgacaagggggagcccgtcaacgcggcggacgcagcggccctcgagcacgacaaggcctacgaccagcagctcaaagcgggtgacaatccatacctgcggtataaccacgccgacgccgagtttcaggagcgtctgcaagaaaatacgtcttttgggggcaacctcgggcgagcagtcttccaggccaagaagcgggttctcgaacctctcggtctggttgaggaaggcgctaagacggctcctggaaagaaacgtccggtagagcagtcgccacaagagccagactcctcctcgggcatcggcaagacaggccagcagcccgctaaaaagagactcaattttggtcagactggcgactcagagtcagtccccgatccacaacctctcggagaacctccagcaacccccgctgctgtgggacctactacaatggcttcaggcggtggcgcaccaatggcagacaataacgaaggcgccgacggagtgggtaatgcctcaggaaattggcattgcgattccacatggctgggcgacagagtcatcaccaccagcacccgcacctgggccttgcccacctacaataaccacctctacaagcaaatctccagtgcttcaacgggggccagcaacgacaaccactacttcggctacagcaccccctgggggtattttgatttcaacagattccactgccactttccaccacgtgactggcagcgactcatcaacaacaattggggattccggcccaagagactcaacttcaaactcttcaacatccaagtcaaggaggtcacgtcgaatgatggcgtcacaaccatcgctaataaccttaccagcacggttcaagtcttctcggactcggagtaccagcttccgtacgtcctcggctctgcgcaccagggctgcctccctccgttcccggcggacgtgttcatgattccgcaatacggctacctgacgctcaacaatggcagccaagccgtgggacgttcatccttttactgcctggaatatttcccttctcagatgctgagaacgggcaacaactttaccttcagctacacctttgaggaagtgcctttccacagcagctacgcgcacagccagagcctggaccggctgatgaatcctctcatcgaccaatacctgtattacctgaacagaactcaaaatcagtccggaagtgcccaaaacaaggacttgctgtttagccgtgggtctccagctggcatgtctgttcagcccaaaaactggctacctggtccctgttatcggcagcagcgcgtttctaaaacaaaaacagacaacaacaacagcaattttacctggactggtgcttcaaaatataacctcaatgggcgtgaatccatcatcaaccctggcactgctatggcctcacacaaagacgacgaagacaagttctttcccatgagcggtgtcatgatttttggaaaagagagcgccggagcttcaaacactgcattggacaatgtcatgattacagacgaagaggaaattaaagccactaaccctgtggccaccgaaagatttgggaccgtggcagtcaatttccagagcagcagcacagaccctgcgaccggagatgtgcatgctatgggagcattacctggcatggtgtggcaagatagagacgtgtacctgcagggtcccatttgggccaaaattcctcacacagatggacactttcacccgtctcctcttatgggcggctttggactcaagaacccgcctcctcagatcctcatcaaaaacacgcctgttcctgcgaatcctccggcggagttttcagctacaaagtttgcttcattcatcacccaatactccacaggacaagtgagtgtggaaattgaatgggagctgcagaaagaaaacagcaagcgctggaatcccgaagtgcagtacacatccaattatgcaaaatctgccaacgttgattttactgtggacaacaatggactttatactgagcctcgccccattggcacccgttaccttacccgtcccctg

SEQ ID NO: 670 - DNA, 2208 bp, Artificial Sequence
  source: /note="Description of Artificial Sequence: Synthetic polynucleotide"
atggctgccgatggttatcttccagattggctcgaggacaacctctctgagggcattcgcgagtggtgggacttgaaacctggagccccgaagcccaaagccaaccagcaaaagcaggacgacggccggggtctggtgcttcctggctacaagtacctcggacccttcaacggactcgacaagggggagcccgtcaacgcggcggacgcagcggccctcgagcacgacaaggcctacgaccagcagctcaaagcgggtgacaatccgtacctgcggtataaccacgccgacgccgagtttcaggagcgtctgcaagaagatacgtcttttgggggcaacctcgggcgagcagtcttccaggccaagaagcgggttctcgaacctctcggtctggttgaggaaggcgctaagacggctcctggaaagaaacgtccggtagagcagtcgccacaagagccagactcctcctcgggcatcggcaagacaggccagcagcccgctaaaaagagactcaattttggtcagactggcgactcagagtcagtccccgatccacaacctctcggagaacctccagcaacccccgctgctgtgggacctactacaatggcttcaggcggtggcgcaccaatggcagacaataacgaaggcgccgacggagtgggtaatgcctcaggaaattggcattgcgattccacatggctgggcgacagagtcatcaccaccagcacccgcacctgggccttgcccacctacaataaccacctctacaagcaaatctccagtgcttcaacgggggccagcaacgacaaccactacttcggctacagcaccccctgggggtattttgatttcaacagattccactgccacttttcaccacgtgactggcagcgactcatcaacaacaattggggattccggcccaagagactcaacttcaaactcttcaacatccaagtcaaggaggtcacgacgaatgatggcgtcacaaccatcgctaataaccttaccagcacggttcaagtcttctcggactcggagtaccagcttccgtacgtcctcggctctgcgcaccagggctgcctccctccgttcccggcggacgtgttcatgattccgcaatacggctacctgacgctcaacaatggcagccaagccgtgggacgttcatccttttactgcctggaatatttcccttctcagatgctgagaacgggcaacaactttaccttcagctacacctttgaggaagtgcctttccacagcagctacgcgcacagccagagcctggaccggctgatgaatcctctcatcgaccaatacctgtattacctgaacagaactcaaaatcagtccggaagtgcccaaaacaaggacttgctgtttagccgtgggtctccagctggcacgtctgttcagcccaaaaactggctacctggaccctgttatcggcagcagcgcgtttctaaaacaaaaacagacaacaacaacagcaattttacctggactggtgcttcaaaatataacctcaatgggcgtgaatccatcatcaaccctggcactgctatggcctcacacaaagacgacgaagacaagttctttcccatgagcggtgtcatgatttttggaaaagagagcgccggagcttcaaacactgcattggacaatgtcatgattacagacgaagaggaaattaaagccactaaccctgtggccaccgaaagatttgggaccgtggcagtcaatttccagagcagcagcacagaccctgcgaccggagatgtgcatgctatgggagcattacctggcatggtgtggcaagatagagacgtgtacctgcagggtcccatttgggccaaaattcctcacacagatggacactttcacccgtctcctcttatgggcggctttggactcaagaacccgcctcctcagatcctcatcaaaaacacgcctgttcctgcgaatcctccggcggagttttcagctacaaagtttgcttcattcatcacccaatactccacaggacaagtgagtgtggaaattgaatgggagctgcagaaagaaaacagcaagcgctggaatcccgaagtgcagtacacatccaattatgcaaaatctgccaacgttgattttactgtggacaacaatggactttatactgggcctcgccccattggcacccgttaccttacccgtcccctg

SEQ ID NO: 671 - DNA, 2208 bp, Artificial Sequence
  source: /note="Description of Artificial Sequence: Synthetic polynucleotide"
atggctgccgatggttatcttccagattggctcgaggacaacctctctgagggcattcgcgagtggtgggacttgaaacctggagccccgaagcccaaagccaaccagcaaaagcaggacgacggccggggtctggtgcttcctggctacaagtacctcggacccttcaacggactcgacaagggggagcccgtcaacgcggcggacgcagcggccctcgagcacgacaaggcctacgaccagcagctcaaagcgggtgacaatccgtacctgcggtataaccacgccgacgccgagtttcaggagcgtctgcaagaagatacgtcttttgggggcaacctcgggcgagcagtcttccaggccaagaagcgggttctcgaacctctcggtctggttgaggaaggcgctaagacggctcctggaaagaaacgtccggtagagcagtcgccacaagagccagactcctcctcgggcatcggcaagacaggccagcagcccgctaaaaagagactcaattttggtcagactggcgactcagagtcagtccccgatccacaacctctcggagaacctccagcaacccccgctgctgtgggacctactacaatggcttcaggcggtggcgcaccaatggcagacaataacgaaggcgccgacggagtgggtaatgccccaggaaattggcattgcgactccacatggctgggcgacagagtcatcaccaccagcacccgcacctgggccttgcccacctacaataaccacctctacaagcaaatctccagtgcttcaacgggggccagcaacgacaaccactacttcggctacagcaccccctgggggtattttgatttcaacagattccactgccacttttcaccacgtgactggcagcgactcatcaacaacaattggggattccggcccaagagactcaacttcaaactcttcaacatccaagtcaaggaggtcacgacgaatgatggcgtcacaaccatcgctaataaccttaccagcacggttcaagtcttctcggactcggagtaccagcttccgtacgtcctcggctctgcgcaccagggctgcctccctccgttcccggcggacgtgttcatgattccgcaatacggctacctgacgctcaacaatggcagccaagccgtgggacgttcatccttttactgcctggaatatttcccttctcagatgctgagaacgggcaacaactttaccttcagctacacctttgaggaagtgcctttccacagcagctacgcgcacagccagagcctggaccggctgatgaatcctctcatcgaccaatacctgtattacctgaacagaactcaaaatcagtccggaagtgcccaaaacaaggacttgctgtttagccgtgggtctccagctggcatgtctgttcagcccaaaaactggctacctggaccctgttatcggcagcagcgcgtttctaaaacaaaaacagacaacaacaacagcaattttacctggactggtgcttcaaaatataacctcaatgggcgtgaatccatcatcaaccctggcacagctatggcctcacacaaagacgacgaagacaagttctttcccatgagcggtgtcatgatttttggaaaagagagcgccggagcttcaaacactgcattggacaatgtcatgattacaggcgaagaggaaattaaagccactaaccctgtggccaccgaaagatttgggaccgtggcagtcaatttccagagcagcagcacagaccctgcgaccggagatgtgcatgctatgggagcattacctggcatggtgtggcaagatagagacgtgtacctgcagggtcccatttgggccaaaattcctcacacagatggacactttcacccgtctcctcttatgggcggctttggactcaagaacccgcctcctcagatcctcatcaaaaacacgcctgttcctgcgaatcctccggcggagttttcagctacaaagtttgcttcattcatcacccaatactccacaggacaagtgagtgtggaaattgaatgggagctgcagaaagaaaacagcaagcgctggaatcccgaagtgcagtacacatccaattatgcaaaatctgccaacgttgattttactgtggacaacaatggactttatactgagcctcgccccattggcacccgttaccttacccgtcccctg

SEQ ID NO: 672 - DNA, 2208 bp, Artificial Sequence
  source: /note="Description of Artificial Sequence: Synthetic polynucleotide"
atggctgccgatggttatcttccagattggctcgaggacaacctctctgagggcattcgcgagtggtgggacttgaaacctggagccccgaagcccaaagccaaccagcaaaagcaggacgacggccggggtctggtgcttcctggctacaagtacctcggacccttcaacagactcgacaagggggagcccgtcaacgcggcggacgcagcggccctcgagcacgacaaggcctacgaccagcagctcaaagcgggtgacaatccgtacctgcggtataaccacgccgacgccgagtttcaggagcgtctgcaagaagatacgtcttttgggggcaacctcgggcgagcagtcttccaggccaagaagcgggttctcgaacctctcggtctggttgaggaaggcgctaagacggctcctggaaggaaacgtccggtagagcagtcgccacaagagccagactcctcctcgggcatcggcaagacaggccagcagcccgctaaaaagagactcaattttggtcagactggcgactcagagtcagtccccgatccacaacctctcggagaacctccagcaacccccgctgctgtgggacctactacaatggcttcaggcggtggcgcgccaatggcagacaataacgaaggcgccgacggagtgggtaatgcctcaggaaattggcattgcgattccacatggctgggcgacagagtcatcaccaccagcacccgcacctgggccttgcccacctacaataaccacctctacaagcaaatctccagtgcttcaacgggggccagcaacgacaaccactacttcggctacagcaccccctgggggtattttgatttcaacagattccactgccacttttcaccacgtgactggcagcgactcatcaacaacaattggggattccggcccaagagactcaacttcaaactcttcaacatccaagtcaaggaggtcacgacgaatgatggcgtcacaaccatcgctaataaccttaccagcacggttcaagtcttctcggactcggagtaccagcttccgtacgtcctcggctctgcgcaccagggctgcctccctccgttcccggcggacgtgttcatgattccgcaatacggctacctgacgctcaacaatggcggccaagccgtgggacgttcatccttttactgcctggaatatttcccttctcagatgctgagaacgggcaacaactttaccttcagctacacctttgaggaagtgcctttccacagcagctacgcgcacagccagagcctggaccggctgatgaatcctctcatcgaccaatacctgtattacctgaacagaactcaaaatcagtccggaagtgcccaaaacaaggacttgctgtttagccgtgggtctccagctggcatgtctgttcagcccaaaaactggctacctggaccctgttatcggcagcagcgcgtttctaaaacaaaaacagacaacaacaacagcaattttacctggactggtgcttcaaaatatagcctcaatgggcgtgaatccatcatcaaccctggcactgctatggcctcacacaaagacgacgaagacaagttctttcccatgggcggtgtcatgatttttggaaaagagagcgccggagcttcaaacactgcattggacaatgccatgattacagacgaagaggaaattaaagccactaaccctgtggccaccgaaagatttgggaccgtggcagtcaatttccagagcagcagcacagaccctgcgaccggagatgtgcatgctatgggagcattacctggcatggtgtggcaagatagagacgtgtacctgcagggtcccatttgggccaaaattcctcacacagatggacactttcacccgtctcctcttatgggcggctttggactcaagaacccgcctcctcagatcctcatcaaaaacacgcctgttcctgcgaatcctccggcggagttttcagctacaaagtttgcttcattcatcacccaatactccacaggacaagtgagtgtggaaattgaatgggagctgcagaaagaaaacagcaagcgctggaatcccgaagtgcagtacacatccaattatgcaaaatctgccaacgttgattttactgtggacaacaatggactttatactgagcctcgccccattggcacccgttaccttacccgtcccctg

SEQ ID NO: 673 - DNA, 2208 bp, Artificial Sequence
  source: /note="Description of Artificial Sequence: Synthetic polynucleotide"
atggctgccgatggttatcttccagattggctcgaggacaacctctctgagggcattcgcgagtggtgggacttgaaacctggagccccgaagcccaaagccaaccagcaaaagcaggacgacggccggggtctggtgcttcctggctacaagtacctcggacccttcaacggactcgacaagggggagcccgtcaacgcggcggacgcagcggccctcgagcacgacaaggcctacgaccagcagctcaaagcgggtgacaatccgtacctgcggtataaccacgccgacgccgagtttcaggagcgtctgcaagaagatacgtcttttgggggcaacctcgggcgagcagtcttccaggccaagaagcgggttctcgaacctctcggtctggttgaggaaggcgctaagacggctcctggaaagaaacgtccggtagagcagtcgccacaagagccagactcctcctcgggcatcggcaagacaggccagcagcccgctaaaaagagactcaattttggtcagactggcgactcagagtcagtccccgatccacaacctctcggagaacctccagcaacccccgctgctgtgggacctactacaatggcttcaggcggtggcgcaccaatggcagacaataacgaaggcgccgacggagtgggtaatgcctcaggaaattggcattgcgattccacatggctgggcggcagagtcatcaccaccagcacccgcacctgggccttgcccacctacaataaccacctctacaagcaaatctccagtgcttcaacgggggccagcaacgacaaccactacttcggctacagcaccccctgggggtattttgatttcaacagattccactgccacttttcaccacgtgactggcagcgactcatcaacaacaattggggattccggcccaagagactcaacttcaaactcttcaacatccaagtcaaggaggtcacgacgaatgatggcgtcacaaccatcgctaataaccttaccagcacggttcaagtcttctcggactcggagtaccagcttccgtacgtcctcggctctgcgcaccagggctgcctccctccgttcccggcggacgtgttcatgattccgcaatacggctacctgacgctcaacaatggcagccaagccgtgggacgttcatccttttactgcctggaatatttcccttctcagatgctgagaacgggcaacaactctaccttcagctacacctttgaggaagtgcctttccacagcagctacgcgcacagccagagcctggaccggctgatgaatcctctcatcgaccaatacctgtattacctgaacagaactcaaaatcagtccggaagtgcccaaaacaaggacttgctgtttagccgtgggtctccagctggcatgtctgttcagcccaaaaactggctacctggaccctgttatcggcagcagcgcgtttctaaaacaaaaacagacaacaacaacagcaattttacctggactggtgcttcaaaatataacctcaatgggcgtgaatccatcatcaaccctggcactgctatggcctcacacaaagacgacgaagacaagttctttcccatgagcggtgtcatgatttttggaaaagagagcgccggagcttcaaacactgcattggacaatgtcatgattacagacgaagaggaaattaaagccactaaccctgtggccaccgaaagatttgggaccgtggcagtcaatttccagagcagcagcacagaccctgcgaccggagatgtgcatgctatgggaacattacctggcatggtgtggcaagatagagacgtgtacctgcagggtcccatttgggccaaaattcctcacacagatggacactttcacccgtctcctcttatgggcggctttggactcaagaacccgcctcctcagatcctcatcaaaaacacgcctgttcctgcgaatcctccggcggagttttcagctacaaagtttgcttcattcatcacccaatactccacaggacaagtgagtgtggaaattgaatgggagctgcagaaagaaaacagcaagcgctggaatcccgaagtgcagtacacatccaattatgcaaaatctgccaacgttgattttactgtggacaacaatggactttatactgagcctcgccccattggcacccgttaccttacccgtcccctg

SEQ ID NO: 674 - DNA, 2208 bp, Artificial Sequence
  source: /note="Description of Artificial Sequence: Synthetic polynucleotide"
atggctgccgatggttatctcccagattggctcgaggacaacctctctgagggcattcgcgagtggtgggacttgaaacctggagccccgaagcccaaagccaaccagcaaaagcaggacgacggccggggtctggtgcttcctggctacaagtacctcggacccttcaacggactcgacaagggggagcccgtcagcgcggcggacgcagcggccctcgagcacgacaaggcctacgaccagcagctcaaagcgggtgacaatccgtacctgcggtataaccacgccgacgccgagtttcaggagcgtctgcaagaagatacgtcttttgggggcaacctcgggcgagcagtcttccaggccaagaagcgggttctcgaacctctcggtctggttgaggaaggcgctaagacggctcctggaaagaaacgtccggtagagcagtcgccacaagagccagactcctcctcgggcatcggcaagacaggccagcagcccgctaaagagagactcaattttggtcagactggcgactcagagtcagtccccgatccacaacctctcggagaacctccagcaacccccgctgctgtgggacctactacaatggcttcaggcggtggcgcaccaatggcagacaataacgaaggcgccgacggagtgggtaatgcctcaggaaattggcattgcgattccacatggctgggcgacagagtcatcaccaccagcacccgcacctgggccttgcccacctacaataaccacctctacaagcaaatctccagtgcttcaacgggggccagcaacgacaaccactacttcggctacagcaccccctgggggtattttgatttcaacagattccactgccacttttcaccacgtgactggcagcgactcatcaacaacaattggggattccggcccaagagactcaacttcaaactcttcaacatccaagtcaaggaggtcacgacgaatgatggcgtcacaaccatcgccaataaccttaccagcacggttcaagtcttctcggactcggagtaccagcttccgtacgtcctcggctctgcgcaccagggctgcctccctccgttcccggcggacgtgttcatgattccgcaatacggctacctgacgctcaacaatggcagccaagccgtgggacgttcatccttttactgcctggaatatttcccttctcagatgctgagaacgggcaacaactttaccttcagctacacctttgaggaagtgcctttccacagcagctacgcgcacagccagagcctggaccggctgatgaatcctctcatcgaccaatacctgtattacctgaacagaactcaaaatcagtccggaagtgcccaaaacaaggacttgctgtttagccgtgggtctccagctggcatgtctgttcagcccaaaaactggctacctggaccctgttatcggcagcagcgcgtttctaaaacaaaaacagacaacaacaacagcaattttacctggactggtgcttcaaaatataacctcaatgggcgtgaatccatcatcaaccctggcactgctatggcctcacacaaagacgacgaagacaagttctttcccatgagcggtgtcatgatttttggaaaagagagcgccggagcttcaaacactgcattggacaatgtcatgattacagacgaagaggaaattaaagccactaaccctgtggccaccgaaagatttgggaccgtggcagtcaatttccagagcagcagcacagaccctgcgaccggagatgtgcatgctatgggagcattacctggcatggtgtggcaagatagagacgtgtacctgcagggtcccatttgggccaaaattcctcacacagatggacactttcacccgtctcctcttatgggcggctttggactcaagaacccgcctcctcagatcctcatcaaaaacacgcctgttcctgcgaatcctccggcggagttttcagctacaaagtttgcttcattcatcacccaatactccacaggacaagtgagtgtggaaattgaatgggagctgcagaaagaaaacagcaagcgctggaatcccgaagtgcagtacacatccaattatgcaaaatctgccaacgttgattttactgtggacaacaatggactttatactgagcctcgccccattggcacccgttaccttacccgtcccctg

SEQ ID NO: 675 - DNA, 2208 bp, Artificial Sequence
  source: /note="Description of Artificial Sequence: Synthetic polynucleotide"
atggctgccgatggttatcttccagattggctcgaggacaacctctctgagggcattcgcgagtggtgggacttgaaacctggagccccgaagcccaaagccaaccagcaaaagcaggacgacggccggggtctggtgcttcctggctacaagtacctcggacccttcaacggactcgacaagggggagcccgtcaacgcggcggacgcagcggccctcgagcacgacaaggcctacgaccagcagctcaaagcgggtgacaatccgtacctgcggtataaccacgccgacgccgagtttcaggagcgtctgcaagaagatacgtcttttgggggcaacctcgggcgagcagtcttccaggccaagaagcgggttctcgaacctctcggtctggttgaggaaggcgctaagacggctcctggaaagaaacgtccggtagagcagtcgccacaagagccagactcctcctcgggcatcggcaagacaggccagcagcccgctaaaaagagactcaattttggtcagactggcgactcagagtcagtccccgatccacaacctctcggagaacctccagcaacccccgctgctgtgggacctactacaatggcttcaggcggtggcgcaccaatggcagacaataacgaaggcgccgacggagtgggtaatgcctcaggaaattggcattgcgattccacatggctgggcgacagagtcatcaccaccagcacccgcacctgggccttgcccacctacaataaccacctctacaagcaaatctccagtgcttcaacgggggccagcaacgacaaccactacttcggctacagcaccccctgggggtattttgatttcaacagattccactgccacttttcaccacgtgactggcagcgactcatcaacaacaattggggattccggcccaagagactcaacttcaaactcttcaacatccaagtcaaggaggtcacgacgaatgatggcgtcacaaccatcgctaataaccttaccagcacggttcaagtcttctcggactcggagtaccagcttccgtacgtcctcggctctgcgcaccagggctgcctccctccgttcccggcggacgtgttcatgattccgcaatacggctacctgacgctcaacaatggcagccaagccgtgggacgttcatccttttactgcctggaatatttcccttctcagatgctgagaacgggcaacaactttaccttcagctacacctttgaggaagtgcctttccacagcagctacgcgcacagccagagcctggaccggctgatgaatcctctcatcgaccaatacctgtattacctgaacagaactcaaaatcagtccggaagtgcccaaaacaaggacttgctgtttagccgtgggtctccagctggcatgtctgttcagcccaaaaactggctacctggaccctgttatcggcagcagcgcgtttctaaaacaaaaacagacaacaacaacagcaattttacctggactggtgcttcaaaatataacctcaatgggcgtgaatccatcatcaaccctggcactgctatggcctcacacaaagacgacgaagacaagttctttcccatgagcggtgtcatgatttttggaaaagagagcgccggagcttcaaacactgcattggacaatgtcatgattacagacgaaggggaaattaaagccactaaccctgtggccaccgaaagatttgggaccgtggcagtcaatttccagagcagcagcacagaccctgcgaccggagatgtgcatgctatgggagcattacctggcatggtgtggcaagatagagacgtgtacctgcagggtcccatttgggccaaaattcctcacacagatggacactttcacccgtctcctcttatgggcggctttggactcaagaacccgcctcctcagatcctcatcaaaaacacgcctgttcctgcgaatcctccggcggagttttcagctacaaagtttgcttcattcatcacccaatactccacaggacaagtgagtgtggaaattgaatgggagctgcagaaagaaaacagcaagcgctggaatcccgaagtgcagtacacatccaattatgcaaaatctgccaacgttgattttactgtggacaacaatggactttatactgagcctcgccccattggcacccgttaccttacccgtcccctg

SEQ ID NO: 676 - DNA, 2208 bp, Artificial Sequence
  source: /note="Description of Artificial Sequence: Synthetic polynucleotide"
atggctgccgatggttatcttccagattggctcgaggacaacctctctgagggcattcgcgagtggtgggacttgaaacctggagccccgaaacctaaagccaaccagcaaaagcaggacgacggccggggtctggtgcttcctggctacaagtacctcggacccttcaacggactcgacaagggggagcccgtcaacgcggcggacgcagcggccctcgagcacgacaaggcctacgaccagcagctcaaagcgggtgacaatccgtacctgcggtataaccacgccgacgccgagtttcaggagcgtctgcaagaagatacgtcttttgggggcaacctcgggcgagcagtcttccaggccaagaagcgggttctcgaaccttttggtctggttgaggaaggcgctaagacggctcctggaaagaaacgtccggtagagcagtcgccacaagagccagactcctcctcgggcatcggcaagacaggccagcagcccgctaaaaagagactcaattttggtcagactggcgactcagagtcagtccccgacccacaacctctcggagaacctccagcaacccccgctgctgtgggacctactacaatggcttcaggcggtggcgcaccaatggcagacaataacgaaggcgccgacggagtgggtaatgcctcaggaaattggcattgcgattccacatggctgggcgacagagtcatcaccaccagcacccgcacctgggccttgcccacctacaataaccacctctacaagcaaatctccagtgcttcaacgggggccagcaacgacaaccactacttcggctacagcaccccctgggggtattttgatttcaacagattccactgccacttttcaccacgtgactggcagcgactcatcaacaacaattggggattccggcccaagagactcaacttcaagctcttcaacatccaagtcaaggaggtcacgacgaacgatggcgtcacgaccatcgctaataaccttaccagcacggttcaagtcttctcggattcagagtaccaactgccgtacgtcctcggctctgcgcaccagggctgcctccctccgttcccggcggacgtgtttatgattccgcagtacggctacctaacgctcaacaatggcagccaggccgtgggacgttcatccttttactgcccggaatatttcccttctcagatgctgagaacgggcaacaactttaccttcagctacacctttgaggaagtgcctttccacagcagctacgcgcacagccagagcctggaccggctgatgaatcctctcatcgaccaatacctgtattacctgaacagaactcaaaatcagtccggaagtgcccaaaacaaggacttgctgtttagccgtgggtctccagctggcatgtctgttcagcccaaaaactggctacctggaccctgttatcggcagcagcgcgtttctaaaacaaaaacagacaacaacaacagcaattttacctggactggtgcttcaaaatataacctcaatgggcgtgaatccatcatcaaccctggcactgctatggcctcacacaaagacgacaaagacaagttctttcccatgagcggtgtcatgatttttggaaaagagagcgccggagcttcaaatactgcattggacaatgtcatgatcacagatgaagaggaaattaaagccactaaccctgtggccaccgaaagatttgggaccgtggcagtcaatttccagagcagcaacacagaccccgcgaccggagatgtgcatgttatgggagccttacctggcatggtgtggcaagacagagacgtatacctgcagggtcccatttgggccaaaattcctcacacggatggacactttcacccgtctcctctcatgggcggctttggacttaagcacccgcctcctcaaatcctcatcaaaaacacgcctgttcctgcgaatcctccggcagagttttcggctacaaagtttgcttcattcatcacccagtactccacaggacaagtgagtgtggaaattgaatgggagctgcagaaagaaaacagcaagcgctggaatcccgaagtgcagtacacatccaattatgcaaaatctgccaacgttgatttcactgtggacaacaatggactttatactgagcctcgccccattggcacccgttaccttacccgtcccttg

SEQ ID NO: 677 - DNA, 2208 bp, Artificial Sequence
  source: /note="Description of Artificial Sequence: Synthetic polynucleotide"
atggctgccgatggttatcttccagattggctcgaggacaacctctctgagggcattcgcgagtggtgggacttgaaacctggagccccgaaacctaaagccaaccagcaaaagcaggacgacggccggggtctggtgcttcctggctacaagtacctcggacccttcaacggactcgacaagggggagcccgtcaacgcggcggacgcagcggccctcgagcacgacaaggcctacgaccagcagctcaaagcgggtgacaatccgtacctgcggtataaccacgccgacgccgagtttcaggagcgtctacaagaagatacgtcttttgggggcaacctcgggcgagcagtcttccaggccaagaagcgggttctcgaaccttttggtctggttgaggaaggcgctaagacggctcctggaaagaaacgtccggtagagcagtcgccacaagagccagactcctcctcgggcatcggcaagacaggccagcagcccgctaaaaagagactcaattttggtcagactggcgactcagagtcagtccccgacccacaacctctcggagaacctccagcaacccccgctgctgtgggacctactacaatggcttcaggcggtggcgcaccaatggcagacaataacgaaggcgccgacggagtgggtaatgcctcaggaaattggcattgcgattccacatggctgggcgacagagtcatcaccaccagcacccgcacctgggccttgcccacctacaataaccacctctacaagcaaatctccagtgcttcaacgggggccagcaacgacaaccactacttcggctacagcaccccctgggggtattttgatttcaacagattccactgccacttttcaccacgtgactggcagcgactcatcaacaacaattggggattccggcccaagagactcaacttcaagctcttcaacatccaagtcaaggaggtcacgacgaacgatggcgtcacgaccatcgctaataaccttaccagcacggttcaagtcttctcggattcagagtaccaactgccgtacgtcctcggctctgcgcaccagggctgcctccctccgttcccggcggacgtgttcatgattccgcagtacggctacctaacgctcaacaatggcagccaggccgtgggacgttcatccttttactgcctggaatatttcccttctcagatgctgagaacgggcaacaactttaccttcagctacacctttgaggaagtgcctttccacagcagctacgcgcacagccagagcctggaccggctgatgaatcctctcatcgaccaatacctgtattacctgaacagaactcaaaatcagtccggaagtgcccaaaacaaggacttgctgtttagccgtgggtctccagctggcatgtctgttcagcccaaaaactggctacctggaccctgttatcggcagcagcgcgtttctaaaacaaaaacagacaacaacaacagcaattttacctggactggtgcttcaaaatataacctcaatgggcgtgaatccatcatcaaccctggcactgctatggcctcacacaaagacgacaaagacaagttctttcccatgagcggtgtcatgatttttggaaaagagagcgccggagcttcaaatactgcattggacaatgtcatgatcacagatgaagaggaaattaaagccactaaccctgtggccaccgaaagatttgggaccgtggcagtcaatttccagagcagcgacacagaccccgcgaccggagatgtgcatgttatgggagccttacctggcatggtgtggcaagacagagacgtatacctgcagggtcccatttgggccaaaattcctcacacggatggacactttcacccgtctcctctcatgggcggctttggacttaagcacccgcctcctcaaatcctcatcaaaaacacgcctgttcctgcgaatcctccggcagagttttcggctacaaagtttgcttcattcatcacccagtactccacaggacaagtgagtgtggaaattgaatgggagctgcagaaagaaaacagcaagcgctggaatcccgaagtgcagtacacatccaattatgcaaaatctgccaacgttgatttcactgtggacaacaatggactttatactgagcctcgccccattggcacccgttaccttacccgtcccttg

SEQ ID NO: 678 - DNA, 2208 bp, Artificial Sequence
  source: /note="Description of Artificial Sequence: Synthetic polynucleotide"
atggctgccgatggttatcttccagattggctcgaggacaacctctctgagggcattcgcgagtggtgggacttgaaacctggagccccgaaacctaaagccaaccagcaaaagcagggcgacggccggggtctggtgcttcctggctacaagtacctcggacccttcaacggactcgacaagggggagcccgtcaacgcggcggacgcagcggccctcgagcacgacaaggcctacgaccagcagctcaaagcgggtgacaatccgtacctgcggtataaccacgccgacgccgagtttcaggagcgtctgcaagaagatacgtcttttgggggcaacctcgggcgagcagtcttccaggccaagaagcgggttctcgaaccttttggtctggttgaggaaggcgctaagacggctcctggaaagaaacgtccggtagagcagtcgccacaagagccagactcctcctcgggcatcggcaagacaggccagcagcccgctaaaaagagactcaattttggtcagactggcgactcagagtcagtccccgacccacaacctctcggagaacctccagcaacccccgctgctgtgggacctactacaatggcttcaggcggtggcgcaccaatggcagacaataacgaaggcgccgacggagtgggtaatgcctcaggaaattggcattgcgattccacatggctgggcgacagagtcatcaccaccaacactcgcacctgggccttgcccacctacaataaccacctctacaagcaaatctccagtgcttcaacgggggccagcaacgacaaccactacttcggctacagcaccccctgggggtattttgatttcaacagattccactgccacttttcaccacgtgactggcagcgactcatcaacaacaattggggattccggcccaagagactcaacttcaagctcttcaacatccaagtcaaggaggtcacgacgaacgatggcgtcacgaccatcgctaataaccttaccagcacggttcaagtcttctcggattcagagtaccaactgccgtacgtcctcggctctgcgcaccagggctgcctccctccgttcccggcggacgtgttcatgattccgcagtacggctacctaacgctcaacaatggcagccaggccgtgggacgttcatccttttactgcctggaatatttcccttctcagatgctgagaacgggcaacaactttaccttcagctacacctttgaggaagtgcctttccacagcagttacgggcacagccagagcctggaccggctgatgaatcttctcatcgaccaatacctgtattacctgaacagaactcaaaatcagtccggaagtgcccaaaacaaggacttgctgtttagccgtgggtctccagctggcatgtttgttcagcccaaaaactggctacctggaccctgttatcggcagcagcgcgtttctaaaacaaaaacagacaacaacaacagcaattttacctggactggtgcttcaaaatataacctcaatgggcgtgaatccatcatcaaccctggcactgctatggcctcacacaaagacgacgaagacaagttctttcccatgagcggtgtcatgatttttggaaaagagagcgccggagcttcaaatactgcattggacaatgtcatgatcacagatgaagaggaaattaaagccactaaccctgtggccaccgaaagatttgggaccgtggcagtcaatttccagagcagcagcacagaccccgcgaccggagatgtgcatgttatgggagccttacctggcatggtgtggcaagacagagacgtatacctgcagggtcccatttgggccaaaattcctcacacggatggacactttcacccgtctcctctcatgggcggctttggacttaagcacccgcctcctcaaatcctcatcaaaaacacgcctgttcctgcgaatcctccggcagagttttcggctacaaagtttgcttcattcatcacccagtactccacaggacaagtgagtgtggaaattgaatgggagctgcagaaagaaaacagcaagcgctggaatcccgaagtgcagtacacatccaattatgcaaaatctgccaacgttgatttcactgtggacaacaatggactttatactgagcctcgccccattggcacccgttaccttacccgtcccttg

SEQ ID NO: 679 - DNA, 2208 bp, Artificial Sequence
  source: /note="Description of Artificial Sequence: Synthetic polynucleotide"
atggctgccgatggttatcttccagattggctcgaggacaacctctctgagggcattcgcgagtggtgggacttgaaacctggagccccgaaacctaaagccaaccagcaaaagcaggacgacggccggggtctggtgcttcctggctacaagtacctcggacccttcaacggactcgacaagggggagcccgtcaacgcggcggacgcagcggccctcgagcacgacaaggcctacgaccagcagctcaaagcgggtgacaatccgtacctgcggtataaccacgccgacgccgagtttcaggagcgtctgcaagaagatacgtcttttgggggcaacctcgggcgagcagtcttccaggccaagaagcgggttctcgaaccttttggtctggttgaggaaggcgctaagacggctcctggaaagaaacgtccggtagagcagtcgccacaagagccagactcctcctcgggcatcggcaagacaggccagcagcccgctaaaaagagactcaattttggtcagactggcgactcagagtcagtccccgacccacaacctctcggagaacctccagcaacccccgctgctgtgggacctactacaatggcttcaggcggtggcgcaccaatggcagacaataacgaaggcgccgacggagtgggtaatgcctcaggaaattggcattgcgattccacatggctgggcgacagagtcatcaccaccaacacccgcacctgggccttgcccacctacaataaccacctctacaagcaaatctccagtgcttcaacgggggccagcaacgacaaccactacttcggctacagcaccccctgggggtattttgatttcaacagattccactgccacttttcaccacgtgactggcagcgactcatcaacaacaattggggattccggcccaagagactcaacttcaagctcttcaacatccaagtcaaggaggtcacgacgaacgatggcgtcacgaccatcgctaataaccttaccagcacggttcaagtcttctcggattcagagtaccaactgccgtacgtcctcggctctgcgcaccagggctgcctccctccgttcccggcggacgtgttcatgattccgcagtacggctacctaatgctcaacaatggcagccaggccgtgggacgttcatccttttactgcctggaatatttcccttctcagatgctgagaacgggcaacaactttaccttcagctacacctttgaggaagtgcctttccacagcagctacgcgcacagccagagcctggaccggctgatgaatcctctcatcgaccaatacctgtattacctgaacagaactcaaaatcagtccggaagtgcccaaaacaaggacttgctgtttagccgtgggtctccagctggcatgtctgttcagcccaaaaactggctacctggaccctgttatcggcagcagcgcgtttctaaaacaaaaacagacaacaacaacagcaattttacctggactggtgcttcaaaatataacctcaatgggcgtgaatccatcatcaaccctggcactgctatggcctcacacaaagacgacgaagacaagttctttcccatgagcggtgtcatgatttttggaaaagagagcgccggagcttcaaatactgcattggacaatgtcatgatcacagatgaagaggaaattaaagccactaaccctgcggccaccgaaagatttgggaccgtggcagtcaatttccagagcagcagcacagaccccgcgaccggagatgtgcatgttatgggagccttacctggcatggtgtggcaagacagagacgtatacctgcagggtcccatttgggccaaaattcctcacacggatggacactttcacccgtctcctctcatgggcggctttggacttaagcacccgcctcctcaaatcctcatcaaaaacacgcctgttcctgcgaatcctccggcagagttttcggctacaaagtttgcttcattcatcacccagtactccacaggacaagtgagtgtggaaattgaatgggagctgcagaaagaaaacagcaagcgctggaatcccgaagtgcagtacacatccaattatgcaaaatctgccaacgttgatttcactgtggacaacaatggactttatactgagcctcgccccattggcacccgttaccttacccgtcccttg

SEQ ID NO: 680 - DNA, 2208 bp, Artificial Sequence
  source: /note="Description of Artificial Sequence: Synthetic polynucleotide"
atggctgccgatggttatcttccagattggctcgaggacaacctctctgagggcattcgcgagtggtgggacttgaaacctggagccccgaaacctaaagccaaccagcaaaagcaggacgacggccggggtctggtgcttcctggctacaagtacctcggacccttcaacggactcgacaagggggagcccgtcaacgcggcggacgcagcggccctcgagcacgacaaggcctacgaccagcagctcaaagcgggtgacaatccgtacctgcggtataaccacgccgacgccgagtttcaggagcgtctgcaagaagatacgtcttttgggggcaacctcgggcgagcagtcttccaggccaagaagcgggttctcgaaccttttggtctggttgaggaaggcgctaagacggctcctggaaagaaacgtccggtagagcagtcgccacaagagccagactcctcctcgggcatcggcaagacgggccagcagcccgctaaaaagagactcaattttggtcagactggcgactcagagtcagtccccgacccacaacctctcggagaacctccagcaacccccgctgctgtgggacctactacaatggcttcaggcggtggcgcaccaatggcagacaataacgaaggcgccgacggagtgggtaatgcctcaggaaattggcattgcgattccacatggctgggcgacagagtcatcaccaccagcacccgcacctgggccttgcccacctacaataaccacctctacaagcaaatctccagtgcttcaacgggggccagcaacgacaaccactacttcggctacagcaccccctgggggtattttgatttcaacagattccactgccacttttcaccacgtgactggcagcgactcatcaacaacaattggggattccggcccaagagactcaacttcaagctcttcaacatccaagtcaaggaggtcacgacgaacgatggcgtcacgaccatcgctaataaccttaccagcacggttcaagtcttctcggattcagagtaccaactgccgtacgtcctcggctctgcgcaccagggctgcctccctccgttcccggcggacgtgttcatgattccgcagtacggctacctaacgctcaacaatggcagccaggccgtgggacgttcatccttttactgcctggaatatttcccttctcagatgctgagaacgggcaacaactttaccttcagctacacctttgaggaagtgcctttccacagcagctacgcgcacagccagagcctggaccggctgatgaatcctctcatcgaccaatacctgtattacctgaacagaactcaaaatcagtccggaagtgcccaaaacaaggacttgctgtttagccgtgggtctccagctggcatgtccgttcagcccaaaaactggctacctggaccctgttatcggcagcagcgcgtttctaaaacaaaaacagacaacaacaacagcaattttacctggactggtgcttcaaaatataacctcaatgggcgtgaatccatcatcaaccctggcactgctatggcctcacacaaagacgacgaagacaagttctttcccatgagcggtgtcatgatttttggaaaagagagcgccggagcttcaaatactgcattggacaatgtcatgatcacagatgaagaggaaattaaagccactaaccctgtggccaccgaaagatttgggaccgtggcagtcaatttccagagcagcagcacagaccccgcgaccggagatgtgcatgttatgggagccttacctggcatggtgtggcaagacagagacgtatacctgcagggtcccatttgggccaaaattcctcacacggatggacactttcacccgtctcctctcatgggcggctttggacttaagcacccgcctcctcaaatcctcatcaaaaacacgcctgttcctgcgaatcctccggcagagttttcggctacaaagtttgcttcattcatcacccagtactccacaggacaagtgagtgtggaaattgaatgggagctgcagaaagaaaacagcaagcgctggaatcccgaagtgcagtacacatccaattatgcaaaatctgccaacgttgatttcactgtggacaacaatggactttatactgagcctcgccccattggcacccgttaccttacccgtcccttg

SEQ ID NO: 681 - DNA, 2208 bp, Artificial Sequence
  source: /note="Description of Artificial Sequence: Synthetic polynucleotide"
  modified_base (305)..(305): a, c, t, or g
atggctgccgatggttatcttccagattggctcgaggacaacctctctgagggcattcgcgagtggtgggacttgaaacctggagccccgaaacctaaagccaaccagcaaaagcaggacgacggccggggtctggtgcttcctggctacaagtacctcggacccttcaacggactcgacaagggggagcccgtcaacgcggcggacgcagcggccctcgagcacgacaaggcctacgaccagcagctcaaagcgggtgacaatccgtacctgcggtataaccacgccgacgccgagtttcaggngcgtctgcaagaagatacgtcttttgggggcaacctcgggcgagcagtcttccaggccaagaagcgggttctcgaaccttttggtctggttgaggaaggcgctaagacggctcctggaaagaaacgtccggtagagcagtcgccacaagagccagactcctcctcgggcatcggcaagacaggccagcagcccgctaaaaagagactcaattttggtcagactggcgactcagagtcagtccccgacccacaacctctcggagaacctccagcaacccccgctgctgtgggacctactacaatggcttcaggcggtggcgcaccaatggcagacaataacgaaggcgccgacggagtgggtaatgcctcaggaaattggcattgcgattccacatggctgggcggcagagtcatcaccaccagcacccgcacctgggccttgcccacctacaataaccacctctacaagcaaatctccagtgcttcaacgggggccagcaacgacaaccactacttcggccacagcaccccctgggggtattttgatttcaacagattccactgccacttttcaccacgtgactggcagcgactcatcaacaacaattggggattccggcccaagagactcaacttcaagctcttcaacatccaagtcaaggaggtcacgacgaacgatggcgtcacgaccatcgctaataaccttaccagcacggttcaagtcttctcggattcagagtaccaactgccgtacgtcctcggctctgcgcaccagggctgcctccctccgtccccggcggacgtgttcatgattccgcagtacggctacctaacactcaacaatggcagccaggccgtgggacgttcatccttttactgcctggaatatttcccttctcagatgctgagaacgggcaacaactttaccttcagctacacctttgaggaagtgcctttccacagcagctacgcgcacagccagagcctggaccggctgatgaatcctctcatcgaccaatacctgtattacctgaacagaactcaaaatcagtccggaagtgcccaaaacaaggacttgctgtttagccgtgggtctccagctggcatgtctgttcagcccaaaaactggctacctggaccctgttatcggcagcagcgcgtttctaaaacaaaaacagacaacaacaacagcaattttacctggactggtgcttcaaaatataacctcaatgggcgtgaatccatcatcaaccctggcactgctatggcctcacacaaagacgacaaagacaagttctttcccatgagcggtgtcatgatttttggaaaagagagcgccggagcttcaaatactgcattggacaatgtcatgatcacagatgaagaggaaattaaagccactaaccctgtggccaccgaaagatttgggaccgtggcagtcaatttccagagcagcaacacagaccccgcgaccggagatgtgcatgttatgggagccttacctggcatggtgtggcaagacagagacgtatacctgcagggtcccatttgggccaaaattcctcacacggatggacactttcacccgtctcctctcatgggcggctttggacttaagcacccgcctcctcaaatcctcatcaaaaacacgcctgttcctgcgaatcctccggcagagttttcggctacaaagtttgcttcattcatcacccagtactccacaggacaagtgagtgtggaaattgaatgggagctgcagaaagaaaacagcaagcgctggaatcccgaagtgcagtacacatccaattatgcaaaatctgccaacgttgatttcactgtggacaacaatggactttatactgagcctcgccccattggcacccgttaccttacccgtcccttg

SEQ ID NO: 682 - DNA, 2208 bp, Artificial Sequence
  source: /note="Description of Artificial Sequence: Synthetic polynucleotide"
atggctgccgatggttattttccagattggctcgaggacaacctttctgagggcattcgcgagtggtgggacttgaaacctggagccccgaaacctaaagccaaccagcaaaagcaggacgacggccggggtctggtgcttcctggctacaagtacctcggacccttcaacggactcgacaagggggagcccgtcaacgcggcggacgcagcggccctcgagcacgacaaggcctacgaccagcagctcaaagcgggtgacaatccgtacctgcggtataaccacgccgacgccgagtttcaggagcgtctgcaagaagatacgtcttttgggggcaacctcgggcgagcagtcttccaggccaagaagcgggttctcgaaccttttggtctggttgaggaaggcgctaagacggctcctggaaagaaacgtccggtagagcagtcgccacaagagccagactcctcctcgggcatcggcaggacaggccagcagcccgctaaaaagagactcaattttggtcagactggcgactcagagtcagtccccgacccacaacctctcggagaacctccagcgacccccgctgctgtgggacctactacaatggcttcaggcggtggcgcaccaatggcagacaataacgaaggtgccgacggagtgggtaatgcctcaggaaattggcattgcgattccacatggctgggcgacagagtcatcaccaccagcacccgcacctgggccttgcccacctacaataaccacctctacaagcaaatctccagtgcttcaacgggggccagcaacgacaaccactacttcggctacagcaccccctgggggtattttgatttcaacagattccactgccacttttcaccacgtgactggcagcgactcatcaacaacaattggggattccggcccaagagactcaacttcaagctcttcaacatccaagtcaaggaggtcacgacgaacgatggcgtcacgaccatcgctaataaccttaccagcacggttcaagtcttctcggattcagagtaccaactgccgtacgtcctcggctctgcgcaccagggctgcctccctccgttcccggcggacgtgttcatgattccgcagtacggctacctaacgctcaacaatggcagccaggccgtgggacgttcatccttttactgcctggaatatttcccttctcagatgctgagaacgggcaacaactttaccttcagctacacctttgaggaagtgcctttccacagcagctacgcgcacagccagagcctggaccggctgatgaatcctctcatcgaccaatacctgtattacctgaacagaactcaaaatcagtccggaagtgcccaaaacaaggacttgctgtttagccgtgggtctccagctggcatgtctgttcagcccaaaaactggctacctggaccctgttatcggcagcagcgcgtttctaaaacaaaaacagacaacaacaacagcaattttacctggactggtgcttcaaaatataacctcaatgggcgtgaatccatcatcaaccctggcactgctatggcctcacacaaagacgacgaagacaagttctttcccatgagcggtgtcatgatttttggaaaagagagcgccggagcttcaaatactgcattggacaatgtcatgatcacagatgaagaggaaattaaagccactaaccctgtggccaccgaaagatttgggaccgtggcagtcaatttccagagcagcagcccagaccccgcgaccggagatgtgcatgttatgggagccttacctggcatggtgtggcaagacagagacgtatacctgcagggtcccatttgggccaaaattcctcacacggatggacactttcacccgtctcctctcatgggcggctttggacttaagcacccgcctcctcaaatcctcatcaaaaacacgcctgttcctgcgaatcctccggcagagttttcggctacaaagtttgcttcattcatcacccagtactccacaggacaagtgagtgtggaaattgaatgggagctgcagaaagaaaacagcaagcgctggaatcccgaagtgcagtacacatccaattatgcaaaatctgccaacgttgatttcactgtggacaacaatggactttatagtgagcctcgccccattggcacccgttaccttacccgtcccttg

SEQ ID NO: 683 - DNA, 2208 bp, Artificial Sequence
  source: /note="Description of Artificial Sequence: Synthetic polynucleotide"
atggctgccgatggttatcttccagattggctcgaggacaacctctctgagggcattcgcgagtggtgggacttgaaacctggagccccgaaacctaaagccaaccagcaaaagcaggacgacggccggggtctggtgcttcctggctacaagtacctcggacccttcaacggactcgacaagggggagcccgtcaacgcggcggacgcagcggccctcgagcacgacaaggcctacgaccagcagctcaaagcgggtgacaatccgtacctgcggtataaccacgccgacgccgagtttcaggagcgtctgcaagaagatacgtcttttgggggcaacctcgggcgagcagtcttccaggccaagaagcgggttctcgaaccttttggtctggttgaggaaggcgctaagacggctcctggaaagaaacgtccggtagagcagtcgccacaagagccagactcctcctcgggcatcggcaagacaggccagcagcccgctaaaaagagactcaattttggtcagactggcgactcagagtcagtccccgacccacaacctctcggagaacctccagcaacccccgctgctgtgggacctactacaatggcttcaggcggtggcgcaccaatggcagacaataacgaaggcgccgacggagtgggtaatgcctcaggaaattggcattgcgattccacatggctgggcgacagagtcatcaccaccagcacccgcacctgggccttgcccacctacaataaccacctctacaagcaaacctccagtgcttcaacgggggccagcaacgacaaccactacttcggctacagcaccccctgggggtattttgatttcaacagattccactgccacttttcaccacgtgactggcagcgactcatcaacaacaattggggattccggcccaagagactcaacttcaagctcttcaacatccaagtcaaggaggtcacgacgaacgatggcgtcacgaccatcgctaataaccttaccagcacggttcaagtcttctcggattcagagtaccaactgccgtacgtcctcggctctgcgcaccagggctgcctccctccgttcccggcggacgtgttcatgattccgcagtacggctacctaacgctcaacaatggcagccaggccgtgggacgttcatccttttactgcctggaatatttcccttctcagatgctgagaacgggcaacaactttaccttcagctacacctttgaggaagtgcctttccacagcagctacgcgcacagccagagcctggaccggctgatgaatcctctcatcgaccaatacctgtattacctgaacagaactcaaaatcagtccggaagtgcccaaaacaaggacttgctgtttagccgtgggtctccagctggcatgtctgttcagcccaaaaactggctacctggaccctgttatcggcagcagcgcgtttctaaaacaaaaacagactacaacaacagcaattttacctggactggtgcttcaaaatataacctcaatgggcgtgaatccatcatcaaccctggcactgctatggcctcacacaaagacgacgaagacaagttctttcccatgagcggtgtcatgatttttggaaaagagagcgccggagcttcaaatactgcattggacaatgtcatgatcacagatgaagaggaaattaaagccactaaccctgtggccaccgaaagatttgggaccgtggcagtcaatttccagagcagcagcacagaccccgcgaccggagatgtgcatgttatgggagccttacctggcatggtgtggcaagacagagacgtatacctgcagggtcccatttgggccaaaattcctcacacggatggacactttcacccgtctcctctcatgggcggctttggacttaagcacccgcctcctcaaatcctcatcaaaaacacgcctgttcctgcgaatcctccggcagagttttcggctacaaagtttgcttcattcatcacccagtactccacaggacaagtgagtgtggaaattgaatgggagctgcagaaagaaaacagcaagcgctggaatcccgaagtgcagtacacatccaattatgcaaaatctgccaacgttgatttcactgtggacaacaatggactttatactgagcctcgccccattggcacccgttaccttacccgtcccttg

SEQ ID NO: 684 - DNA, 2208 bp, Artificial Sequence
  source: /note="Description of Artificial Sequence: Synthetic polynucleotide"
atggctgccgatggttatcctccagattggctcgaggacaacctctctgagggcattcgcgagtggtgggacttgaaacctggagtcccgaaacctaaagccaaccagcaaaagcaggacgacggccggggtctggtgcttcctggctacaagtacctcggacccttcaacggactcgacaagggggagcccgtcaacgcggcggacgcagcggccctcgagcacgacaaggcctacgaccagcagctcaaagcgggtgacaatccgtacctgcggtataaccacgccgacgccgagtttcaggagcgtctgcaagaagatacgtcttttgggggcaacctcgggcgagcagtcttccaggccaagaagcgggttctcgaaccttttggtctggttgaggaaggcgctaagacggctcctggaaagaaacgtccggtagagcagtcgccacaagagccagactcctcctcgggcatcggcaagacaggccagcagcccgctaaaaagagactcaattttggtcagactggcgactcagagtcagtccccgacccacaacctctcggagaacctccagcaacccccgctgctgtgggacctactacaatggcttcaggcggtggcgcaccaatggcagacaataacgaaggcgccgacggagtgggtaatgcctcaggaaattggcattgcgattccacatggctgggcgacagagtcatcaccaccagcacccgcacctgggccttgcccacctacaataaccacctctacaagcaaatctccagtgcttcaacgggggccagcaacgacaaccactacttcggctacagcaccccctgggggtattttgatttcaacagattccactgccacttttcaccacgtgactggcagcgactcatcaacaacaattggggattccggcccaagagactcaacttcaagctcttcaacatccaagtcaaggaggtcacgacgaacgatggcgtcacgaccatcgctaataaccttaccagcacggttcaagtcttctcggattcagagtaccaactgccgtacgtcctcggctctgcgcaccagggctgcctccctccgttcccggcggacgtgttcatgattccgcagtacggctacctaacgctcaacaatggcagccaggccgtgggacgttcatccttttactgcctggaatatttcccttctcagatgctgagaacgggcaacaactttaccttcagctacacctttgaggaagtgcctttccacagcagctacgcgcacagccagagcctggaccggctgatgaatcctctcatcgaccaatacctgtattacctgaacagaactcaaaatcagtccggaagtgcccaaaacaaggacttgctgtttagccgtgggtctccagctggcatgtctgttcagcccaaaaactggctacctggaccctgttatcggcagcagcgcgtttctaaaacaaaaacagacaacaacaacagcaattttacctggactggtgcttcaaaatataacctcaatgggcgtgaatccatcatcaaccctggcactgctatggcctcacacaaagacgacgaagacaagttctttcccatgagcggtgtcatgatttttggaaaagagagcgccggagcttcaaatactgcattggacaatgtcatgatcacagatgaagaggaaattaaagccactaaccctgtggccaccgaaagatttgggaccgtggcagtcaatttccagagcagcagcacagaccccgcgaccggagatgtgcatgttatgggagccttacctggcatggtgtggcaagacagagacgtatacctgcagggtcccatttgggccaaaattcctcacacggatggacactttcacccgtctcctctcatgggcggctttggacttaagcacccgcctcctcaaatcctcatcaaaaacacgcctgttcctgcgaatcctccggcagagttttcggctacaaagtttgcttcattcatcacccagtactccacaggacaagtgagtgtggaaattgaatgggagctgcagaaagaaaacagcaagcgctggaatcccgaagtgcagtacacatccaattatgcaaaatctgccaacgttgatttcactgtggacaacaatggactttatactgagcctcgccccattggcacccgttaccttacccgtcccttg

SEQ ID NO: 685 - DNA, 2196 bp, Artificial Sequence
  source: /note="Description of Artificial Sequence: Synthetic polynucleotide"
atggctgccgatggttatcttccagattggctcgaggacaacctctctgagggcattcgcgagtggtgggacttgaaacctggagccccgaaacctaaagccaaccagcaaaagcaggacgacggccggggtctggtgcttcctggctacaagtacctcggacccttcaacggactcgacaagggggagcccgtcaacgcggcggacgcagcggccctcgagcacgacaaggcctacgaccagcagctcaaagcgggtgacaatccgtacctgcggtataaccacgccgacgccgagtttcaggagcgtctgcaagaagatacgtcttttgggggcaacctcgggcgagcagtcttccaggccaagaagcgggttctcgaaccttttggtctggttgaggaaggcgctaagacggctcctggaaagaaacgtccggtagagcagtcgccacaagagccagactcctcctcgggcatcggcaagacaggccagcagcccgctaaaaagagactcaattttggtcagactggcgactcagagtcagtccccgacccacaacctctcggagaacctccagcaacccccgctgctgtgggacctactacaatggcttcaggcggtggcgcaccaatggcagacaataacgaaggcgccgacggagtgggtaatgcctcaggaaattggcattgcgattccacatggctgggcgacagagtcatcaccaccagcacccgcacctgggccttgcccacctacaataaccacctctacaagcaaatctccagtgcttcaacgggggccagcaacgacaaccactacttcggctacagcaccccctgggggtattttgatttcaacagattccactgccacttttcaccacgtgactggcagcgactcatcaacaacaattggggattccggcccaagagactcaacttcaagctcttcaacatccaagtcaaggaggtcacgacgaacgatggcgtcacgaccatcgctaataaccttaccagcacggttcaagccttctcggattcagagtaccaactgccgtacgtcctcggctctgcgcaccagggctgcctccctccgttcccggcggacgtgttcatgattccgcagtacggctacctaacgctcaacaatggcagccaggccgtgggacgttcatccttttactgcctggaatatttcccttctcagatgctgagaacgggcaacaactttaccttcagctacacctttgaggaagtgcctttccacagcagctacgcgcacagccagagcctggaccggctgatgaatcctctcatcgacccatacctgtattacctgaacagaactcaaaatcagtccggaagtgcccaaaacaaggacttgctgtttagccgtgggtctccagctggcatgtctgttcagcccaaaaactggctacctggaccctgttatcggcagcagcgcgtttctaaaacaaaaacagacaacaacaacagcaattttacctggactggtgcttcaaaatataacctcaatgggcgtgaatccatcatcaaccctggcactgctatggcctcacacaaagacgacgaagacaagttctttcccatgagcggtgtcatgatttttggaaaagagagcgccggagcttcaaatactgcattggacaatgtcatgatcacagatgaagaggaaattaaagccactaaccctgtggccaccgaaagatttgggaccgtggcagtcaatttccagagcagcagcacagaccccgcgaccggagatgtgcatgttatgggagccttacctggcatggtgtggcaagacagagacgtatacctgcagggtcccatttgggccaaaattcctcacacggatggacactttcacccgtctcctctcatgggcggctttggacttaagcacccgcctcctcaaatcctcatcaaaaacacgcctgttcctgcgaatcctccggcagagttttcggctacaaagtttgcttcattcatcacccagtactccacaggacaagtgagtgtggaaattgaatgggagctgcagaaagaaaacagcaagcgctggaatcccgaagtgcagtacacatccaattatgcaaaatctgccaacgttgatttcactgtggacaacaatggactttatactgagcctcgccccattggcacccgttacctt

SEQ ID NO: 686 - DNA, 2208 bp, Artificial Sequence
  source: /note="Description of Artificial Sequence: Synthetic polynucleotide"
atggctgccgatggttatcttccagattggctcgaggacaacctctctgagggcattcgcgagtggtgggacttgaaacctggagccccgaaacctaaagccaaccagcaaaagcaggacgacggccggggtctggtgcttcctggctacaagtacctcggacccttcaacggactcgacaagggggagcccgtcaacgcggcggacgcagcggccctcgagcacgacaaggcctacgaccagcagctcaaagcgggtgacaatccgtacctgcggtataaccacgccgacgccgagtttcaggagcgtctgcaagaagatacgtcttttgggggcaacctcgggcgagcagtcttccaggccaagaagcgggttctcgaaccttttggtctggttgaggaaggcgctaagacggctcctggaaagaaacgtccggtagagcagtcgccacaagagccagactcctcctcgggcatcggcaagacaggccagcagcccgctaaaaagagactcaattttggtcagactggcgactcagagtcagtccccgacccacaacctctcggagaacctccagcaacccccgctgctgtgggacctactacaatggcttcaggcggtggcgcaccaatggcagacaataacgaaggcgccgacggagtgggtaatgcctcaggaaattggcattgcgattccacatggctgggcgacagagtcatcaccaccagcacccgcacctgggccttgcccacctacaataaccacctctacaagcaaatctccagtgcttcaacgggggccagcaacgacaaccactacttcggctacagcaccccctgggggtattttgatttcaacagattccactgccacttttcaccacgtgactggcagcgactcatcaacaacaattggggattccggcccaagagactcaacttcaagctcttcaacatccaagtcaaggaggtcacgacgaacgatggcgtcacgaccatcgctaataaccttaccagcacggttcaagtcttctcggattcagagtaccaactgccgtacgtcctcggctctgcgcaccagggctgcctccctccgttcccggcggacgtgttcatgattccgcagtacggctacctaacgctcaacaatggcagccaggccgtgggacgttcatccttttactgcctggaatatttcccttctcagatgctgagaacgggcaacaactttaccttcagctacacctttgaggaagtgcctttccacagcagctacgcgcacagccagagcctggaccggctgatgaatcctctcatcgaccaatacctgtattacctgaacagaactcaaaatcagtccggaagtgcccaaaacaaggacttgctgtttagccgtgggtctccagctggcatgtctgttcagcccaaaaactggctacctggaccctgttatcggcagcagcgcgtttctaaaacaaaaacagacaacaacaacagcaattttacctggactggtgcttcaaaatataacctcaatgggcgtgaatccatcatcaaccctggcactgctatggcctcacacaaagacgacgaagacaagttctttcccatgagcggtgtcatgatttttggaaaagagagcgccggagcttcaaatactgcattggacaatgtcatgatcacagatgaagaggaaattaaagccactaaccctgtggccaccgaaagatttgggaccgtggcagtcaatttccagagcagcagcacagaccccgcgaccggagatgtgcatgttatgggagccttacctggcatggtgtggcaagacagagacgtatacctgcagggtcccatttgggccaaaattcctcacacggatggacactctcacccgtctcctctcatgggcggctttggacttaagcacccgcctcctcaaatcctcatcaaaaacacgcctgttcctgcgaatcctccggcagagttttcggctacaaagtttgcttcattcatcacccagtactccacaggacaagtgagtgtggaaattgaatgggagctgcagaaagaaaacagcaagcgctggaatcccgaagtgcagtacacatccaattatgcaaaatctgccaacgttgatttcactgtggacaacaatggactttatactgagcctcgccccattggcacccgttaccttacccgtcccttg

SEQ ID NO: 687 - DNA, 2208 bp, Artificial Sequence
  source: /note="Description of Artificial Sequence: Synthetic polynucleotide"
atggctgccgatggttatcttccagattggctcgaggacaacctctctgagggcattcgcgagtggtgggacttgaaacctggagccccgaaacctaaagccaaccagcaaaagcaggacgacggccggggtctggtgcttcctggctacaagtacctcggacccttcaacggactcgacaagggggagcccgtcaacgcggcggacgcagcggccctcgagcacgacaaggcctacgaccagcagctcaaagcgggtgacaatccgtacctgcggtataaccacgccgacgccgagtttcaggagcgtctgcaagaagatacgtcttttgggggcaacctcgggcgagcagtcttccaggccaagaagcgggttctcgaaccttttggtctggttgaggaaggcgctaagacggctcctggaaagaaacgtccggtagagcagtcgccacaagagccagactcctcctcgggcatcggcaagacaggccagcagcccgctaaaaagagactcaattttggtcagactggcgactcagagtcagtccccgacccacaacctctcggagaacctccagcaacccccgctgctgtgggacctactacaatggcttcaggcggtggcgcaccaatggcagacaataacgaaggcgccgacggagtgggtaatgcctcaggaaattggcattgcgattccacatggctgggcgacagagtcatcaccaccagcacccgcacctgggccttgcccacctacaataaccacctctacaagcaaatctccagtgcttcaacgggggccagcaacgacaaccactacttcggctacagcaccccctgggggtattttgatttcaacagattccactgccacttttcaccacgtgactggcagcgactcatcaacaacaattggggattccggcccaagagactcaacttcaagctcttcaacatccaagtcaaggaggtcacgacgaacgatggcgtcacgaccatcgctaataaccttaccagcacggttcaagtcttctcggattcagagtaccaactgccgtacgtcctcggctctgcgcaccagggctgcctccctccgttcccggcggacgtgttcatgattccgcagtacggctacctaacgctcaacaatggcagccaggccgtgggacgttcatccttttactgcctggaatatttcccttctcagatgctgagaacgggcaacaactttaccttcagctacacctttgaggaagtgcctttccacagcagctacgcgcacagccagagcctggaccggctgatgaatcctctcatcgacctatacctgtattacctgaacagaactcaaaatcagtccggaagtgcccaaaacaaggacttgctgtttagccgtgggtctccagctggcatgtctgttcagcccaaaaactggctacctggaccctgttatcggcagcagcgcgtttctaaaacaaaaacagacaacaacaacagcaattttacctggactggtgcttcaaaatataacctcaatgggcgtgaatccatcatcaaccctggcactgctatggcctcacacaaagacgacgaagacaagttctttcccatgagcggtgtcatgatttttggaaaagagagcgccggaacttcaaatactgcattggacaatgtcatgatcacagatgaagaggaaattaaagccactaaccctgtggccaccgaaagatttgggaccgtggcagtcaatttccagagcagcagcacagaccccgcgaccggagatgtgcatgttatgggagccttacctggcatggtgtggcaagacagagacgtatacctgcagggtcccatttgggccaaaattcctcacacggatggacactttcacccgtctcctctcatgggcggctttggacttaagcacccgcctcctcaaatcctcatcaaaaacacgcctgttcctgcgaatcctccggcagagttttcggctacaaagtttgcttcattcatcacccagtactccacaggacaagtgagtgtggaaattgaatgggagctgcagaaagaaaacagcaagcgctggaatcccgaagtgcagtacacatccaattatgcaaaatctgccaacgttgatttcactgtggacaacaatggactttatactgagcctcgccccattggcacccgttaccttacccgtcccttg

SEQ ID NO: 688 - DNA, 2208 bp, Artificial Sequence
  source: /note="Description of Artificial Sequence: Synthetic polynucleotide"
atggctgccgatggttatcttccagattggctcgaggacagcctctctgagggcattcgcgagtggtgggacttgaaacctggagccccgaaacctaaagccaaccagcaaaagcaggacgacggccggggtctggtgcttcctggctacaagtacctcggacccttcaacggactcgacaagggggagcccgtcaacgcggcggacgcagcggccctcgagcacgacaaggcctacgaccagcagctcaaagcgggtgacaatccgtacctgcggtataaccacgccgacgccgagtttcaggagcgtctgcaagaagatacgtcttttgggggcaacctcgggcgagcagtcttccaggccaagaagcgggttctcgaaccttttggtctggttgaggaaggcgctaagacggctcctggaaagaaacgtccggtagagcagtcgccacaagagccagactcctcctcgggcatcggcaagacaggccagcagcccgctaaaaagagactcaattttggtcagactggcgactcagagtcagtccccgacccacaacctctcggagaacctccagcaacccccgctgctgtgggacctactacgatggcttcaggcggtggcgcaccaatggcagacaataacgaaggcgccgacggagtgggtaatgcctcaggaaattggcattgcgattccacatggctgggcgacagagtcatcaccaccagcacccgcacctgggccttgcccacctacaataaccacctctacaagcaaatctccagtgcttcaacgggggccagcaacgacaaccactacttcggctacagcaccccctgggggtattttgatttcaacagattccactgccacttttcaccacgtgactggcagcgactcatcaacaacaattggggattccggcccaagagactcaacttcaagctcttcaacatccaagtcaaggaggtcacgacgaacgatggcgtcacgaccatcgctaataaccttaccagcacggttcaagtcttctcggattcagagtaccaactgccgtacgtcctcggctctgcgcaccagggctgcctccctccgttcccggcggacgtgttcatgattccgcagtacggctacctaacgcccaacaatggcagccaggccgtgggacgttcatccttttactgcctggaatatttcccttctcagatgctgagaacgggcaacaactttaccttcagctacacctttgaggaagtgcctttccacagcagctacgcgcacagccagagcctggaccggctgatgaatcctctcatcgaccaataccagtattacctgaacagaactcaaaatcagtccggaagtgcccaaaacaaggacttgctgtttagccgtgggtctccagctggcatgtctgttcagcccaaaaactggctacctggaccctgttatcggcagcagcgcgtttctaaaacaaaaacagacaacaacaacagcaattttacctggactggtgcttcaaaatataacctcaatgggcgtgaatccatcatcaaccctggcactgctatggcctcacacaaagacgacgaagacaagttctttcccatgagcggtgtcatgatttttggaaaagagagcgccggagcttcaaatactgcattggacaatgtcatgatcacagatgaagaggaaattaaagccactaaccctgtggccaccgaaagatttgggaccgtggcagtcaatttccagagcagcagcacagaccccgcgaccggagatgtgcatgttatgggagccttacctggcatggtgtggcaagacagagacgtatacctgcagggtcccatttgggccaaaattcctcacacggatggacactttcacccgtctcctctcatgggcggctttggacttaagcacccgcctcctcaaatcctcatcaaaaacacgcctgttcctgcgaatcctccggcagagttttcggctacaaagtttgcttcattcatcacccagtactccacaggacaagtgagtgtggaaattgaatgggagctgcagaaagaaaacagcaagcgctggaatcccgaagtgcagtacacatccaattatgcaaaatctgccaacgttgatttcactgtggacaacaatggactttatactgagcctcgccccattggcacccgttaccttacccgtcccttg

SEQ ID NO: 689 - DNA, 2208 bp, Artificial Sequence; identical to SEQ ID NO: 680
  source: /note="Description of Artificial Sequence: Synthetic polynucleotide"

SEQ ID NO: 690 - DNA, 2205 bp, Artificial Sequence
  source: /note="Description of Artificial Sequence: Synthetic polynucleotide"
atggctgccgatggttatcttccagattggctcgaggacactctctctgaaggaataagacagtggtggaagctcaaacctggcccaccaccaccaaagcccgcagagcggcataaggacgacagcaggggtcttgtgcttcctgggtacaagtacctcggacccttcaacggactcgacaagggagagccggtcaacgaggcagacgccgcggccctcgagcacgacaaagcctacgaccggcagctcgacagcggagacaacccgtacctcaagtacaaccacgccgacgcggagtttcaggagcgccttaaagaagatacgtcttttgggggcaacctcggacgagcagtcttccaggcgaaaaagagggttcttgaacctctgggcctggttgaggaacctgttaagacggctccgggaaaaaagaggccggtagagcactctcctgtggagccagactcctcctcgggaaccggaaaggcgggccagcagcctgcaagaaaaagattgaattttggtcagactggagacgcagactcagtacctgacccccagcctctcggacagccaccagcagccccctctggtctgggaactaatacgatggctacaggcagtggcgcaccaatggcagacaataacgagggcgccgacggagtgggtaattcctcgggaaattggcattgcgattccacatggatgggcgacagagtcatcaccaccagcacccgaacctgggccctgcccacctacaacaaccacctctacaaacaaatttccagccaatcaggagcctcgaacgacaatcactactttggctacagcaccccttgggggtattttgacttcaacagattccactgccacttttcaccacgtgactggcaaagactcatcaacaacaactggggattccgacccaagagactcaacttcaagctctttaacattcaagtcaaagaggtcacgcagaatgacggtacgacgacgattgccaataaccttaccagcacggttcaggtgtttactgactcggagtaccagctcccgtacgtcctcggctcggcgcatcaaggatgcctcccgccgttcccagcagacgtcttcatggtgccacagtatggatacctcaccctgaacaacgggagtcaggcagtaggacgctcttcattttactgcctggagtactttccttctcagatgctgcgtaccggaaacaactttaccttcagctacacttttgaggacgttcctttccacagcagctacgctcacagccagagtctggaccgtctcatgaatcctctcatcgaccagtacctgtattacttgagcagaacaaacactccaagtggaaccaccacgcagtcaaggcttcagttttctcgggccggagcgagtgacattcgggaccagtctaggaactggcttcctggaccctgttaccgccagcagcgagtatcaaagacatctgcggataacaacaacagtgaatactcgtggactggagctaccaagtaccacctcaatggcagagactctctggtgaatccgggcccggccatggcaagccacaaggacgatgaagaaaagttttttcctcagagcggggttctcatctttgggaagcaaggctcagagaaaacaaatgtggacattgaaaaggtcatgattacagacgaagaggaaatcaggacaaccaatcccgtggctacggagcagtatggttctgtatctaccaacctccagagaggcaacagacaagcagctaccgcagatgtcaacacacaaggcgttcttccaggcatggtctggcaggacagagatgtgtaccttcaggggcccatctgggcaaagattccacacacggacggacattttcacccctctcccctcatgggtggattcggacttaaacaccctcctccacagattctcatcaagaacaccccggtacctgcgaatccttcgaccaccttcagtgcggcaaagtttgcttccttcatcacacagtactccacgggacaggtcagcgtggagatcgagtgggagctgcagaaggaaaacagcaaacgctggaatcccgaaattcagtacacttccaactacaacaagtctgttaatgtggactttactgtggacactaatggcgtgtattcagagcctcgccccattggcaccagatacctgactcgtaatctg

SEQ ID NO: 691 - protein, 736 aa, Artificial Sequence
  source: /note="Description of Artificial Sequence: Synthetic polypeptide"
MAADGYLPDWLEDNLSEGIREWWALKPGAPQPKANQQHQDNARGLVLPDYKYLGPGNGLDKGEPVNAADVAALEHDKAYDQQLKAGDNPYLKYNHADAEFQERLKEDTSFGGNLGRAVFQAKKRLLEPLGLVEEAAKTAPGKKRPVEQSPQEPDSSAGIGKSGAQPAKKRLNFGQTGDTESVPDPQPIGEPPAAPSGVGSLTMASGGGAPVADNNEGADGVGSSSGNWHCDSQWLGDGVITTSTRTWALPTYNNHLYKQISNSTSGGSSNDNAYFGYSTPWGYFDFNRFHCHFSPRDWQRLINNNWGFRPKRLNFKLFNIQVKEVTDNNGVKTIANNLTSTVQVFTDSDYQLPYVLGSAHEGCLPPFPADVFMIPQYGYLTLNDGSQAVGRSSFYCLEYFPSQMLRTGNNFQFSYEFENVPFHSSYAHSQSLDRLMNPLIDQYLHYLPKTINGSGQNQQTLKFSVAGPSNMAVQGRNYIPGPSYRQQRVSTTVTQNNNSEFAWPGASSWALNGRNSLMNPGPAMASYKEGEDSFFPLSGSLIFGKQGTGRDNVDADKVMITNEEEIKTTNPVATESYGQVATNHQSAQAQAQTGWVQNQGILPGMVWQDRDVYLQGPIWAKIPHTDGNFHPSPLMGGFGMKHPPPQTLIKNTPVPADPPTAFNKDKLNSFITQYSTGQVSVEIEWELQKENSKRWNPEIQYTSNYYKSNNVEFAVNTEGVYSEPRPIGTRYLTRNL

SEQ ID NO: 692 - protein, 736 aa, Artificial Sequence
  source: /note="Description of Artificial Sequence: Synthetic polypeptide"
MAADGYLPDWLEDNLSEGIREWWALKPGAPQPKANQQHQDNARGLVLPGYKYLGPGNGLDKGEPVNAADAAALEHDKAYDQQLKAGDNPYLKYNHADAEFQERLKEDTSFGGNLGRAVFQAKRRLLEPLGLVEEAAKTAPGKKRPVEQSPQEPDSSAGIGKSGAQPAKKRLNFGQTGDTESVPDPQPIGEPPAAPSGVGSLTMASGGGAPVADNNEGADGVGSSSGNWHCDSQWLGDRVITTSTRTWALPTYNNHLYKQISNSTSGGSSNDNAYFGYSTPWGYFDFNRFHCHFSPRDWQRLINNNWGFRPKRLNFKLFNIQIKEVTDNNGVKTIANNLTSTVQVFTDLDYQLPYVLGSAHEGCLPPFPADVFMIPQYGYLTLNDGSQAVGRSSFYCLEYFPSQMLRTGNNFQFSYEFENVPFHSSYAHSQSLDRLMNPLIDQYLHYLSKTINGSGQNQQTLKFSVAGPSNMAVQGRNYIPGPSYRQQRVSTTVTQNNNSEFAWPGASSWALNGRNSLMNPGPAMASYKEGEDSFFPLSGSLIFGKQGTGRDNVDADKVMITNEEEIKTTNPVATESYGQVATNHQSAQAQAQTGWVQNQGILPGMVWQDRDVYLQGPIWAKIPHTDGNFHPSPLMGGFGMKHPPPQTLIKNTPVPADPPTAFNKDKLNSFITQYSTGQVSVEIEWELQKENSKRWNPEIQYTSNYYKSNNVEFAVNTEGVYSEPRPIGTRYLTRNL

SEQ ID NO: 693 - protein, 736 aa, Artificial Sequence
  source: /note="Description of Artificial Sequence: Synthetic polypeptide"
MAADGYLPDWLEDNLSEGIREWWALKPGAPQPKANQQHQDNARGLVLPGYKYLGPGNGLDKGEPVSAADAAALEHDKAYDQQLKAGDNPYLKYNHADAEFQERLKEDTSFGGNLGRAVFQAKKRLLEPLGLVEEAAKTAPGKKRPVEQSPQEPDSSAGIGKSGAQPAKKRLNFGQTGDTESVSDPQPIGEPPAAPSGVGSLTMASGGGAPVADNNEGADGVGSSSGNWHCDSQWLGDRVITTSTRTWALPTYNNHLYKQISNSTSGGSSNDNAYFGYSTPWGYFDFNRFHCHFSPRDWQRLINNNWGFRPKRLNFKLFNIQVKEVTDNNGVKTIANNLTSTVQVFTDSDYQLPYVLGSAHEGCLPPSPADVFMIPQYGYLTLNDGSQAVGRSSFYCLEYFPSQMLRTGNNFQFSYEFENVPFHSSYAHSQSLDRLMNPLIDQYLHYLSKTINGSGQNQQTLKFSVAGPSNMAVQGRNYIPGPSYRQQRVSTTVTQNNNSEFAWPGASSWALNGRNSLMNPGPAMASYKEGEDSFFPLSGSLIFGKQGTGRDDVDADKVIITNEEEIKTTNPVATESYGQVATNHQSAQAQAQTGWVQNQGILPGMVWQDRDVYLQGPIWAKIPHTDGNFHPSPLMGGFGMKHPPPQTLIKNTPVPADPPTAFNKDKLNSFITQYSTGQVSVEIEWELQKENSKRWNPEIQYTSNYYKSNNVEFAVNTEGVYSEPRPIGTRYLTRNL

SEQ ID NO: 694 - protein, 736 aa, Artificial Sequence
  source: /note="Description of Artificial Sequence: Synthetic polypeptide"
MAADGYLPDWLEDNLSEGIREWWALKPGAPQPKANQQHQDNARGLVLPGYKYLGPGNGLDKGEPVNAADAAALEHDKAYDQQLKAGDNPYLKYNHAGAEFQERLKEDTSFGGNLGRAVFQAKKRLLEPLGLVEEAAKTAPGKKRPVEQSPQEPDSSAGIGKSGAQPAKKRLNFGQTGDTESVPDPQPIGEPPAAPSGVGSLTMASGGGAPVADNNEGAGGVGSSSGNWHCDSQWLGDRVVTTSTRTWALPTYNNHLYKQISNSTSGGSSNDNAYFGYSTPWGYFDFNRFHCHFSPRDWQRLINNNWGFRPKRLNFKLFNIQVKEVTDNNGVKTIANNLTSTVQVFTDSDYQLPYVLGSAHGGCLPPFPADVFMIPQYGYLTLNDGSQAVGRSSFYCLEYFPSQMLRTGNNFQFSYEFENVPFHSSYAHSQSLDRLMNPLIDQYLHYLSKTINGSGQNQQTLKFSVAGPSNMAVQGRSYIPGPSYRQQRVSTTVTQNNNSEFAWPGASSWALNGRNSLMNPGPAMASYKEGEDSFFPLSGSLIFGKQGTGRDNVDADKVMITNEEEIKTTNPVATESYGQVATNHQSAQAQAQTGWVQNQGILPGMVWQDRDVYLQGPIWAKIPHTDGNFHPSPLMGGFGMKHPPPQTLIKNTPVPADPPTAFNKDKLNSFITQYSTGQVSVEIEWELQKENSKRWNPEIQYTSNYYKSNNVEFAVNTEGVYSEPRPIGTRYLTRNL

SEQ ID NO: 695 - protein, 736 aa, Artificial Sequence
  source: /note="Description of Artificial Sequence: Synthetic polypeptide"
MAADGYLPDWLEDNLSEGIREWWALKPGAPQPKANQQHQDNARGLVLPGYKYLGPGNGLDKGEPVNAADAAALEHDKAYDQQLKAGDNPYLKYNHADAEFQERLKEDTSFGGNLGRAVFQAKKRLLEPLGLVEEAAKTAPGKKRPVEQSPQEPDSSAGIGKSGAQPAKKRLNFGQTGDTESVPDPQPIGEPPAAPSGVGSLTMASGGGAPVADNNEGADGVGSSSGNWHCDSQWLGDRVVTTSTRTWALPTYNNHLYKQISNSTSGGSSNDNAYFGYSTPWGYFDFNRFHCHFSPRDWQRLINNNWGFRPKRLNFKLFNIQVKEVTDNNGVKTIANNLTSTVQVFTDSDYQLPYVLGSAHEGCLPPFPADVFMIPQYGYLTLNDGSQAVGRSSFYCLEYFPSQMLRTGNNFQFSYEFENVPFHSSHAHSQSLDRLMNPLIDQYLHYLSKTINGSGQNQQTLKFSVAGHSNMAVQGRNYIPGPSYRQQRVSTTVTQNNNSEFAWPGASSWALNGRNSLMNPGPAMASYKEGEDSFFPLSGSLIFGKQGTGRDNVDADKVMITNEEEIKTTNPVATESYGQVATNHQSAQAQAQTGWVQNQGILPGMVWQDRDVYLQGPIWAKIPHTDGNFHPSPLMGGFGMKHPPPQTLIKNTPVPADPPTAFNKDKLNSFITQYSTGQVSVEIGWELQKENSKRWNPEIQYTSNYYKSNNVEFAVNTEGVYSEPRPIGTRYLTRNL

SEQ ID NO: 696 - protein, 736 aa, Artificial Sequence
  source: /note="Description of Artificial Sequence: Synthetic polypeptide"
MAADGYLPDWLEDNLSEGIREWWALKPGAPQPKANQQHQDNARGLVLPGYKYLGPGNGLDKGEPVNAADAAALEHDKAYDQQLKAGDNPYLKYNHADAEFQERLKEDTSFGGNLGRAVFQAKKRLLEPLGLVEEAAKTAPGKKRPVEQSPQEPDSSAGIGKSGAQPAKKRLNFGQTGDTESVPDPQPIGEPPAAPSGVGSLTMASGGGAPVADNNEGADGVGSSSGNWHCDSQWLGDRVITTSTRTWALPTYNNRLYKQISNSTSGGSSNDNAYFGYSTPWGYFDFNRFHCHFSPRDWQRLINNNWGFRPKRLNFKPFNIQVKEVTDNNGVKTIANNLTSTVQVFTDSDYQLPYVLGSAHEGCLPPFPADVFMIPQYGYLTLNDGSQAVGRSSFYCLEYFPSQMLRTGNNFQFSYEFENVPFHSSYAHSQSLDRLMNPLIDQYLHYLSKTINGSGQNQQTLKFSVAGPSNMAVQGRNYIPGPSYRQQRVSTTVTQNNNSEFAWPGASSWALNGRNSLMNPGPAMASYKEGEDSFFPLSGSLIFGKQGTGRDNVDADKVMITNEEEIKTTNPVATESYGQVATNHQSAQAQAQTGWVQNQGILPGMVWQDRDVYLQGPIWAKIPHTDGNFHPSPLMGGFGMKHPPPQTLIKNTPVPADPPTAFNKDKLNSFITQYSTGQVSVEIEWELQKENSKRWNPEIQYTSNYYKSNNVEFAVNTEGVYSEPRPIGTRYLTRNL

SEQ ID NO: 697 - protein, 736 aa, Artificial Sequence
  source: /note="Description of Artificial Sequence: Synthetic polypeptide"
MAADGYLPDWLEDNLSEGIREWWALKPGAPQPKANQQHQDNARGLVLPGYKYLGPGNGLDKGEPVNAADAAALEHDKAYDQQLKAGDNPYLKYNHADAEFQERLKEDTSFGGNLGRAVFQAKKRLLEPLGLVEEAAKTAPGKKRPVEQSPQEPDSSAGIGKSGAQPAKKRLNFGQTGDTESVPDPQPIGEPPAAPSGVGSLTMASGGGAPVADNNEGADGVGSSSGNWHCDSQWLGDRVITTSTRTWALPTYNNHLYKQISNSTSGGSSNDNAYFGYSTPWGYFDFNRFHCHFSPRDWQRLINNNWGFRPKRLNFKLFNIQVKEVTDNNGVKTIANNLTSTVQVFTDSDYQLPYVLGSAHEGCLPPFPADVFMIPQYGYLTLNDGSQAVGRSSFYCLEYFPSQMLRTGNNFQFSYEFENVPFHSSYAHSQSLDRLMNPLIDQYLHYLSKTINGSGQNQQTLKFSVAGPSNMAVQGRNYIPGPSYRQQRVSTTVTQNNNSEFAWPGASSWALNGRNSLMNPGPAMASYKEGEDSFFPLSGSLIFGKQGTGRDNVDADKVMITNEEEIKTTNPVATESYGQVATNHQSAQAQAQTGWVQNQGILPGMVWQDRDVYLQGPIWAKIPHTDGNFHPSPLMGGFGMKHPPPQTLIKNTPVPADPPTAFNKDKLNSFITQYSTGQVSVEIEWELQKENSKRWNPEIQYTSNYYKSNNVEFAVNTEGVYSEPRPIGTRYLTRNL

SEQ ID NO: 698 - protein, 736 aa, Artificial Sequence; identical to SEQ ID NO: 697
  source: /note="Description of Artificial Sequence: Synthetic polypeptide"

SEQ ID NO: 699 - protein, 736 aa, Artificial Sequence
  source: /note="Description of Artificial Sequence: Synthetic polypeptide"
MAADGYLPDWLEDNLSEGIREWWDLKPGAPKPKANQQKQDDGRGLVLPGYKYLGPFNGLDKGEPVNAADAAALEHDKAYDQQLKAGDNPYLRYNHADAEFQERLQEDTSFGGNLGRAVFQAKKRVLEPFGLVEEGAKTAPGKKRPVEQSPQEPDSSSGIGKSGQQPAKKRLNFGQTGDSESVPDPQPLGEPPATPAALGPTTMASGGGAPMADNNEGADGVGNASGNWHCDSTWLGDRVITTSTRTWALPTYNNHLYKQISSASTGASNDNHYFGYSTPWGYFDFNRFHCHFSPRDWQRLINNNWGFRPKRLNFKLFNIQVKEVTTNDGVTTIANNLTSTVQVFSDSEYQLPYVLGSAHQGCLPPFPADVFMIPQYGYLTLNNGSKAVGRSSFYCLEYFPSQMLRTGNNFTFSYTFEEVPFHSSYAHSQSLDRLMNPLIDQYLYYLNRTQNQSGSAQNKDLLFSRGSPAGMSVQPKNWLPGPCYRQQRVSKTKTDNNNSNFTWTGASKYNLNGRESIINPGTAMASHKDDEDKFFPMSGVMIFGKESAGASNTALDNVMITDEEEIKATNPVATERFGTVAVNFQSSSTDPATGDVHVMGALPGMVWQDRDVYLQGPIWAKIPHTDGHFHPSPLMGGFGLKHPPPQILIKNTPVPANPPAEFSATKFASFITQYSTGQVSVEIEWELQKENSKRWNPEVQYTSNYAKSANVDFTVDNNGLYTEPRPIGTRYLTRPL

SEQ ID NO: 700 - protein, 736 aa, Artificial Sequence
  source: /note="Description of Artificial Sequence: Synthetic polypeptide"
MAADGYLPDWLEDNLSEGIREWWDLKPGAPKPKANQQKQDDGRGLVLPGYKYLGPFNGLDKGEPVNAADAAALEHDKAYDQQLKAGDNPYLRYNHADAEFQERLQEDTSFGGNLGRAVFQAKKRVLEPLGLVEEGAKTAPGKKRPVEQSPQEPDSSSGIGKTGQQPAKKRLNFGQTGDSESVPDPQPLGEPPATPAAVGPTTMASGGGAPMADNNEGADGVGNASGNWHCDSTWLGDRVITTSTRTWALPTYNNHLYKQISSTSTGASNDNHYFGYSTPWGYFDFNRFHCHFSPRDWQRLINNNWGFRPKRLNFKLFNIQVKEVTTNDGVTTIANNLTSTVQVFSDSEYQLPYVLGSAHQGCLPPFPADVFMIPQYGYLTLNNGSQAVGRSSFYCLEYFPSQMLRTGNNFTFSYTFEEVPFHSSYAHSQSLDRLMNPLIDQYLYYLNRTQNQSGSAQNKDLLFSRGSPAGMSVQPKNWLPGPCYRQQRVSKTKTDNNNSNFTWTGASKYNLNGRESIINPGTAVASHKDDEDKFFPMSGVMIFGKESAGASNTALDNVMITDEEEIKATNPVATERFGTVAVNFQSSSTDPATGDVHAMGALPGMVWQDRDVYLQGPIWAKIPHTDGHFHPSPLMGGFGLKNPPPQILIKNTPVPANPPAEFSATKFASFITQYSTGQVSVEIEWELQKENSKRWNPEVQYTSNYAKSANVDFTVDNNGLYTEPRPIGTRYLTRPL

SEQ ID NO: 701 - protein, 736 aa, Artificial Sequence
  source: /note="Description of Artificial Sequence: Synthetic polypeptide"
MAADGYLPDWLEDNLSEGIREWWALKPGAPQPKANQQHQDNARGLVLPGYKYLGPGNGLDKGEPVNAADAAALEHDKAYDQQLKAGDNPYLKYNHADAEFQERLKEDTSFGGNLGRAVFQAKKRLLEPLGLVEEAAKTAPGKKRPVEQSPQEPDSSAGIGKSGAQPAKKRLNFGQTGDTESVPDPQPIGEPPAAPSGVGSLTMASGGGAPVADNNEGADGVGSSSGNWHCDSQWLGDRVITTSTRTWALPTYNNHLYKQISNSTSGGSSNDNAYFGYSTPWGYFDFNRFHCHFSPRDWQRLINNNWGFRPKRLNFKLFNIQVKEVTDNNGVKTIANNLTSTVQVFTDSDYQLPYVLGSAHEGCLPPFPADVFMIPQYGYLTLNDGSQAVGRSSFYCLEYFPSQMLRTGNNFQFGYEFENVPFHSSYAHSQSLDRLMNPLIDQYLYYLSKTINGSGQNQQTLKFSVAGPSNMAVQGRNYIPGPSYRQQRVSTTVTQNNNSEFAWPGASSWALNGRNSLMNPGPAMASHKEGEDRFFPLSGSLIFGKQGTGRDNVDADKVMITNEEEIKTTNPVATESYGQVATNHQSAQAQAQTGWVQNQGILPGMVWQDRDVYLQGPIWAKIPHTDGNFHPSPLMGGFGMKHPPPQILIKNTPVPADPPTAFNKDKLNSFITQYSTGQVSVEIEWELQKENSKRWDPEIQYTSNYYKSNNVEFAVNTEGVYSEPRPIGTRYLTRNL

SEQ ID NO: 702 - protein, 736 aa, Artificial Sequence
  source: /note="Description of Artificial Sequence: Synthetic polypeptide"
MAADGYLPDWLEDNLSEGIREWWALKPGAPQPKANQQHQDNARGLVLPGYKYLGPGNGLDKGEPVNAADAAALEHDKAYDQQLKAGDNPYLKYNHADAEFQERLKEDTSFGGNLGRAVFQAKKRLLEPLGLVEEAAKTAPGKKRPVEQSPQEPDSSAGIGKSGAQPAKKRLNFGQTGDTESVPDPQPIGEPPAAPSGVGSLTMASGGGAPVADNNEGADGVGSSSGNWHCDSQWLGDRVITTSTRTWALPTYNNHLYKQISNSTSGGSSNDNAYFGYSTPWGYFDFNRFHCRFSPRDWQRLINNNWGFRPKRLNFKLFNIQVKEVTDNNGVKTIANNLTSTVQVFTDSDYQLPYVLGSAHEGCLPPFPADVFMIPQYGYLTLNDGSQAVGRSSFYCLEYFPSQMLRTGNNFQFSYEFENVPFHSSYAHSQSLDRLMNPLIDQYLYYLSKTINGSGQNQQTLKFSVAGPSNMAVQGRNYIPGPSYRQQRVSTTVTQNNNSEFAWPGASSWALNGRNSLMNPGPAMASHKEGEDRFFPLSGSLIFGKQGTGRDNVDADKVMITNEEEIKTTNPVATESYGQVATNHQSAQAQAQTGWVQNQGILPGMVWQDRDVYLQGPIWAKIPHTDGNFHPSPLMGGFGMKHPPPQILIKNAPVPADPPTAFNKDKLNSFITQYSTGQVSVEIEWELQKENSKRWNPEIQYTSNYYKSNNVEFAVNTEGVYSEPRPIGTRYLTRNL

SEQ ID NO: 703 - protein, 736 aa, Artificial Sequence
  source: /note="Description of Artificial Sequence: Synthetic polypeptide"
MAADGYLPDWLEDNLSEGIREWWALKPGAPQPKANQQHQDNARGLVLPGYKYLGPGNGLDKGEPVSAADAAALEHDKAYDQQLKAGDNPYLKYNHADAEFQERLKEDTSFGGNLGRAVFQAKKRLLEPLGLVEEAAKTAPGKKRPVEQSPQEPDSSAGIGKSGAQPAKKRLNFGQTGDTESVPDPQPIGEPPAAPSGVGSLTMASGGGAPVADNNEGADGVGSSSGNWHCDSQWLGDRVITTSTRTWALPTYNNHLYKQISNSTSGGSSNDNAYFGYSTPWGYFDFNRFHCHFSPRDWQRLINNNWGFRPKRLNFKLFNIQVKEVTDNNGVKTIANNLTSTVQVFTDSDYQLPYVLGSAHEGCLPPFPADVFMIPQYGYLTLNDGSQAVGRSSFYCLEYFPSQMLRTGNNFQFSYEFENVPFHSSYAHSQSLDRLMNPLIDQYLYYLSKTINGSGQNQQTLKFSVAGPSNMAVQGRNYIPGPSYRQQRVSTTVTQNNNSEFAWPGASSWALNGRNSLMNPGPAMASHKEGEDRFFPLSGSLIFGKQGTGRDNVDADKVMITNEEEIKTTNPVATESYGQVATNHQSAQAQAQTGWVQNQGILPGMVWQDRDVYLQGPIWAKIPHTDGNFHPSPLMGGFGMKHPPPQILIKNTPVPADPPTAFNKDKLNSFITQYSTGQVSVEIEWELQKENSKRWNPEIQYTSNYYKSNNVEFAVNTEGVYSEPRPIGTRYLTRNL

SEQ ID NO: 704 - protein, 736 aa, Artificial Sequence
  source: /note="Description of Artificial Sequence: Synthetic polypeptide"
MAADGYLPDWLEDNLSEGIREWWALKPGAPQPKANQQHQDNARGLVLPGYKYLGPGNGLDKGEPVNAADAAALEHDKAYDQQLKAGDNPYLKYNHADAEFQERLKEDTSFGGNLGRAVFQAKKRLLEPLGLVEEAAKTAPGKKRPVEQSPQEPDSSAGIGKSGAQPAKKRLNFGQTGDTESVPDPQPIGEPPAAPSGVGSLTMASGGGAPVADNNEGADGVGSSSGNWHCDSQWLGDRVITTSTRTWALPTYNNHLYKQISNSTSGGSSNDNAYFGYSTPWGYFDFNRFHCHFSPRDWQRLINNNWGFRPKRLNFKLFNIQVKEVTDNNGVKTIANNLTSTVQVFTDSDYQLPYVLGSAHEGCLPPFPADVFMIPQYGYLTLNDGSQAVGRSSFYCLEYFPSQMLRTGNNFQFSYEFENVPFHSSYAHSQSLDRLMNPLIDQYLYYLSKTINGSGQNQQTLKFSVAGPSNTAVQGRNYIPGPSYRQQRVSTTVTQNNNSEFAWPGASSWALNGRNSLMNPGPAMASHKEGEDRFFPLSGSLIFGKQGTGRDNVDADKVMITNEEEIKTTNPVATESYGQVATNHQSAQAQAQTGWVQNQGILPGMVWQDRDVYLQGPIWAKIPHTDGNFHPSPLMGGFGMKHPPPQILIKNTPVPADPPTAFNKDKLNSFITQYSTGQVSVEIEWELQKENSKRWNPEIQYTSNYYKSNNVEFAVNTEGVYSEPRPIGTRYLTRNL

SEQ ID NO: 705 - protein, 736 aa, Artificial Sequence
  source: /note="Description of Artificial Sequence: Synthetic polypeptide"
MAADGYLPDWLEDNLSEGIREWWALKPGAPQPKANQQHQDNARGLVLPGYKYLGPGNGLDKGEPVNAADAAALEHDKAYDQQLKAGDNPYLKYNHADAEFQERLKEDTSFGGNLGRAVFQAKKRLLEPLGLVEEAAKTAPGKKRPVEQSPQEPDSSAGIGKSGAQPAKKRLNFGQTGDTESVPDPQPIGEPPAAPSGVGSLTMASGGGAPVADNNEGADGVGSSSGNWHCDSQWLGDRVITTSTRTWALPTYNNHLYKQISNSTSGGSSNDNAYFGYSTPWGYFDFNRFHCHFSPRDWQRLINNNWGFRPKRLNFKLFNIQVKEVTDNNGVKTIANNLTSTVQVFTDSDYQLPYVLGSAHEGCLPPFPADVFMIPQYGYLTLNDGSQAVGRSSFYCLEYFPSQMLRTGSNFQFSYEFENVPFHSSYAHSQSLDRLMNPLIDQYLYYLSKTINGSGQNQQTLKFSVAGPSNMAVQGRNYIPGPSYRQQRVSTTVTQNNNSEFAWPGASSWALNGRNSLMNPGPAMASHKEGEDRFFPLSGSLIFGKQGTGRDNVDADKVMITNEEEIKTTNPAATESYGQVATNHQSAQAQAQTGWVQNQGILPGMVWQDRDVYLQGPIWAKIPHTDGNFHPSPLMGGFGMKHPPPQILIKNTPVPADPPTAFNKDKLNSFITQYSTGQVSVEIEWELQKENSKRWNPEIQHTSNYYKSNNVEFAVNTEGVYSEPRPIGTRYLTRNL

SEQ ID NO: 706 - protein, 736 aa, Artificial Sequence
  source: /note="Description of Artificial Sequence: Synthetic polypeptide"
MAADGYLPDWLEDNLSEGIREWWALKPGAPQPKANQQHQDNARGLVLPGYKYLGPGNGLDKGEPVNAADAAALEHDKAYDQQLKAGDNPYLKYNHADAEFQERLKEDTSFGGNLGRAVFQAKKRLLEPLGLVEEAAKTAPGKKRPVEQSPQEPDSSAGIGKSGAQPAKKRLNFGQTGDTESVPDPQPIGEPPAAPSGVGSLTMASGGGAPVADNNEGADGVGSSSGNWHCDSQWLGDRVITTSTRTWALPTYNNHLYKQISNSTSGGSSNDNAYFGYSTPWGYFDFNRFHCHFSPRDWQRLINNNWGFRPKRLNFRLFNIQVKEVTDNNGVKTIANNLTSTVQVFTDSDYQLPYVLGSAHEGCLPPFPADVFMIPQYGYLTLNDGSQAVGRSSFYCLEYFPSQMLRTGNNFQFSYEFENVPFHSSYAHSQSLDRLMNPLIDQYLYYLSKTINGSGQNQQTLKFSVAGPSNMAVQGRNYIPGPSYRQQRVSTTVTQNNNSEFAWPGASSWALNGRNSLMNPGPAMASHKEGEDRFFPLSGSLIFGKQGTGRDNVDADKVMITNEEEIKTTNPVATESYGQVATNHQSAQAQAQTGWVQSQGILPGMVWQDRDVYLQGPIWAKIPHTDGNFHPSPLMGGFGMKHPPPQILIKNTPVPADPPTAFNKDKLNSFITQYSTGQVSVEIEWELQKENSKRWNPEIQYTSNYYKSNNVEFAVNTEGVYSEPRPIGTRYLTRNL

SEQ ID NO: 707 - protein, 735 aa, Artificial Sequence
  source: /note="Description of Artificial Sequence: Synthetic polypeptide"
MAADGYLPDWLEDNLSEGIREWWALKPGAPQPKANQQHQDNARGLVLPGYKYLGPGNGLDKGEPVNAADAAALEHDKAYDQQLKAGDNPYLKYNHADAEFQERLKEDTSFGGNLGRAVFQAKKRLLEPLGLVEEAAKTAPGKKRPVEQSPQEPDSSAGIGKSGAQPAKKRLNFGQTGDTESVPDPQPIGEPPAAPSGVGSLTMASGGGAPVADNNEGADGVGSSSGNWHCDSQWLGDRVITTSTRTWALPTYNNHLYKQISNSTSGGSSNDNAYFGYSTPWRYFDFNRFHCHFSPRDWQRLINNWGFRPKRLNFKLFNIQVKEVTDNNGVKTIANNLTSTVQAFTDSDYQLPYVLGSAHEGCLPPFPADVFMIPQYGYLTLNDGSQAVGRSSFYCLEYFPSQMLRTGNNFQFSYEFENVPFHSSYAHSQSLDRLMNPLIDQYLYYLSKTINGSGQNQQTLKFSVAGPSNMAVQGRNYIPGPSYRQQRVSTTVTQNNNSEFAWPGASSWALNGRNSLMNPGPAMASHKEGEDRFFPLSGSLIFGKQGTGRDNVDADKVMITNEEEIKTTNPVATESYGQVATNHQSAQAQAQTGWVQNQGILPGMVWQDRDVYLQGPIWAKIPHTDGNFHPSPLMGGFGMKHPPPQILIKNTPVPADPPTAFNKDELNSFITQYSTGQVSVEIEWELQKENSKRWNPEIQYTSNYYKSNNVEFAVNTEGVYSEPRPIGTRYLTRNL

SEQ ID NO: 708 - protein, 735 aa, Artificial Sequence
  source: /note="Description of Artificial Sequence: Synthetic polypeptide"
MAADGYLPDWLEDNLSEGIREWWALKPGAPQPKANQQHQDNARGLVLPGYKYLGPGNGLDKGEPVNAADAAALEHDKAYDQQLKAGDNPYLKYNHADAEFQERLKEDTSFGGNLGRAVFQDKKRLLEPLGLVEEAAKTAPGKKRPVEQSPQEPDSSAGIGKSGAQPAKKRLNFGQTGDTESVPDPQPIGEPPAAPSGVGSLTMASGGGAPVADNNEGADGVGSSSGNWHCDSQWLGDRVITTSTRTWALPTYNNHLYKQISNSTSGGSSNDNAYFGYSTPWGYFDFNRFHCHFSPRDWQRLINNWGFRPKRLNFKLFNIQVKEVTDNNGVKTIANNLTSTVQVFTDSDYQLPYVLGSAHEGCLPPFPADVFMIPQYGYLTLNDGSQAVGRSSFYCLEYFPSQMLRTGNNFQFSYEFENVPFHSSYAHSQSLDRLMNPLIDQYLYYLSKTINGSGQNQQTLKFSVAGPSNMAVQGRNYIPGPSYRQQRVSTTVTQNNNSEFAWPGASSWALNGRNSLMNPGPAMASHKEGEDRFFPLSGSLIFGKQGTGRDNVDADKVMITNEEEIKTTNPVATESYGQVATNHQSAQAQAQTGWVQNQGILPGMVWQDRDVYLQGPIWAKIPHTDGNFHPSPLMGGFGMKHPPPQILIKNTPVPADPPTAFNKDKLNSFITQYSTGQVSVEIEWELQKENSKRWNPEIQYTSNYYKSNNVEFAVNTEGVYSEPRPIGTRYLTRNL

SEQ ID NO: 709 - protein, 736 aa, Artificial Sequence
  source: /note="Description of Artificial Sequence: Synthetic polypeptide"
MAADGYLPDWLEDNLSEGIREWWALKPGAPQPKANQQHQDNARGLVLPGYKYLGPGNGLDKGEPVNAADAAALEHDKAYDQQLKAGDNPYLKYNHADAEFQERLKEDTSFGGNLGRAVFQAKKRLLEPLGLVEEAAKTAPGKKRPVEQSPQEPDSSAGIGKSGAQPAKKRLNFGQTGDTESVPDPQPIGEPPAAPSGVGSLTMASGGGAPVADNNEGADGVGSSSGNWHCDSQWLGDRAITTSTRTWALPTYNNHLYKQISNSTSGGSSNDNAYFGYSTPWGYFDFNRFHCHFSPRDWQRLINNNWGFRPKRLNFKLFNIQVKEVTDNNGVKTIANNLTSTVQVFTDSDYQLPYVLGSAHEGCLPPFPADVFMIPQYGYLTLNDGSQAVGRSSFYCLEYFPSQMLRTGNNFQFSYEFENVPFHSSYAHSQSLDRLMNPLIDQYLYYLSKTINGSGQNQQTLKFSVAGPSNMAVQGRNYIPGPSYRQQRVSTTVTQNNNSEFAWPGASSWALNGRNSLMNPGPAMASHKEGEDRFFPLSGSLIFGKQGTGRDNVDADKVMTTNEEEIKTTNPVATESYGQVATNHQSAQAQAQTGWVQNQGILPGMVWQDRDVYLQGPIWAKIPHTDGNFHPSPLMGGFGMKHPPPQILIKNTPVPADPPTAFNKDKLNSFITQYSTGQVSVEIEWELQKENSKRWNPEIQYTSNYYKSNNVEFAVNTEGVYSEPRPIGTRYLTRNL

SEQ ID NO: 710 - protein, 736 aa, Artificial Sequence
  source: /note="Description of Artificial Sequence: Synthetic polypeptide"
MAADGYLPDWLEDNLSEGIREWWALKPGAPQPKANQQHQDNARGLVLPGYKYLGPGNGLDKGEPVNAADAAALEHDKAYDQQLKAGDNPYLKYNHADAEFQERLKEDTSFGGNLGRAVFQTKKRLLEPLGLVEEAAKTAPGKKRPVEQSPQEPGSSAGIGKSGAQPAKKRLNFGQTGDTESVPDPQPIGEPPAAPSGVGSLTMASGGGAPVADNNEGADGVGSSSGNWHCDSQWLGDRVITTSTRTWALPTYNNHLYKQISNSTSGGSSNDNAYFGYSTPWGYFDFNRFHCHFSPRDWQRLINNNWGFRPKRLNFKLFNIQVKEVTDNNGVKTIANNLTSTVQVFTDSDYQLPYVLGSAHEGCLPPFPADVFMIPQYGYLTLNDGSQAVGRSSFYCLEYFPSQMLRTGNNFQFSYEFENVPFHSSYAHSQSLDRLMNPLIDQYLHYLSKTINGSGQNQQTLKFSVAGPSNMAVQGRNYIPGPSYRQQRVSTTVTQNNNSEFAWPGASSWALNGRNSLMNPGPAMASHKEGEDRFFPLSGSLIFGKQGTGRDNVDADKVMITNEEEIKTTNPVATESYGQVATNHQSAQAQAQTGWVQNQGILPGMVWQDRDVYLQGPIWAKIPHTDGNFHPSPLMGGFGMKHPPPQILIKNTPVPADPPTAFNKDKLNSFITQYSTGQVSVEIEWELQKENSKRWNPEIQYTSNYYKSNNVEFAVNTEGVYSEPRPIGTRYLTRNL

SEQ ID NO: 711 - protein, 736 aa, Artificial Sequence
  source: /note="Description of Artificial Sequence: Synthetic polypeptide"
MAADGYFPDWLEDNLSEGIREWWALKPGAPQPKANQQHQDNARGLVLPGYKYLGPGNGLDKGEPVNAADAAALEHDKAYDQQLKAGDNPYLKYNHADAEFQERLKEDTSFGGNLGRAVFQAKKRLLEPLGLVEEAAKTAPGKKRPVEQSPQEPDSSAGIGKSGAQPAKKRLNFGQTGDTESVPDPQPIGESPAAPSGVGSLTMASGGGAPVADNNEGADGVGSSSGNWHCDSQWLGDRVITTSTRTWALPTYNNHLYKQISNSTSGGSSNDNAYFGYSTPWGYFDFNRFHCHFSPRDWQRLINNNWGFRPKRLNFKLFNIQVKEVTDNNGVKTIANNLTSTVQVFTDSDYQLPYVLGSAHEGCLPPFPADVFMIPQYGYLTLNDGSQAVGRSSFYCLEYLPSQMLRTGNNFQFSYEFENVPFHSSYAHSQSLDRLMNPLIDQYLHYLSKTINGSGQNQQTLKFSVAGPSNMAVQGRNYIPGPSYRQQRVSTTVTQNNNSEFAWPGASSWALNGRNSLMNPGPAVASHKEGEDRFFPLSGSLIFGKQGTGRDNVDADKVMITNEEEIKTTNPVATESYGQVATNHQSAQAQAQTGWVQNQGILPGMVWQDRDVYLQGPIWAKIPHTDGNFHPSPLMGGFGMKHPPPQILIKNTPVPADPPTAFNKDKLNSFITQYSTGQVSVEIEWELQKENSKRWNPEIQYTSNYYKSNNVEFAVNTEGVYSEPRPIGTRYLTRNL

SEQ ID NO: 712 - protein, 736 aa, Artificial Sequence
  source: /note="Description of Artificial Sequence: Synthetic polypeptide"
MAADGYLPDWLEDNLSEGIREWWALKPGAPQPKANQQHQDNARGLVLPGYKYLGPGNGLDKGEPVNAADAAALEHDKAYDQQLKAGDNPYLKYNHADAEFQERLKEDTSFGGNLGRAVFQAKKRLLEPLGPVEEAAKTAPGKKRPVEQSPQEPDSSAGIGKSGAQPAKKRLNFGQTGDTESVPDPQPIGEPPAAPSGVGSLTMASGGGAPVADNNEGADGVGSSSGNWHCDSQWLGDRVITTSTRTWALPTYNNHLYKQISNSTSGGSSNDNAYFGYSTPWGYFDFNRFHCHFSPRDWQRLINNNWGFRPKRLNFKLFNIQVKEVTDNNGVKTIANNLTSTVQVFTDSDYQLPYVLGSAHEGCLPPFPADVFMIPQYGYLTLNDGSQAVGRSSFYCLEYFPSQMLRTGNNFQFSYEFENVPFHSSYAHSQSLDRLMNPLIDQYLYYLSKTINGSGQNQQTLKFSVAGPSNMAVQGRNYIPGPSYRQQRVSTTVTQNNNSEFAWPGASSWALNGRNSLMNPGPAMASHKEGEDRFFPLSGSLIFGKQGTGRDNVDADKVMITNEEEIKTTNPVATESYGQAATNHQSAQAQAQTGWVQNQGILPGMVWQDRDVYLQGPIWAKIPHTDGNFHPSPLMGGFGMKHPPPQILIKNTPVPADPPTAFNKDKLNSFITQYSTGQVSVEIEWELQKENSKRWNPEIQYTSNYYKSNNVEFAVNTEGVYSEPRPIGTRYLTRNL

SEQ ID NO: 713 - protein, 736 aa, Artificial Sequence
  source: /note="Description of Artificial Sequence: Synthetic polypeptide"
MAADGYLPDWLEDNLSEGIREWWALKPGAPQPKANQQHQDNARGLVLPGYKYLGPGNGLDKGEPVNAADAAALEHDKAYDQQLKAGDNPYLKYNHADAEFQERLKEDTSFGGNLGRAVFQAKKRLLEPLGPVEEAAKTAPGKKRPVEQSPQEPDSSAGIGKSGAQPAKKRLNFGQTGDTESVPDPQPIGEPPAAPSGVGSLTMASGGGAPVADNNEGADGVGSSSGNWHCDSQWLGDRVITTSTRTWALPTYNNHLYKQISNSTSGGSSNDNAYFGYSTPWGYFDFNRFHCHFSPRDWRRLINNNWGFRPKRLNFKLFNIQVKEVTDNNGVKTIANNLTSTVQVFTDSDYQLPYVLGSAHEGCLPPFPADVFMIPQYGYLTLNDGSQAVGRSSFYCLEYFPSQMLRTGNNFQFSYEFENVPFHSSYAHSQSLDRLMNPLIDQYLYYLSKTINGSGQNQQTLKFSVAGPSNMAVQGRNYIPGPSYRQQRVSTTVTQNNNSEFAWPGASSWALNGRNSLMNPGPAMASHKEGEDRFFPLSGSLIFGKQGTGRDNVDADKVMITNEEEIKTTNPVATESYGQVATNHQSAQAQAQTGWVQNQGILPGMVWQDRDVYLQGPIWAKIPHTDGNFHPSPLMGGFGMKHPPPQILIKNTPVPADPPTAFNKDKLNSFITQYSTGQVSVEIEWELQKENSKRWNPEIQYTSNYYKSNNVEFAVNTEGVYSEPRPIGTRYLTRNL

SEQ ID NO: 714 - protein, 736 aa, Artificial Sequence
  source: /note="Description of Artificial Sequence: Synthetic polypeptide"
MAADGYLPDWLEDNLSEGIREWWALKPGAPQPKANQQHQDNARGLVLPGYKYLGPGNGLDKGEPVNAADAAALEHDKAYDQQLKAGDNLYLKYNHADAEFQERLKEDTSFGGNLGRAVFQAKKRLLEPLGLVEEAAKTAPGKKRPVEQSPQEPDSSAGIGKSGAQPAKKRLNFGQTGDTESVPDPQPIGEPPAAPSGVGSLTMASGGGAPVADNNEGADGVGSSSGNWHCDSQWLGDRVITTSTRTWALPTYNNHLYKQISNSTSGGSSNDNAYFGYSTPWGYFDFNRFHCHFSPRDWQRLINNNWGFRPKRLNFKLFNIQVKEVTDNNGVKTIANNLTSTVQVFTDSDYQLPYVLGSAHEGCLPPFPADVFMIPQYGYLTLNDGSQAVGRSSFYCLEYFPSQMLRTGNNFQFSYEFENVPFHSSYAHSQSLDRLMNPLIDQYLHYLSKTINGSGQNQQTLKFSVAGPSNMAVQGRNYIPGPSYRQQRVSTTVTQNNNSEFAWPGASSWALNGRNSLMNPGPAMASHKEGEDRFFPLSGSLIFGKQGTGRDNVDADKVMITNEEEIKTTNPVATESYGQVATNHQSAQAQAQTGWVQNQGILPGMVWQDRDVYLQGPIWAKIPHTDGNFHPSPLMGGFGMKHPPPQILIKNTPVPADPPTAFNKDKLNSFITQYSTGQVSVEIEWELQKENSKRWNPEIQYTSNYYKSNNVEFAVNTEGVYSEPRPIGTRYLTRNL

SEQ ID NO: 715 - protein, 736 aa, Artificial Sequence
  source: /note="Description of Artificial Sequence: Synthetic polypeptide"
MAADGYLPDWLEDNLSEGIREWWALKPGAPQPKANQQHQDNARGLVLPGYKYLGPGNGLDKGEPVNAADAAALEHDKAYDQQLKAGDNPYLKYNHADAEFQERLKEDTSFGGNLGRAVFQAKKRLLEPLGLVEEAAKTAPGKKRPVEQSPQEPDSSAGIGKSGAQPAKKRLNFGQTGDTESVPDPQPIGEPPAAPSGVGSLTMASGGGAPVADNNEGADGVGSSSGNWHCDSQWLGDRVITTSTRTWALPTYNNHLYKQISNSTSGGSSNDNAYFGYSTPWGYFDFNRFHCHFSPRDWQRLINNNWGFRPKRLNFKLFNIQVKEVTDNNGVKTIANNLTSTVQVFTDSDYQLPYVLGSAHEGCLPPFPADVFMIPQYGYLTLNDGSQAVGRSSFYCLEYFPSQMLRTGNNFQFSYEFENVPFHSSYAHSQSLDRLMNPLIDQYLHYLSKTINGSGQNQQTLKFSVAGPSNMAVQGRNYIPGPSYRQQRVSTTVTQNNNSEFAWPGASSWALNGRNSLMNPGPAMASHKEGEDRFFPLSGSLIFGKQGTGRDNVDADKVMITNEEEIKTTNPVATESYGQVATNHQSAQAQAQTGWVQNQGILPGMVWQDRDVYLQGPIWAKIPHTDGNFHPSPLMGGFGMKHPPPQILIKNTPVPADPPTAFNKDKLNSFITQYSTGQVSVEIEWELQKENSKRWNPEIQYTSNYYKSNNVEFAVNTEGVYSEPRPIGTRYLTRNL

SEQ ID NO: 716 - protein, 736 aa, Artificial Sequence
  source: /note="Description of Artificial Sequence: Synthetic polypeptide"
  MOD_RES (442)..(442): Any naturally occurring amino acid
MAADGYLPDWLEDNLSEGIREWWALKPGAPQPKANQQHQDNARGLVLPGYKYLGPGNGLDKGEPVNAADAAALEHDKAYDQQLKAGDNPYLKYNHADAEFQERLKEDTSFGGNLGRAVFQAKKRLLEPLGLVEEAAKTAPGKKRPVEQSPQEPDSSAGIGKSGAQPAKKRLNFGQTGDTESVPDPQPIGEPPAAPSGVGSLTMASGGGAPVADNNEGADGVGSSSGNWHCDSQWLGDRVITTSTRTWALPTYNNHLYKQISTSTSGGSSNDNAYFGYSTPWGYFDFNRFHCHFSPRDWQRLINNNWGFRPKRLNFKLFNIQVKEVTDNNGVKTIANNLTSTVQVFTDSDYQLPYVLGSAHEGCLPPFPADVFMIPQYGYLTLNDGSQAVGRSSFYCLEYFPSQMLRTGNNFQFSYEFENVPFHSSYAHSQSLDRLMNPLIDXYLHYLSKTINGSGQNQQTLKFSVAGPSNMAVQGRNYIPGPSYRQQRVSTTVTQNNNSEFAWPGASSWALNGRNSLMNPGPAMASHKEGEDRFFPLSGSLIFGKQGTGRDNVDADKVMITNEEEIKTTNPVATESYGQVATNHQSAQAQAQTGWVQNQGILPDMVWQDRDVYLQGPIWAKIPHTDGNFHPSPLMGGFGMKHPPPQILIKNTPVPADPPTAFNKDKLNSFITQYSTGQVSVEIEWELQKENSKRWNPEIQYTSNYYKSNNVEFAVNTEGVYSEPRPIGTRYLTRNL

SEQ ID NO: 717 - protein, 736 aa, Artificial Sequence; identical to SEQ ID NO: 697
  source: /note="Description of Artificial Sequence: Synthetic polypeptide"

SEQ ID NO: 718 - protein, 736 aa, Artificial Sequence; identical to SEQ ID NO: 701
  source: /note="Description of Artificial Sequence: Synthetic polypeptide"

SEQ ID NO: 719 - protein, 736 aa, Artificial Sequence
  source: /note="Description of Artificial Sequence: Synthetic polypeptide"
MAADGYLPDWLEDNLSEGIREWWALKPGAPQPRANQQHQDNARGLVLPGYKYLGPGNGLDKGEPVNAADAAALEHDKAYDQQLKAGDNPYLKYNHADAEFQERLKEDTSFGGNLGRAVFQAKKRLLEPLGLVEEAAKTAPGKKRPVEQSPQEPDSSAGIGKSGAQPAKKRLNFGQTGDTESVPDPQPIGEPPAAPSGVGSLTMASGGGAPVADNNEGADGVGSSSGNWHCDSQWLGDRVITTSTRTWALPTYNNHLYKQISNSTSGGSSNDNAYFGYSTPWGYFDFNRFHCHFSPRDWQRLINNNWGFRPKRLNFKLFNIQVKEVTDNNGVKTIANNLTSTVQVFTDSDCQLPYVLGSAHEGCLPPFPADVFMIPQYGYLTLNDGSQAVGRSSFYCLEYFPSQMLRTGNNFQFSYEFENVPFHSSYAHSQSLDRLTNPLIDQYLYYLSKTINGSGQNQQTLKFSVAGPSNMAVQGRNYIPGPSYRQQRVSTTVTQNNNSEFAWPGASSWALNGRNSLMNPGPAMASHKEGEDRFFPLSGSLIFGKQGTGRDNVDADKVMITNEEEIKTTNPVATESHGQVATNHQSAQAQAQTGWVQNQGILPGMVWQDRDVYLQGPIWAKIPHTDGNFHPSPLMGGFGMKHPPPQILIKNTPVPADPPTAFNKDKLNSFITQYSTGQVSVEIEWELQKENSKRWNPEIQYTSNYYKSNNVEFAVNTEGVYSEPRPIGTRYLTRNL

SEQ ID NO: 720 - protein, 736 aa, Artificial Sequence
  source: /note="Description of Artificial Sequence: Synthetic polypeptide"
MAADGYLPDWLEDNLSEGIREWWALKPGAPQPKANQQHQDNARGLVLPGYKYLGPGNGLDKGEPVNAADAAALEHDKAYDQQLKAGDNPYLKYNHADAEFQERLKEDTSFGGNLGRAVFQAKKRLLEPLGLVEEAAKTAPGKKRPVEQSPQEPDSSAGIGKSGAQPAKKRLNFGQTGDTESVPDPQPIGEPPAAPSGVGSLTMASGGGAPVADNNEGADGVGSSSGNWHCDSQWLGDRVITTSTRTWALPTYNNHLYKQISNSTSGGSSNDNAYFGYSTPWGYFDFNRFHCHFSPRDWQRLINNNWGFRPKRLNFKLFNIQVKEVTDNNGVKTIANNLTSTVQVFTDSDYQLPYVLGSAHEGCLPPFPADVFMIPQYGYLTLNDGSQAVGRSSFYCLEYFPSQMLRTGNNFQFSYEFENVPFHSSYAHSQSLDRLMNPPIDQYLYYLSKTINGSGQNQQTLKFSVAGPSNMAVQGRNYIPGPSYRQQRVSTTVTQNNNSEFAWPGASSWALNGRNSLMNPGPAMASHKEGEDRFFPLSGSLIFGKQGTGRDNVDADKVMITNEEEIKTTNPVATESYGQVATNHQSAQAQAQTGWVQNQGILPGMVWQDRDVYLQGPIWAKIPHTDGNFHPSPLMGGFGMKHPPPQILIKNTPVPADPPTAFNKDKLNSFITQYSTGQVSVEIEWELQKENSKRWNPEIQYTSNYYKSNNVEFAVNTEGVYGEPRPIGTRYLTRNL

SEQ ID NO: 721 - protein, 736 aa, Artificial Sequence
  source: /note="Description of Artificial Sequence: Synthetic polypeptide"
MAADGYLPDWLEDNLSEGIREWWALKPGAPQPKANQQHQDNARGLVLPGYKYLGPGNGLDKGEPVNAADAAALEHDKAYDQQLKAGDNPYLKYNHADAEFQERLKEDTSFGGNLGRAVFQAKKRLLEPLGLVEEAAKTAPGKKRPVEQSPQEPDSSAGIGKSGAQPAKKRLNFGQTGDTESVPDPQPIGEPPAAPSGVGSLTMASGGGAPVADNNEGADGVGSSSGNWHCDSQWLGDRVITTSTRTWALPTYNNHLYKQISNSTSGGSSNDNAYFGYSTPWGYFDFNRFHCHFSPRDRQRLINNNWGFRPKRLNFKLFNIQVKEVTDNNGVKTIANNLTSTVQVFTDSDYQLPYVLGSAHEGCLPPFPADVFMIPQYGYLTLNDGSQAVGRSSFYCLEYFPSQMLRTGNNFQFSYEFENVPFHSSYAHSQSLDRLMNPLIDQYLYYLSKTINGSGQNQQTLKFSVAGPSNMAVQGRNYIPGPSYRQQRVSTTVTQNNNSEFAWPGASSWALNGRNSLMNPGPAMASHKEGEDRFFPLSGSLIFGKQGTGRDNVDADKVMITNEEEIKTTNPVATESYGQVATNHQSAQAQAQTGWVQNQGILPGMVWQDRDVYLQGPIWAKIPHTDGNFHPSPLMGGFGMKHPPPQILIKNTPVPADPPTAFNKDKLNSFITQYSTGQVSVEIEWELQKENSKRWNPEIQYTSNYYKSNNVEFAVNTEGVYSEPRPIGTRYLTRNL

SEQ ID NO: 722 - protein, 736 aa, Artificial Sequence
  source: /note="Description of Artificial Sequence: Synthetic polypeptide"
MAADGYLPDWLEDNLSEGIREWWALKPGAPQPKANQQHQDNARGLVLPGYKYLGPGNGLDKGEPVNAADAAALEHDKAYDQQLKAGDNPYLKYNHADAEFQERLKEDTSFGGNLGRAVFQAKKRLLEPLGLVEEAAKTAPGKKRPVEQSPQEPDSSAGIGKSGAQPAKKRLNFGQTGDTESVPDPQPIGEPPAAPSGVGSLTMASGGGAPVADNNEGADGVGSSSGNWHCNSQWLGDRVITTSTRTWALPTYNNHLYKQISNSTSGGSSNDNAYFGYSTPWGYFDFNRFHCHFSPRDWQRLINNNWGFRPKRLNFKLFNIQVKEVTDNNGVKTIANNLTSTVQVFTDSDYQLPYVLGSAHEGCLPPFPADVFMIPQYGYLTLNDGSQAVGRSSFYCLEYFPSQMLRTGNNFQFSYEFENVPFHSSYAHSQSLDRLMNPLIDQYLYYLSKTINGSGQNQQTLKFSVAGPGNMAVQGRNYIPGPSYRQQRVSTTVTQNNNSEFAWPGASSWALNGRNSLMNPGPAMASHKEGEDRFFPLSGSLIFGKQGTGRDNVDADKVMITNEEEIKTTNPVATESYGQVATNHQSAQAQAQTGWVQNQGILPGMVWQDRDVYLQGPIWAKIPHTDGNFHPSPLMGGFGMKHPPPQILIKNTPVPADPPTAFNKDKLNSFITQYSTGQVSVEIEWELQKENSKRWNPEIQYTSNYYKSNNVEFAVNTEGVYSEPRPIGTRYLTRNL

SEQ ID NO: 723 - protein, 736 aa, Artificial Sequence
  source: /note="Description of Artificial Sequence: Synthetic polypeptide"
MAADGYLPDWLEDNLSEGIREWWALKPGAPQPKANQQHQDNARGLVLPGYRYLGPGNGLDKGEPVNAADAAALEHDKAYDQQLKAGDNPYLKYNHADAEFQERLKEDTSFGGNLGRAVFQAKKRLLEPLGLVEEAAKTAPGKKRPVEQSPQEPDSSAGIGKSGAQPAKKRLNFGQTGDTESVPDPQPIGEPPAAPSGVGSLTMASGGGAPVADNNEGADGVGSSSGNWHCDSQWLGDRVITTSTRTWALPTYNNHLYKQISNSTSGGSSNDNAYFGYSTPWGYFDFNRFHCHFSPRDWQRLINNNWGFRPKRLNFKLFNIQVKEVTDNNGVKTVANNLTSTVQVFTDSDYQLPYVLGSAHEGCLPPFPADVFMIPQYGYLTLNDGSQAVGRSSFYCLEYFPSQMLRTGNNFQFSYEFENVPFHSSYAHSQSLDRLMNPLIDQYLYYLSKTINGSGQNQQTLKFSVAGPSNMAVQGRNYIPGPSYRQQRVSTTVTQNNNSEFAWPGASSWALNGRNSLMNPGPAMASHKEGEDRFFPLSGSLIFGKQGTGRDNVDADKVMITNEEEIKTTNPVATESYGQVATNHQSAQAQAQTGWVQNQGILPGMVWQDRDVYLQGPIWAKIPHTDGNFHPSPLMGGFGMKHPPPQILIKNTPVPADPPTAFNKDKLNSFITQYSTGQVSVEIEWELQKENSKRWNPEIQYTSNYYKSNNVEFAVNTEGVYSGPRPIGTRYLTRNL

SEQ ID NO: 724 - protein, 736 aa, Artificial Sequence; identical to SEQ ID NO: 134
  source: /note="Description of Artificial Sequence: Synthetic polypeptide"

SEQ ID NO: 725 - protein, 736 aa, Artificial Sequence
  source: /note="Description of Artificial Sequence: Synthetic polypeptide"
MAADGYLPDWLEDNLSEGIREWWALKPGAPQPKANQQRQDNARGLVLPGYKYLGPGNGLDKGEPVNAADAAALEHDKAYDQQLKAGGNPCLKYNHADAEFQERLKEDTSFGGNLGRAVFQAKKRLLEPLGLVEEAAKTAPGKKRPVEQSPQEPDSSAGIGRSGAQPAKKRLNFGQTGDTESVPDPQPIGEPPAAPSGVGSLTMASGGGAPVADNNEGADGVGSSSGNWHCDSQWLGDRVITTSTRTWALPTYNNHLYKQISNSTSGGSSNDNAYFGYSTPWGYFDFNRFHCHFSPRDWQRLINNNWGFRPKRLNFKLFNIQVKEVTDNNGVKAIANNLTSTVQVFTDSDYQLPYVLGSAHEGCLPPFPADVFMIPQYGYLTLNDGSQAVGRSSFYCLEYFPSQMLRTGNNFQFSYEFENVPFHSSYAHSQSLDRLMNPLIDQYLYYLSKTIDGSGQNQQTLKFSVAGPSNMAVQGRNYIPGPSYRQQRVSTTVTQNNNSEFAWPGASSWALNGRNSLMDPGPAMASHKEGEDRFFPLSGSLIFGKQGTGRDNVDADKVMITNEEEIKTTNPVATESYGQVATNHQSAQAQAQTGWVQNQGILPGMVWQDRDVYLQGPIWAKIPHTGGNFHPSPLMGGFGMKHPPPQILIKNTPVPADPPTAFNKDKLNSFITQYSTGQVSVEIEWELQKENSKRWNPEIQYTSNYYKSNNVEFAVNTEGVYSEPRPIGTRYLTRNL

SEQ ID NO: 726 - protein, 736 aa, Artificial Sequence
  source: /note="Description of Artificial Sequence: Synthetic polypeptide"
MAADGYLPDWLEDNLSEGIREWWALKPGAPQPKANQQHQDNARGLVLPGYKYLGPGNGLDKGEPVNAADAAALEHDKAYDQQLKAGDNPYLKYNHADAEFQERLKEDTSFGGNLGRAVFQAKKRLLEPLGLVEEAAKTAPGKKRPVEQSPQEPDSSAGIGKSGAQPAKKRLNFGQTGDTESVPDPQPIGEPPAAPSGVGSLTMASGGGAPVADNNEGADGVGSSSGNWHCDSQWLGDRVITTSTRTWALPTYNNHLYKQISNSTSGGSSNDNAYFGYSTPWGYFDFNRFHCHFSPRDWQRLINNNWGFRPKRLNFKLFNIQVKEVTDNNGVKTIANNLTSTVQVFTDSDYQLPYVLGSAHEGCLPPFPADVFMIPQYGYLTLNDGSQAVGRSSFYCLEYFPSQMLRTGNNFQFSYEFENVPFHSSYAHSQSLDRLMNPLIDQYLYYLSKTINGSGQNQQTLKFSVAGPSNMAVQGRNYIPGPSYRQQRVSTTVTQNNNSEFAWPGASSWALNGRNSLMNPGPAMASHKEGEDRFFPLSGSLIFGKQGTGRDNVDADKVMITNEEEIKTTNPVATESYGQVATNHQSAQAQAQTGWVQNQGILPGMVWQDRDVYLQGPIWAKIPHTDGNFHPSPLMGGFGMKHPPPQILIKNTPVPADPPTAFNKDKLNSFITQYSTGQVSVEIEWELQKENSKRWNPEIQYTSNYYKPNNVEFAVNTEGVYSEPRPIGTRYLTRNL

SEQ ID NO: 727 - protein, 736 aa, Artificial Sequence
  source: /note="Description of Artificial Sequence: Synthetic polypeptide"
MAADGYLPDWLEDNLSEGIREWWALKPGAPQPKANQQHQDNARGLVLPGYKYLGPGNGLDKGEPVNAADAAALEHNKAYDQQLKAGDNPYLKCNHADAEFQERLKEDTSFGGNLGRAVFQAKKRPLEPLGLVEEAAKTAPGKKRPVEQSPQEPDSSAGIGKSGAQPAKKRLNFGQTGDTESVPDPQPIGEPPAAPSGVRSLTMASGGGAPVADNNEGADGVGSSSGNWHCDSQWLGDRVITTSTRTWALPTYNNHLYKQISNSTSGGSSNDNAYLGYSTPWGYFDFNRFHCHFSPRDWQRLINNNWGFRPKRLNFKLFNIQVKEVTDNNGVKTIANNLTSTVQVFTDSDYQLPYVLGSAHEGCLPPFPADVFMIPQYGYLTLNDGSQAVGRSSFYCLEYFPSQMLRTGNNFQFSYEFENVPFHSSYAHSQSLDRLMNPLIDQYLYYLSKTINGSGQNQQTLKFSVAGPSNMAVQGRNYIPGPSYRQQRVSTTVTQNNNSEFAWPGASSWALNGRNSLMNPGPTMASHKEGEDRFFPLSGSLIFGKQGTGRDNVDADKVMITNEEEIKTTNPVATESYGQVATNHQSAQAQAQTGWVQNQGILPGMVWQDRDVYLQGPIWAKIPHTDGNFHPSPLMGGFGMKHPPPQILIKNTPVPADPPTAFNKDKLNSFITQYSTGQVSVEIEWELQKENSKRWNPEIQYTSNYYKSNNVEFAVNTEGVYSEPRPIGTRYLTRNL

SEQ ID NO: 728 - protein, 736 aa, Artificial Sequence
  source: /note="Description of Artificial Sequence: Synthetic polypeptide"
MAADGYLPDWLEDNLSEGIREWWALKPGAPQPKANQQHQDNARGLVLPGYKYLGPGNGLDKGEPVNAADAAALVHDKAYDQQLKAGDNPYLKCNHADAEFQERLKEDTSFGGNLGRAVFQAKKRLLEPLGLVEEAAKTAPGKKRPVEQSPQEPDSSAGIGKSGAQPAKKRLNFGQTGDTESVPDPQPIGEPPAAPSGVGSLTMASGGGAPVADNNEGADGVGSSSGNWHCDSQWLGDRVITTSTRTWALPTYNNHLYKQISNSTSGGSSNDNAYLGYSTPWGYFDFNRFHCHFSPRDWQRLINNNWGFRPKRLNFKLFNIQVKEVTDNNGVKTIANNLTSTVQVFTDSDYQLPYVLGSAHEGCLPPFPADVFTIPQYGYLTLNDGSQAVGRSSFYCLEYFPSQMLRTGNNFQFSYEFENVPFHSSYAHSQSLDRLMNPLIDQYLYYLSKTINGSGQNQQTLKFSVAGPSNMAVQGRNYIPGPSYRQQRVSTTVTQNNNSEFAWPGASSWALNGRNSLMNPGPAMASHKEGEDRFFPLSGSLIFGKQGTGRDNVDADKVMITNEEEIKTTNPVATESYGQVATNHQSAQAQAQTGWVQNQGILPGMVWQDRDVYLQGPIWAKIPHTDGNFHPSPLMGGFGMKHPPPQILIKNTPVPADPPTAFNKDKLNSFITQYSTGQVSVEIEWELQKENSKRWNPEIQYTSNYYKSNNVEFAVNTEGVYSEPRPIGPRYLTRNF

SEQ ID NO: 729 - protein, 736 aa, Artificial Sequence
  source: /note="Description of Artificial Sequence: Synthetic polypeptide"
MAADGYLPDWLEDNLSEGIREWWALKPGAPQPKANQQHQDNARGLVLPGYKYLGPGNGLDKGEPVNAADAAALEHNKAYDQQLKAGDNPYLKCNHADAEFQERLKEDTSFGGNLGRAVFQAKKRLLEPLGLVEEAAKTAPGKKRPVEQSPQEPDSSAGIGKSGAQPAKKRLNFGQTGDTESVPDPQPIGEPPAAPSGVRSLTMASGGGAPVADNNEGADGVGSSSGNWHCDSQWLGDRVITTSTRTWALPTYNNHLYKQISNSTSGGSSNDNAYLGYSTPWGYFDFNRFHCHFSPRDWQRLINNNWGFRPKRLNFKLFNIQVKEVTDNNGVKTIANNLTSTVQVFTDSDYQLPYVLGSAHEGCLPPFPADVFMIPQYGYLTLNDGSQAVGRSSFYCLEYFPSQMLRTGNNFQFSYEFENVPFHSSYAHSQSLDRLMNPLIDQYLYYLSKTINGSGQNQQTLKFSVAGPSNMAVQGRNYIPGPSYRQQRVSTTVTQNNNSEFAWPGASSWALNGRNSLMNPGPAMASHKEGEDRFFPLSGSLIFGKQGTGRDNVDADKVMITNEEEIKTTNPVATESYGQVATNHQSAQAQAQTGWVQNQGILPGMVWQDRDVYLQGPIWAKIPHTDGNFHPSPLMGGFGMKHPPPQILIKNTPVPADPPTAFNKDKLNSFITQYSTGQVSVEIEWELQKENSKRWNPEIQYTSNYYKSNNVEFAVNTEGVYSEPRPIGTRYLTRNL

SEQ ID NO: 730 - protein, 736 aa, Artificial Sequence
  source: /note="Description of Artificial Sequence: Synthetic polypeptide"
MAADGYLPDWLEDNLSEGIREWWALKPGAPQPKANQQHQDNARGLVLPGYKYLGPGNGLDKGEPVNAADAAALEHDKAYDQQLKAGDNPYLKCNHADAEFQERLKEDTSFGGNLGRAVFQAKKRLLEPLGLVEEAAKTAPGKKRPVEQSPQEPDSSAGIGKSGAQPAKKRLNFGQTGDTESVPDPQPIGEPPAAPSGVGSLTMASGGGAPVADNNEGADGVGSSSGNWHCDSQWLGDRVITTSTRTWALPTYNNHLYKQISNSTSGGSSNDNAYLGYSTPWGYFDFNRFHCHFSPRDWQRLINNNWGFRPKRLNFELFNIQVKEVTDNNGVKTIANNLTSTVQVFTDSDYQLPYVLGSAHEGCLPPFPADVFMIPQYGYLTLNDGSQAVGRSSFYCLEYFPSQMLRTGNNFQSSYEFENVPFHSSYAHSQSLDRLMNPLIDQYLYYLSKTINGSGQNQQTLKFSVAGPSNMAVQGRNYIPGPSYRQQRASTTVTQNNNSEFAWPGASSWALNGRNSLMNPGPAMASHKEGEDRFFPLSGSLIFGKQGTGRDNVDADKVMITNEEEIKTTNPVATESYGQVATNHQSAQAQAQTGWVQNQGILPGMVWQDRDVYLQGPIWAKIPHTDGNFHPSPLMGGFGMKHPPPQILIKNTPVPADPPTAFNKDKLNSFITQYSTGQVSVEIEWELQKENSKRWNPEIQYTSNYYKSNNVEFAVNTEGVYSEPRPIGTRYLTRNL

SEQ ID NO: 731 - protein, 736 aa, Artificial Sequence
  source: /note="Description of Artificial Sequence: Synthetic polypeptide"
MAADGYLPDWLEDNLSEGIREWWALKPGAPQPKANQQHQDNARGLVLPGYKYLGPGNGLDKGEPVNAADAAALEHDKAYDQQLKAGDNPYLKCNHADAEFQERLKEDTSFGGNLGRAVFQAKKRLLEPLGLVEEAAKTAPGKKRPVEQSPQEPDSSAGIGKSGAQPAKKRLNFGQTGDTESVPDPQPIGEPPAAPPGVGSLTMASGGGAPVADNNEGADGVGSSSGNWHCDSQWLGDRVITTSTRTWALPTYNNHLYKQISNSTSGGSSNDNAYLGYSTPWGYFDFNRFHCHFSPRDWQRLINNNWGFRPKRLNFKLFNIQVKEVTDNNGVKTIANNLTSTVQVFTDSDYQLPYVLGSAHEGCLPPFPADVFMIPQYGYLTLNDGSQAVGRSSFYCLEYFPSQMLRTGNNFQFSYEFENVPFHSSYAHSQSLDRLMNPLIDQYLYYLSKTISGSGQNQQTLKFSVAGPSNMAVQGRNYIPGPSYRQQRVSTTVTQNNSSEFAWPGASSWALNGRNSLMNPGPAMASHKEGEDRFFPLSGSLIFGKQGTGRDNVDADKVMITNEEEIKTTNPVATESYGQVATNHQSAQAQAQTGWVQNQGILSGMVWQDRDVYLQGPIWAKIPHTDGNFHPSPLMGGFGMKHPPPQILIKNTPVPADPPTAFNKDKLNSFITQYSTGQVSVEIEWELQKENSKRWNPEIQYTSNYYKSNNVEFAVNTEGVYSEPRPIGTRYLTRNL

SEQ ID NO: 732 - protein, 736 aa, Artificial Sequence
  source: /note="Description of Artificial Sequence: Synthetic polypeptide"
MAADGYLPDWLEDNLSEGIREWWALKPGAPQPKANQQHQDNARGLVLPGYKYLGPGNGLDKGEPVNAADAAALEHDKAYDQQLKAGDNPYLKCNHADAEFQERLKEDTSFGGNLGRAVFQAKKRLLEPLGLVEEAAKTAPGKKRPVEQSPQEPDSSAGIGKSGAQPAKKRLNFGQTGDTESVPDPQPIGEPPAAPSGVGSLTMASGGGAPVADNNEGADGVGSSSGNWHCDSQWLGDRVITTSTRTWALPTYNNHLYKQISNSTSGGSSNDNAYLGYSTPWGYFDFNRFHCHFSPRDWQRLINNNWGFRPKRLNFKLFNIQVKEVTDNNGVKTIANNLTSTVQVFTDSDYQLPYVLGSAHEGCLPPFPADVFMIPQYGYLTLNDGSQAVGRSSFYCLEYFPSQMLRTGNNFQFSYEFENVPFHSSYAHSQSLDRLMNPLIDQYLYYLSKTINGSGQNQQTLKFSVAGPSNMAVQGRNYIPGPSYRQQRVSTTVTQNNNSEFAWPGASSWALNGRNSLMNPGPAMASHKEGEDRFFPLSGSLIFGKQGTGRDNVDADKVMITNEEEIKTTNPVATESYGQVATNHQSAQAQAQTGWVQNQGILPGMVWQDRDVYLQGPIWAKIPHTDGNFHPSPLMGGFGMKHPPPQILIKNTPVPADPPTAFNKDKLNSFITQYSTGQVSVEIEWELQKENSKRWNPEIQYTSNYYKSNNVEFAVNTEGVYSEPRPIGTRYLTRNL

SEQ ID NO: 733 - protein, 736 aa, Artificial Sequence; identical to SEQ ID NO: 732
  source: /note="Description of Artificial Sequence: Synthetic polypeptide"

SEQ ID NO: 734 - protein, 736 aa, Artificial Sequence
  source: /note="Description of Artificial Sequence: Synthetic polypeptide"
MAADGYLPDWLEDNLSEGIREWWALKPGAPQPKANQQHQDNARGLVLPGYKYLGPGNGLDKGEPVNAADAAALEHDKAYDQQLKAGDNPYLKCNHADAEFQERLKEDTSFGGNLGRAVFQAKKRLLEPLGLVEEAAKTAPGKKRPVEQSPQEPDSSAGIGKSGAQPAKKRLNFGQTGDTESVPDPQPIGEPPAAPSGVGSLTMASGGGAPVADNNEGADGVGSSSGNWHCDSQWLGDRVITTSTRTWALPTYNNHLYKQISNSTSGGSSNDNAYLDYSTPWGYFDFNRFHCHFSPRDWQRLINNNWGFRPKRLNFKLFNIQVKEVTDNNGVKTIANNLTSTVQVFTDSDYQLPYVLGSAHEGCLPPFPADVFMIPQYGYLTLNDGSQAVGRSSFYCLEYFPSQMLRTGNNFQFSYEFENVPFHSSYAHSQSLDRLMNPLIDQYLYYLSKTINGSGQNQQTLKFSVAGPSNMAVQGRNYIPGPSYRQQRVSTTVTQNNNSEFAWPGASSWALNGRNSLMNPGPAMASHKEGEDRFFPLSGSLIFGKQGTGRDNVDADKVMITNEEEIKTTNPVATESYGQVATNHQSAQAQAQTGWVQNQGILPGMVWQGRDVYLQGPIWAKIPHTDGNFHPSPLMGGFGMKHPPPQILIKNTPVPADPPTAFNKDKLNSFITQYSTGQVSVEIEWELQKENSKRWNPEIQYTSNYYKSNNVEFAVNTEGVYSEPRPIGTRYLTRNL

SEQ ID NO: 735 - protein, 736 aa, Artificial Sequence; identical to SEQ ID NO: 732
  source: /note="Description of Artificial Sequence: Synthetic polypeptide"

SEQ ID NO: 736 - protein, 736 aa, Artificial Sequence
  source: /note="Description of Artificial Sequence: Synthetic polypeptide"
MAADGYPPDWLEDNLSEGIREWWALKPGAPQPKANQQHQDNARGLVLPGYKYLGPGNGLDKGEPVNAADAAALEHDKAYDQQLKAGDNPHLKYNHADAEFQERLKEDTSFGGNLGRAVFQAKKRLLEPLGLVEEAAKTAPGKKRPVEQSPQEPDSSAGIGKSGAQPAKKRLNFGQTGDTESVPDPQPIGEPPAAPSGVGSLTMASGGGAPVADNNEGADGVGSSSGNWHCDSQWLGDRVITTSTRTWALPTYNNHLYKQISNSTSGGSSNDNAYFGYSTPWGYFDFNRFHCHFSPRDWQRLINNNWGFRPKRLNFKLFNIQVKEVTDNNGVKTIANNLTSTVQVFTDSDYQLPYVLGSAHEGCLPPFPADVFMIPQYGYLTLNDGSQAVGRSSFYCLEYFPSQMLRTGNNFQFSYEFENVPFHSSYAHSQSLDRLMNPLIDQYLYYLSKTINGSGQNQQTLKFSVAGPSNMAVQGRNYIPGPSYRQQRVSTTVTQNNNSEFAWPGASSWALNGRNSLMNPGPAMASHKEGEDRFFPLSGSLIFGKQGTGRDNVDADKVMITNEEEIKTTNPVATESYGQVATNHQSAQAQAQTGWVQNQGILPGMVWQDRDVYLQGPIWAKIPHTDGNFHPSPLMGGFGVKHPPPQILIKNTPVPADPPTAFNKDRLNSFITQYSTGQVSVEIEWELQKENSKRWNPEIQYTSNYYKSNNVEFAVNTEGVYSEPRPIGTRYLTRNL

SEQ ID NO: 737 - protein, 736 aa, Artificial Sequence
  source: /note="Description of Artificial Sequence: Synthetic polypeptide"
MAADGYLPDWLEDNLSEGIREWWALKPGAPQPKANQQHQDNARGLVLPGYKYLGPGNGLDKGEPVNAADAAALEHDKAYDQQLKAGDNPYLKYNHADAEFQERLKEDTSFGGNLGRAVFQAKKRLLEPLGLVEEAAKTAPGKKRPVEQSPQEPDSSAGIGKSGAQPAKKRLNFGQTGDTESVPDPQPIGEPPAAPSGVGSLTMASGGGAPVADNNEGADGVGSSSGNWHCDSQWLGDRVITTSTRTWALPTYNNHLYKQISNSTSGGSSNDNAYFGYSTPWGYFDFNRFHCHFSPRDWQRLINNNWGFRPKRLNFKLFNIQVKEVTDNNGVKTIANNLTSTVQVFTDSDYQLPYVLGSAHEGCLPPFPADVFMIPQYGYLTLNDGSQAVGRSSFYCLEYFPSQMLRTGNNFQFSYEFENVPFHSSYAHSQSLDRLMNPLIDQYLYYLSKTINGSGQNQQTLKFSVAGPSNMAVQGRNYIPGPSYRQQRVSTTVTQNNNSEFAWPGASSWALNGRNSLMNPGPAMASHKEGEDRFFPLSGSLIFGKQGTGRDNVDADKVMITNEEEIKTTNPVATESYGQVATNHQSAQAQAQTGWVQNQGILPGMVWQDRDVYLQGPIWAKIPHTDGNFHPSPLMGGFGVKHPPPQILIKNTPVPADPPTAFNKDKLNSFITQYSTGQVSVEIEWELQKENSKRWNPEIQYTSNYYKSNNVEFAVNTEGVYSEPRPIGTRYLTRNL

SEQ ID NO: 738 - protein, 736 aa, Artificial Sequence
  source: /note="Description of Artificial Sequence: Synthetic polypeptide"
MAADGYLPDWLEDNLSEGIREWWALKPGAPQPKANQQHQDNARGLVLPGYKYLGPGNGLDKGEPVNAADAAALEHDKAYDQQLKAGDNPYLKYNHADAEFQERLKEDTSFGGNLGRAVFQAKKRLLEPLGLVEEAAKTAPGKKRPVEQSPQEPDSSAGIGKSGAQPAKKRLNFGQTGDTESVPDPQPIGEPPAAPSGVGSLTMASGGGAPVADNNEGADGVGSSSGNWHCDSQWLGDRVITTSTRTWALPTYNNHLYKQISNSTSGGSSNDNAYFGYSTPWGYFDFNRFHCHFSPRDWQRLTNNNWGFRPKRLNFKLFNIQVKEVTDNNGVKTIANNLTSTVQVFTDSDYQLPYVLGSAHEGCLPPFPADVFMIPQYGYLTLNDGSQAVGRSSFYCLEYIPSQMLRTGNNFQFSYEFENVPFHSSYAHSQSLDRLMNPLIDQYLYYLSKTINGSGQNQQTLKFSVAGPSNMAVQGRNYIPGPSYRQQRVSTTVTQNNNSEFAWPGASSWALNGRNSLMNPGPAMASHKEGEDRFFPLSGSLIFGKQGTGRDNVDADKVMITNEEEIKTTNPVATESYGQVATNHQSAQAQAQTGWVQNQGILPGMVWQDRDVYLQGPIWAKIPHTDGNFHPSPLMGGFGVKHPPPQILIKNTPVPADPPTAFNKDKLNSFITQYSTGQVSVEIEWELQKENSKRWNPEIQYTSNYYKSNNVEFAVNTEGVYSEPRPIGTRYLTRNL

SEQ ID NO: 739 - protein, 736 aa, Artificial Sequence
  source: /note="Description of Artificial Sequence: Synthetic polypeptide"
MAADGYLPDWLEDNLSEGIREWWALKPGAPQPKANQQHQDNARGLVLPGYKYLGPGNGLDKGEPVNAADAAALEHDKAYDQQLKAGDNPYLKYNHADAEFQERLKEDTSFGGNLGRAVFQAKKRLLEPLGLVEEAAKTAPGKKRPVEQSPQEPDSSAGIGKSGAQPAKKRLNFGQTGDTESVPDPQPIGEPPAAPSGVGSLTMASGGGAPVADNNEGADGVGSSSGNWHCDSQWLGDRVITTSTRTWALPTYNNHLYKQISNSTSGGSSNDNAYFGYSTPWGYFDFNRFHCHFSPRDWQRLINNNWGFRPKRLNFKLFNIQVKEVTDNNGVKTIANNLTSTVQVFTDSDYQLPYVLGSAHEGCLPPFPADVFMIPQYGYLTLNDGSQAVGRSSFYCLEYFPSQMLRTGNNFQFSYEFENVPFHSSYAHSQSLDRLMNPLIDQYLYYLSKTINGSGQNQQTLKFSVAGPSNMAVQGRNYIPGPSYRQQRVSTTVTQNNNSEFAWPGASSWALNGRNSLMNPGPAMASHKEGEDRFFPLSGSLISGKQGTGRDNVDANKVMITNEEEIKTTNPVATESYGQVATNHQSAQAQAQTGWVQNQGILPGMVWQDRDVYLQGPIWAKIPHTDGNFHPSPLMGGFEMKHPPPQILIKNTPVPADPPTAFNKDKLNSFITQYSTGQVSVEIEWELQKENSKRWNPEIQYTSNYYKSNNVEFAVNTEGVYSEPRPIGTRYLTRNL

SEQ ID NO: 740 - protein, 736 aa, Artificial Sequence
  source: /note="Description of Artificial Sequence: Synthetic polypeptide"
MAADGYLPDWLEDNLSEGIREWWALKPGAPQPKANQQHQDNARGLVLPGYKYLGPGNGLDKGEPVNAADAAALEHDKAYDQQLKAGDNPYLKYNHADAEFQERLKEDTSFGGNLGRAVFQAKKRLLEPLGLVEEAAKTAPGKKRPVEQSPQEPDSSAGIGKSGAQPAKKRLNFGQTGDTESVPDPQPIGEPPAAPSGVGSLTIASGGGAPVADNNEGADGVGSSSGNWHCDSQWLGDRVITTSTRTWALPTYNNHLYKRISNSTSGGSSNDNAYFGYSTPWGYFDFNRFHCHFSPRDWQRLINNNWGFRPKRLNFKLFNIRVKEVTDNNGVKTITNNLTSTVQVFTDSDYQLPYVLGSAHEGCLPPFPADVFMIPQYGYLTLNDGSQAVGRSSFYCLEYFPSQMLRTGNNFQFSYEFENVPFHSSYAHSQSLDRLMNPLIDQYLYYLSKTINGSGQNQQTLKFSVAGPSNMAVQGRNYIPGPSYRQQRVSTTVTRNNNSEFAWPGASSWALNGRNSLMNPGPAMASHKEGEDRFFPLSGSLIFGKQGTGRDNVDADKVMITNEEEIKTTNPVATESYGQVATNHQSAQAQAQTGWVQNQGILPGMVWQDRDVYLQGPIWAKIPHTDGNFHPSPLMGGFGVKHPPPQILIKNTPVPADPPTAFNKDKLNSFITQYSTGQVSVEIEWELQKENSKRWNPEIQYTSNYYKSNNVEFAVNTEGVYSEPRPIGTRYLTRNL

SEQ ID NO: 741 - protein, 736 aa, Artificial Sequence
  source: /note="Description of Artificial Sequence: Synthetic polypeptide"
MAADGYLPDWLEDNLSEGIREWWALKPGAPQPKANQQHQDNARGLVLPGYKYLGPGNGLDKGEPVNAADAAALEHDKAYDQQLKAGDNPYLKYNHADAEFQERLKEDTSFGGNLGRAVFQAKKRLLEPLGLVEEAAKTAPGKKRPVEQSPQEPDSSAGIGKSGAQPAKKRLNFGQTGDTEPVPDPQPIGEPPAAPSGVGSLTMASGGGAPVADNNEGADGVGSSSGNWHCDSQWLGDRVITTSTRTWALPTYNNHLYKQISNSTSGGSSNDNAYFGYSTPWGYFDFNRFHCHFSPRDWQRLINNNWGFRPKRLNFKLFNIQVKEVTDNNGVKTIANNLTSTVQVFTDSDYQLPYVLGSAHEGCLPPFPAGVFMIPQYGYLTLNDGSQAVGRSSFYCLEYFPSQMLRTGNNFQFSYEFENVPFHSSYAHSQSLDRLMNPLIDQYLYYLSKTINGSGQNQQTLKFSVAGPSNMAVQGRNYIPGPSYRQQRVSTTATQNNNSEFAWPGASSWALNGRNSLMNPGPAMASHKEGEDRFFPLSGSLIFGKQGTGRDNVDADKVMITNEEEIKTTNPVATESYGQVATNHQSAQAQAQTGWVQNQGILPGMVWQDRDVYLQGPIWAKIPHTDGNFHPSPLMGGFGMKHPPPQILIKNTPVPADPPTAFNKDKLNSFITQYSTGQVSVEIEWELQKENSKRWNPEIQYTSNYYKSNNVEFAVNTEGVYSEPRPIGTRYLTRNL

SEQ ID NO: 742 - protein, 736 aa, Artificial Sequence
  source: /note="Description of Artificial Sequence: Synthetic polypeptide"
MAADGYLPDWLEDNLSEGIREWWALKPGAPQPKANQQHQDNARGLVLPGYKYLGPGNGLDKGEPVNAADAAALEHDKAYDQQLKAGDNPYLKYNHADAGFQERLKEDTSFGGNLGRAVFQAKKRLLEPLGLVEEAAKTAPGKKRPVEQSPQEPDSSAGIGKSGAQPAKKRLNFGQTGDTESVPVPQPIGEPPAAPSGVGSLTMASGGGAPVADNNEGADGVGSSSGNWHCDSQWLGDRVITTSTRTWALPTYNNHLYKQISNSTSGGSSNDNAYFGYSTPWGYFDFNRFHCHFSPRDWQRLINNNWGFRPKRLNFKLFNIQVKEVTDNNGVKTIANNLTSTVQVFTDSDYQLPYVLGSAHEGCLPPFPADVFMIPQYGYLTLNDGSQAVGRSSFYCLEYFPSQMLRTGNNFQFSYEFENVPFHSSYAHSQSLDRLMNPLIDQYLYYLSKTINGSGQNQQTLKFSVAGPSNMAVQGRNYIPGPSYRQQRVSTTVTQNNNSEFAWPGASSWALNGRNSLMNPGPAMASHKEGEDRFFPLSGSLIFGKQGAGRDNVDADKVMITNEEEIKTTNPVATESYGQVATNHQSAQAQAQTGWVQNQGILPGMVWQDRDVYLQGPIWAKIPHTDGNFHPSPLMGGFGMKHPPPQILIKNTPVPADPPTAFNKDKLNSFITQYSTGQVSVEIEWELQKENSKRWNPEIQYTSNYYKSNNVEFAVNTEGVYSEPRPIGTRYLTRNL

SEQ ID NO: 743 - protein, 736 aa, Artificial Sequence
  source: /note="Description of Artificial Sequence: Synthetic polypeptide"
  MOD_RES (126)..(126): Any naturally occurring amino acid
MAADGYLPDWLEDNLSEGIRERWALKPGAPQPKANQQHQDNARGLVLPGYKYLGPGNGLDKGEPVNAADAAALEHDKAYDQQLKAGDNPYLKYNHADAEFQERLKEDTSFGGNLGRAVFQAKKRLXEPLGLVEEAAKTAPGKKRPVEQSPQEPDSSAGIGKSGAQPAKKRLNFGQTGDTESVPDPQPIGEPPAAPSGVGSLTMASGGGAPVADNNEGADGVGSSSGNWHCDSQWLGDRVITTSTRTWALPTYNNHLYKQISNSTSGGSSNDNAYFGYSTPWGYFDFNRFHCHFSPRDWQRLINNNWGFRPKRLNFKLFNIQVKEVTDNNGVKTIANNLTSTVQVFTDSDYQLPYVLGSAHEGCLPPFPADVFMIPQYGYLTLNDGSQAVGRSSFYCLEYFPSQMLRTGNNFQFSYEFENVPFHSSYAHSQSPDRLMNPLIDQYLYYLSKTINGSGQNQQTLKFSVAGPSNMAVQGRNYIPGPSYRQQRVSTTVTQNNNSEFAWPGASSWALNGRNSLMNPGPAMASHKEGEDRFFPLSGSLIFGKQGTGRDNVDADKVMITNEEEIKTTNPVATESYGQVATNHQSAQAQAQTGWVQNQGILPGMVWQDRDVYLQGPIWAKIPHTDGNFHPSPLMGGFGVKHPPPQILIKNTPVPADPPTAFNKDKLNSFITQYSTGQVSVEIEWELQKENSKRWNPEIQYTSNYYKSNNVEFAVNTEGVYSEPRPIGTRYLTRNL

SEQ ID NO: 744 - protein, 736 aa, Artificial Sequence
  source: /note="Description of Artificial Sequence: Synthetic polypeptide"
MAADGYLPDWLEDNLSEGIREWWALKPGAPQPKANQQHQDNARGLVLPGYKYLGPGNGLDKGEPVNAADAAALEHDKAYDQQLKAGDNPYLKYNHADAEFQERLKEDTSFGGNLGRAVFQAKKRLLEPLGLVEEAAKTAPGKKRPVEQSPQEPDSSAGIGKSGAQPAKKRLNFGQTGDTESVPDPQPIGEPPAAPSGVGSLTMASGGGAPVADNNEGADGVGSSSGNWHCDSQWLGDRVITTSTRTWALPTYNNHLYKQISNSTSGGSSNDNAYLGYSTPWGYFDFNRFHCHFSPRDWQRLINNNWGFRPKRLNFKLFNIQVKEVTDNNGVKTIANNLTSTVQVFTDSDYQLPYVLGSAHEGCLPPFPADVFMIPQYGYLTLNDGSQAVGRSSFYCLEYFPSQMLRTGNNFQFSYEFENVPFHSSYAHSQSLDRLMNPLIDQYLYYLSKTINGSGQNQQTLKFSVAGPSNMAVQGRNYIPGPSYRQQRVSTTVTQNNNSEFAWPGASSWALNGRNSLMNPGPAMASHKEGEDRFFPLSGSLIFGKQGTGRDNVDADKVMITNEEEIKTTNPVATESYGQVATNHQSAQAQAQTGWVQNQGILPGMVWQDRDVYLQGPIWAKIPHTDGNFHPSPLMGGFGMKHPPPQILIKNTPVPADPPTAFNKDKLNSFITQYSTGQVSVEIEWELQKENSKRWNPEIQYTSNYYKSNNVEFAVNTEGVYSEPRPIGTRYLTRNL

SEQ ID NO: 745 - protein, 736 aa, Artificial Sequence
  source: /note="Description of Artificial Sequence: Synthetic polypeptide"
MAADGYLPDWLEDNLSEGIREWWALKPGAPQPKANQQHQDNARGLVLPGYKYLGPGNGLDKGEPVNAADAAALEHDKAYDQQLKAGDNPYLKYNHADAEFQERLKEDTSFGGNLGRAVFQAKKRLLEPLGLVEEAAKTAPGKKRPVEQSPQEPDSSAGIGKSGAQPAKKRLNFGQTGDTESVPDPQPIGEPPAAPSGVGSLTMASGGGAPVADNNEGADGVGSSSGNWHCDSQWLGDRVITTSTRTWALPTYNNHLYKQISNSTSGGSSNDNAYFGYSTPWGYFDFNRFHCHFSPRDWQRLINNNWGFRPKRLNFKLFNIQVKEVTDNNGVKTIANNLTSTVQVFTDSDYQLPYVLGSAHEGCLPPFPADVFMIPQYGYLTLNDGSQAVGRSSFYCLEYFPSQMLRTGNNFQFSYEFENVPFHSSYAHSQSLDRLMNPLIDQYLYYLSKTINGSGQNQQTLKFSVAGPSNMAVQGRNYIPGPSYRQQRVSTTVTQNNNSEFAWPGASSWALNGRNSLMNPGPAMASHKEGEDRFFPLSGSLIFGKQGTGRDNVDADKVMITNEEEIKTTNPVATESYGQVATNHQSAQAQAQTGWVQNQGILPGMVWQDRDVYLQGPIWAKIPHTDGNFHPSPLMGGFGMKHPPPQILIKNTPVPADPPTAFNKDKLDSFITQYSTGQVSVEIEWELQKENSKRWNPVIQYTSNYYKSNNVEFAVNTEGVYSEPRPIGTRYLTRNL

SEQ ID NO: 746 - protein, 736 aa, Artificial Sequence
  source: /note="Description of Artificial Sequence: Synthetic polypeptide"
MAADGYLPDWLEDNLSEGIREWWDLKPGAPKPKANQQKQDDGRGLVLPGYKYLGPFNGLDKGEPVNAADAAALEHDKAYDQQLKAGDNPYLRYNHADAEFQERLQEDTSFGGNLGRAVFQAKKRVLEPLGLVEEGAKTAPGKKRPVEQSPQEPDSSSGIGKTGQQPAKKRLNFGQTGDSESVPDPQPLGEPPATPAAVGPTTMASGGGAPMADNNEGVDGVGNASGNWHCDSTWLGDRVITTSTRTWALPTYNNHLYKQISSASTGASNDNHYFGYSTPWGYFDFNRFHCHFSPRDWQRLINNNWGFRPKRLNFKLFNIQVKEVTTNDGVTTIANNLTSTVQVFSDSEYQLPYVLGSAHQGCLPPFPADVFMIPQYGYLTLNNGSQAVGRSSFYCLEYFPSQMLRTGNNFTFSYTFEEVPFHSSYAHSQSLDRLMNPLIDQYLYYLNRTQNQSGSAQNKDLLFSRGSPAGMSVQPKNWLPGPCYRQQRVSKTKTDNNNSNFTWTGASKYNLNGRESIINPGTAMASHKDDEDKFFPMSGVMIFGKESAGASNTALDNVMITDEEEIKATNPVATERFGTVAVNFQSSSTDPATGDVHAMGALPGMVWQDRDVYLQGPIWAKIPHTDGHFHPSPLMGGFGLKNPPPQILIKNTPVPANPPAEFSATKLASFITQYSTGQVSVEIEWELQKENSKRWNPEVQYTSNYAKSANVDFTVDNNGLYTEPRPIGTRYLTRPL

SEQ ID NO: 747 - protein, 736 aa, Artificial Sequence
  source: /note="Description of Artificial Sequence: Synthetic polypeptide"
MAADGYLPDWLEDNLSEGIREWWDLKPGAPKPKANQQKQDDGRGLVLPGYKYLGPFNGLDKGEPVNAADAAALEHDKAYDQQLKAGDNPYLRYNHADAEFQERLQEDTSFGGNLGRAVFQAKKRVLEPLGLVEEGAKTAPGKRRPVEQSPQEPDSSSGIGKTGQQPAKKRLNFGQTGDSESVPDPQPLGEPPATPAAVGPTTMASGGGAPMADNNEGADGVGNASGNWHCDSTWLGDRVITTSTRTWALPTYNNHLYKQISSASTGASNDNHYFGYSTPWGYFDFNRFHCHFSPRDWQRLINNNWGFRPKRLNFKLFNIQVKEVTTNDGVTTIANNLTSTVQVFSDSEYQLPYVLGSAHQGCLPPFPADVFMIPQYGYLTLNNGSQAVGRSSFYCLEYFPSQMLRTGNNFTFSYTFEEVPFHSSYAHSQSLDRLMNPLIDQYLYYLNRTQNQSGSAQNKDLLFSRGSPAGMSVQPKNWLPGPCYRQQRVSKTKTDNNNSNFTWTGASKYNLNGRESIINPGTAMASHKDDEDKFFPMSGVMIFGKESAGASNTALDNVMITDEEEIKATNPVATERFGTVAVNFQSSSTDPATGDVHAMGALPGMVWQDRDVYLQGPIWAKIPHTDGHFHPSPLMGGFGLKNPPPQILIKNTPVPANPPAEFSATKFASFITQYSTGQVSVEIEWELQKENSKRWNPEVQYTSNYAKSANVDFTVDNNGLYTEPRPIGTRYLTRPL

SEQ ID NO: 748 - protein, 736 aa, Artificial Sequence
  source: /note="Description of Artificial Sequence: Synthetic polypeptide"
MAADGYLPDWLEDNLSEGIREWWDLKPGAPKPKANQQKQDDGRGLVLPGYKYLGPFNGLDKGEPVNAADAAALEHDKAYDQQLKAGDNPYPRYNHADAEFQERLQEDTSFGGNLGRAVFQAKKRVLEPLGLVGEGAKTAPGKKRPVEQSPQEPDSSSGIGKTGQQPAKKRLNFGQTGDSESVPDPQPLGEPPATPAAVGPTTMASGGGAPMADNNEGADGVGNASGNWHCDSTWLGDRVITTSTRTWALPTYNNHLYKQISSASTGASNDNHYFGYSTPWGYFDFNRFHCHFSPRDWQRLINNNWGFRPKRLNFKLFNIQVKEVTTNDGVTTIANNLTSTVQVFSDSEYQLPYVLGSAHQGCLPPFPADVFMIPQYGYLTLNNGSQAVGRSSFYCLEYFPSQMLRTGNNFTFSYTFEEVPFHSSYAHSQSLDRLMNPPIDQYLYYLNRTQNQSGSAQNKDLLFSRGSPAGMSVQPKNWLPGPCYRQQRVSKTKTDNNNSNFTWTGASKYNLNGRESIINPGTAMASHKDDEDKFFPMSGVMIFGKESAGASNTALDNVMITDEEEIKATNPVATERFGTVAVNFQSSSTDPATGDVHAMGALPGMVWQDRDVYLQGPIWAKIPHTDGHFHPSPLMGGFGLKNPPPQILIKNTPVPANPPAEFSATKFASFITQYSTGQVSVEIEWELQKENSKRWNPEVQYTSNYAKSANVDFTVDNNGLYTEPRPIGTRYLTRPL

SEQ ID NO: 749 - protein, 736 aa, Artificial Sequence
  source: /note="Description of Artificial Sequence: Synthetic polypeptide"
MAADGYLPDWLEDNLSEGIREWWDLKPGAPKPKANQQKQDDGRGLVLPGYKYLGPFNGLDKGEPVNAADAAALEHDKAYDQQLKAGDNPYLRYNHADAEFQERLQEDTSFGGNLGRAVFQAKKRVLEPLGLVEEGAKTAPGKKRPVEQSPQEPDSSSGIGKTGQQPAKKRLNFGQTGDSESVPDPRPLGEPPATPAAVGPTTMASGGGAPMADNNEGADGVGNASGNWHCDSTWLGDRVITTSTRTWALPTYNNHLYKQISSASTGASNDNHYFGYSTPWGYFDFNRFHCHFSPRDWQRLINNNWGFRPKRLNFKLFNIQVKEVTTNDGVTTIANNLTSTVQVFSDSEYQLPYVLGSAHQGCLPPFPADVFMIPQYGYLTLNNGSQAVGRSSFYCLEYFPSQMLRTGNNFTFSYTFEEVPFHSSYAHSQSLDRLMNPLIDQYLYYLNRTQNQSGSAQNKDLLFSRGPPAGMSVQPKNWLPGPCYRQQRVSKTKTDNNNSNFTWTGASKYNLNGRESIINPGTAMASHKDDEDKFFPMSGVMIFGKESAGASNTALDNVMITDEEEIKATNPVATERFGTVAVNFQSSSTDPATGDVHAMGALPGMVWQDRDVYLQGPIWAKIPHTDGHFHPSPLMGGFGLKNPPPQILIKNTPVPANPPAEFSATKFASFITQYSTGQVSVEIEWELQKENSKRWNPEVQYTSNYAKSANVDFTVDNNGLYTEPRPIGTRYLTRPL

SEQ ID NO: 750 - protein, 736 aa, Artificial Sequence
  source: /note="Description of Artificial Sequence: Synthetic polypeptide"
MAADGYLPDWLEDNLSEGIREWWDLKPGAPKPKANQQKQDDGRGLVLPGYKYLGPFNGLDKGEPVNAADAAALEHDKAYDQQLKAGDNPYLRYNHADAEFQERLQEDTSFGGNLGRAVFQAKKRVLEPLGLVEEGAKTAPGKKRPVEQSPQEPDSSSGIGKTGQQPAKKRLNFGQTGGSESVPDPQPLGEPPATPAAVGPTTMASGGGAPMADNNEGADGVGNASGNWHCDSTWLGDRVITTSTRTWALPTYNNHLYKQISSASTGASNDNHYFGYSTPWGYFDFNRFHCHFSPRDWQRLINNNWGFRPKRLNFKLFNIQVKEVTTNDGVTTIANNLTSTVQVFSDSEYQLPYVLGSAHQGCLPPFPADVFMIPQYGYLTLNNGSQAVGRSSFYCLEYFPSQMLRTGNNFTFSYTFEEVPFHSSYAHSQSLDRLMNPPIDQYLYYLNRTQNQSGSAQNKDLLFSRGSPAGMSVQPKNWLPGPCYRQQRVSKTKTDNNNSNFTWTGASKYNLNGRESIINPGTAMASHKDDEDKFFPMSGVMIFGKESAGASNTALDNVMITDEEEIKATNPVATERFGTVAVNFQSSSTDPATGDVHAMGALPGMVWQDRDVYLQGPIWAKIPHTDGHFHPSPLMGGFGLKNPPPQILIKNTPVPANPPAEFSATKFASFITQYSTGQVSVEIEWELQKENSKRWNPEVQYTSNYAKSANVDFTVDNNGLYTEPRPIGTRYLTRPL

SEQ ID NO: 751 - protein, 736 aa, Artificial Sequence
  source: /note="Description of Artificial Sequence: Synthetic polypeptide"
MAADGYLPDWLEDNLSEGIREWWDLKPGAPKPKANQQKQDDGRGLVLPGYKYLGPFNGLDKGEPVNAADAAALEHDKAYDQQLKAGDNPYLRYNHADAEFQERLQEDTSFGGNLGRAVFQAKKRVLEPLGLVEEGAKTAPGKKRPVEQSPQEPDSSSGIGKTGQQPAKKRLNFGQTGDSESVPDPQPLGEPPATPAAVGPTTMASGGGAPMADNNEGADGVGNASGNWHCDSTWLGDRVITTSTRTWALPTYNNHLYKQISSASTGASNDNHYFGYSTPWGYFDFNRFHCHFSPRDWQRLINNNWGFRPKRLNFKLFNIQVKEVTTNDGVTTIANNLTSTVQVFSDSEYQLPYVLGSAHQGCLPPFPADVFMIPQYGYLTLNNGSQAVGRSSFYCLEYFPSQMLRTGNNFTFSYTFEEVPFHSSYAHSQSLDRLMNPLIDQYLYYLNRTQNQSGSAQNKDLLFSRGSPAGMSVQPKNWLPGPCYRQQRVSKTKTDNNNSNFTWTGASKYNLNGRESIINPGTAVASHKDDEDKFFPMSGVMIFGKESAGASNTALDNVMITDEEEIKATNPVATERFGTVAVNFQSSSTDPATGDVHAMGALPGMVWQDRDVYLQGPIWAKIPHTDGHFHPSPLMGGFGLKNPPPQILIKNTPVPANPPAEFSATKFASFITQYSTGQVSVEIEWELQKENSKRWNPEVQYTSNYAKSANVDFTVDNNGLYTEPRPIGTRYLTRPL

SEQ ID NO: 752 - protein, 736 aa, Artificial Sequence
  source: /note="Description of Artificial Sequence: Synthetic polypeptide"
MAADGYLPDWLEDNLSEGIREWWDLKPGAPKPKANQQKQDDGRGLVLPGYKYLGPFNGLDKGEPVNAADAAALEHDKAYDQQLKAGDNPYLRYNHADAEFQERLQEDTSFGGNLGRAVFQAKKRVLEPLGLVEEGAKTAPGKKRPVEQSPQEPDSSSGIGKTGQQPAKKRLNFGQTGDSESVPDPQPLGEPPATPAAVGPTTMASGGGAPMADNNEGADGVGNASGNWHCDSTWLGDRVITTSTRTWALPTYNNHLYKQISSASTGASNDNHYFGYSTPWGYFDFNRFHCHFSPRDWQQLINNNWGFRPKRLNFKLFNIQVKEVTTNDGVTTIANNLTSTVQVFSDSEYQLPYVLGSAHQGCLPPFPADVFMIPQYGYLTLNNGSQAVGRSSFYCLEYFPSQMLRTGNNFTFSYTFEEVPFHSSYAHSQSLDRLMNPLIDQYLYYLNRTQNQSGSAQNKDLLFSRGSPAGMSVQPKNWLPGPCYRQQRVSKTKTDNNNSNFTWTGASKYNLNGRESIINPGTAMASHKDDEDKFFPMSGVMIFGKESAGASNTALDNVMITDEEEIKATNPVATERFGTVAVNFQSTSTDPATGDVHAMGALPGMVWQDRDVYLQGPIWAKIPHTDGHFHPSPLMGGFGLKNPPPQILIKNTPVPANPPAEFSATKFASFITQYSTGQVSVEIEWELQKENSKRWNPEVQYTSNYAKSADVDFTVDNNGLYTEPRPIGTRYLTRPL

SEQ ID NO: 753 - protein, 736 aa, Artificial Sequence
  source: /note="Description of Artificial Sequence: Synthetic polypeptide"
MAADGYLPDWLEDNLSEGIREWWDLKPGAPKPKANQQKQDDGRGLVLPGYKYLGPFNGLDKGEPVNAADAAALEHDKAYDQQLKAGDNPYLRYNHADAEFQERLQEDTSFGGNLGRAVFQAKKRVLEPLGLVEEGAKTAPGKKRPVEQSPQEPDSSSGIGKTGQQPAKKRLNFGQTGDSESVPDPQPLGEPPATPAAVGPTTMASGGGAPMADNNEGADGVGNASGNWHCDSTWLGDRVITTSTRTWALPTYNNHLYKQISSASTGASNDNHYFGYSTPWGYFDFNRFHCHFSPRDWQRLINNNWGFRPKRLNFKLFNIQVKEVTTNDGVTTIANNLTSTVQVFSDSEYQPPYVLGSAHQGCLPPFPADVFMIPQYGHLTLNNGSQAVGRSSFYCLEYFPSQMLRTGNNFTFSYTFEEVPFHSSYAHSQSLDRLTNPLIDQYLYYLNRTQNQSGSAQNKDLLFSRGSPAGMSVQPKNWLPGPCYRQQRVSKTKTDNNNSNFTWTGASKYNLNGRESIINPGTAMASHKDDEDKFFPMSGVMIFGKESAGASNTALDNVMITDEEEIKATNPVATERFGTVAVNFQSSSTDPATGDVHAMGALPGMVWQDRDVYLQGPIWAKIPHTDGHFHPSPLMGGFGLKNPPPQILIKNTPVPANPPAEFSATKFASFITQYSTGQVSVEIEWELQKENSKRWNPEVQYTSNYAKSANVDFTVDNNGLYTEPRPIGTRYLTRPL

SEQ ID NO: 754 - protein, 736 aa, Artificial Sequence
  source: /note="Description of Artificial Sequence: Synthetic polypeptide"
MAADGYLPDWLEDNLSEGIREWWDLKPGAPKPKANQQEQDDGRGLVLPGYKYLGPFNGLDKGEPVNAADAAALEHDKAYDQQLKAGDNPYLRYNHADAEFQERLQEDTSFGGNLGRAVFQAKKRVLEPLGLVEEGAKTAPGKKRPVEQSPQEPDSSSGIGKTGQQPAKKRLNFGQTGDSESVPDPQPLGEPPATPAAVGPTTMASGGGAPMADNNEGADGVGNASGNWHCDSTWLGDRVITTSTRTWALPTYNNHLYKQISSASTGASNDNHYFGYSTPWGYFDFNRFHCHFSPRDWQRLINNNWGFRPKRLNFKLFNIQVKEVTTNDGVTTIANNLTSTVQVFSDSEYQLPYVLGSAHQGCLPPFPADVFMIPQYGYLTLNNGSQAVGRSSFYCLEYFPSQMLRTGNNFTFSYTFEEVPFHSSYAHSQSLDRLMNPLIDQYLYYLNRTQNQSGSAQNKDLLFSRGSPAGMSVQPKNWLPGPCYRQQRVSKTKTDNNNSNFTWTGASKYNLNGRESIINPGTAMASHKDDEDKFFPMSGVMIFGKESAGASNTALDNVMITDEEEIKATNPVATERFGTVAVNFQSSSTDPATGDVHATGTLPGMVWQDRDVYLQGPIWAKIPHTDGHFHPSPLMGGFGLKNPPPQILIKTTPVPANPPAEFSATKFASFITQYSTGQVSVEIEWELQKENSKRWNPEVQYTSNYAKSANVDFTVDDNGLYTEPRPIGTRYLTRPL

SEQ ID NO: 755 - protein, 736 aa, Artificial Sequence
  source: /note="Description of Artificial Sequence: Synthetic polypeptide"
MAADGYLPDWLEDNLSEGIREWWDLKPGAPKPKANQQKQDDGRGLVLPGYKYLGPFNGLDKGEPVNAADAAALEHDKAYDQQLKAGDNPYLRYNHADAEFQERLQEDTSFGGNLGRAVFQAKKRVLEPLGLVEEGAKTAPGKKRPVEQSLQEPDSSSGIGKTGQQPAKKRLNFGQTGDSESVPDPQPLGEPPATPAAVGPTTMASGGGAPMADNNEGADGVGNASGNWHCDSTWLGDRVITTSTRTWALPTYNNHLYKQISSASTGASNDNHYFGYSTPWGYFDFNRFHCHFSPRDWQRLINNNWGFRPKRLNFKLFNIQVKEVTTNDGVTTIANNLTSTVQVFSDSEYQLPYVLGSAHQGCLPPFPADVFMIPQYGYLTLNNGSQAVGRSSFYCLEYFPSQMLRTGNNFTFSYTFEEVPFHSSYAHSQSLDRLMNPLIDQYLYYLNRTQNQSGSAQNKDLLFSRGSPAGMSVQPKNWLPGPCYRQQRVSKTKTDNDNSNFTWTGASKYNLNGRESIINPGTAMASHKDDEDKFFPMSGVMIFGKESAGASNTALDNVMITDEEEIKATNPVATERFGTVAVNFQSSSTDPATGDVHAMGALPGMVWQDRDVYLQGPIWAKIPHTDGHFHPSPLMGGFGLKNPPPQILIKNTPVPANPPAEFSATKFASFITQYSTGQVSVEIEWELQKENSKRWNPEVQYTSNYAKSANVDFTVDNNGLYTEPRPIGTRYLTRPL

SEQ ID NO: 756 - protein, 736 aa, Artificial Sequence
  source: /note="Description of Artificial Sequence: Synthetic polypeptide"
MAADGYLPDWLEDNLSEGIREWWDLKPGAPKPKANQQKQDDGRGLVLPGYKYLGPFNGLDKGEPVNAADAAALEHDKAYDQQLKAGDNPYLRYNHADAEFQERLQEDTSFGGNLGRAVFQAKKRVLEPLGLVEEGAKTAPGKKRPVEQSPQEPDSSSGIGKTGQQPAKKRLNFGQTGDSESVPDPQPLGEPPATPAAVGPTTMASGGGAPMADNNEGADGVGNASGNWHCDSTWLGDRVITTSTRTWALPTYNNHLYKQISSASTGASNDNHYFGYSTPWGYFDFNRFHCHFSPRDWQRLINNNWGFRPKRLNFKLFNIQVKEVTTNDGVTTIANNLTSTVQVFSDSEYQLPYVLGSAHQGCLPPFPADVFMIPQYGYLTLNNGSQAVGRSSFYCLEYFPSQMLRTGNNFTFSYTFEEAPFHSSYAHSQSLDRLMNPLIDQYLYYLNRTQNQSGSAQNKDLLFSRGSPAGMSVQPKNWLPGPCYRQQRVSKTKTDNNNSNFTWTGASKYNLNGRESIINPGTAMASHKDDEDKFFPMSGVMIFGKESAGASNTALDNVMITDEEEIKATNPVATERFGTVAVNFQSSSTDPATGDVHAMGALPGMVWQDRDVYLQGPIWAKIPHTDGHFHPSPLMGGFGLKNPPPQILIKNTPVPANPPAEFSATKFASFITQYSTGQVSVEIEWELQKENSKRWNPEVQYTSNYAKSANVDFTVDNNGLYTEPRPVGTRYLTRPL

SEQ ID NO: 757 - protein, 736 aa, Artificial Sequence
  source: /note="Description of Artificial Sequence: Synthetic polypeptide"
MAADGYLPDWLEDNLSEGIREWWDLKPGAPKPKANQQKQDDGRGLVLPGYKYLGPFNGLDKGEPVNAADAAALEHDKAYDQQLKAGDNPYLRYNHADAEFQERLQENTSFGGNLGRAVFQAKKRVLEPLGLVEEGAKTAPGKKRPVEQSPQEPDSSSGIGKTGQQPAKKRLNFGQTGDSESVPDPQPLGEPPATPAAVGPTTMASGGGAPMADNNEGADGVGNASGNWHCDSTWLGDRVITTSTRTWALPTYNNHLYKQISSASTGASNDNHYFGYSTPWGYFDFNRFHCHFPPRDWQRLINNNWGFRPKRLNFKLFNIQVKEVTSNDGVTTIANNLTSTVQVFSDSEYQLPYVLGSAHQGCLPPFPADVFMIPQYGYLTLNNGSQAVGRSSFYCLEYFPSQMLRTGNNFTFSYTFEEVPFHSSYAHSQSLDRLMNPLIDQYLYYLNRTQNQSGSAQNKDLLFSRGSPAGMSVQPKNWLPGPCYRQQRVSKTKTDNNNSNFTWTGASKYNLNGRESIINPGTAMASHKDDEDKFFPMSGVMIFGKESAGASNTALDNVMITDEEEIKATNPVATERFGTVAVNFQSSSTDPATGDVHAMGALPGMVWQDRDVYLQGPIWAKIPHTDGHFHPSPLMGGFGLKNPPPQILIKNTPVPANPPAEFSATKFASFITQYSTGQVSVEIEWELQKENSKRWNPEVQYTSNYAKSANVDFTVDNNGLYTEPRPIGTRYLTRPL

SEQ ID NO: 758 - protein, 736 aa, Artificial Sequence
  source: /note="Description of Artificial Sequence: Synthetic polypeptide"
MAADGYLPDWLEDNLSEGIREWWDLKPGAPKPKANQQKQDDGRGLVLPGYKYLGPFNGLDKGEPVNAADAAALEHDKAYDQQLKAGDNPYLRYNHADAEFQERLQEDTSFGGNLGRAVFQAKKRVLEPLGLVEEGAKTAPGKKRPVEQSPQEPDSSSGIGKTGQQPAKKRLNFGQTGDSESVPDPQPLGEPPATPAAVGPTTMASGGGAPMADNNEGADGVGNASGNWHCDSTWLGDRVITTSTRTWALPTYNNHLYKQISSASTGASNDNHYFGYSTPWGYFDFNRFHCHFSPRDWQRLINNNWGFRPKRLNFKLFNIQVKEVTTNDGVTTIANNLTSTVQVFSDSEYQLPYVLGSAHQGCLPPFPADVFMIPQYGYLTLNNGSQAVGRSSFYCLEYFPSQMLRTGNNFTFSYTFEEVPFHSSYAHSQSLDRLMNPLIDQYLYYLNRTQNQSGSAQNKDLLFSRGSPAGTSVQPKNWLPGPCYRQQRVSKTKTDNNNSNFTWTGASKYNLNGRESIINPGTAMASHKDDEDKFFPMSGVMIFGKESAGASNTALDNVMITDEEEIKATNPVATERFGTVAVNFQSSSTDPATGDVHAMGALPGMVWQDRDVYLQGPIWAKIPHTDGHFHPSPLMGGFGLKNPPPQILIKNTPVPANPPAEFSATKFASFITQYSTGQVSVEIEWELQKENSKRWNPEVQYTSNYAKSANVDFTVDNNGLYTGPRPIGTRYLTRPL

SEQ ID NO: 759 - protein, 736 aa, Artificial Sequence
  source: /note="Description of Artificial Sequence: Synthetic polypeptide"
MAADGYLPDWLEDNLSEGIREWWDLKPGAPKPKANQQKQDDGRGLVLPGYKYLGPFNGLDKGEPVNAADAAALEHDKAYDQQLKAGDNPYLRYNHADAEFQERLQEDTSFGGNLGRAVFQAKKRVLEPLGLVEEGAKTAPGKKRPVEQSPQEPDSSSGIGKTGQQPAKKRLNFGQTGDSESVPDPQPLGEPPATPAAVGPTTMASGGGAPMADNNEGADGVGNAPGNWHCDSTWLGDRVITTSTRTWALPTYNNHLYKQISSASTGASNDNHYFGYSTPWGYFDFNRFHCHFSPRDWQRLINNNWGFRPKRLNFKLFNIQVKEVTTNDGVTTIANNLTSTVQVFSDSEYQLPYVLGSAHQGCLPPFPADVFMIPQYGYLTLNNGSQAVGRSSFYCLEYFPSQMLRTGNNFTFSYTFEEVPFHSSYAHSQSLDRLMNPLIDQYLYYLNRTQNQSGSAQNKDLLFSRGSPAGMSVQPKNWLPGPCYRQQRVSKTKTDNNNSNFTWTGASKYNLNGRESIINPGTAMASHKDDEDKFFPMSGVMIFGKESAGASNTALDNVMITGEEEIKATNPVATERFGTVAVNFQSSSTDPATGDVHAMGALPGMVWQDRDVYLQGPIWAKIPHTDGHFHPSPLMGGFGLKNPPPQILIKNTPVPANPPAEFSATKFASFITQYSTGQVSVEIEWELQKENSKRWNPEVQYTSNYAKSANVDFTVDNNGLYTEPRPIGTRYLTRPL

SEQ ID NO: 760 - protein, 736 aa, Artificial Sequence
  source: /note="Description of Artificial Sequence: Synthetic polypeptide"
MAADGYLPDWLEDNLSEGIREWWDLKPGAPKPKANQQKQDDGRGLVLPGYKYLGPFNRLDKGEPVNAADAAALEHDKAYDQQLKAGDNPYLRYNHADAEFQERLQEDTSFGGNLGRAVFQAKKRVLEPLGLVEEGAKTAPGRKRPVEQSPQEPDSSSGIGKTGQQPAKKRLNFGQTGDSESVPDPQPLGEPPATPAAVGPTTMASGGGAPMADNNEGADGVGNASGNWHCDSTWLGDRVITTSTRTWALPTYNNHLYKQISSASTGASNDNHYFGYSTPWGYFDFNRFHCHFSPRDWQRLINNNWGFRPKRLNFKLFNIQVKEVTTNDGVTTIANNLTSTVQVFSDSEYQLPYVLGSAHQGCLPPFPADVFMIPQYGYLTLNNGGQAVGRSSFYCLEYFPSQMLRTGNNFTFSYTFEEVPFHSSYAHSQSLDRLMNPLIDQYLYYLNRTQNQSGSAQNKDLLFSRGSPAGMSVQPKNWLPGPCYRQQRVSKTKTDNNNSNFTWTGASKYSLNGRESIINPGTAMASHKDDEDKFFPMGGVMIFGKESAGASNTALDNAMITDEEEIKATNPVATERFGTVAVNFQSSSTDPATGDVHAMGALPGMVWQDRDVYLQGPIWAKIPHTDGHFHPSPLMGGFGLKNPPPQILIKNTPVPANPPAEFSATKFASFITQYSTGQVSVEIEWELQKENSKRWNPEVQYTSNYAKSANVDFTVDNNGLYTEPRPIGTRYLTRPL

SEQ ID NO: 761 - protein, 736 aa, Artificial Sequence
  source: /note="Description of Artificial Sequence: Synthetic polypeptide"
MAADGYLPDWLEDNLSEGIREWWDLKPGAPKPKANQQKQDDGRGLVLPGYKYLGPFNGLDKGEPVNAADAAALEHDKAYDQQLKAGDNPYLRYNHADAEFQERLQEDTSFGGNLGRAVFQAKKRVLEPLGLVEEGAKTAPGKKRPVEQSPQEPDSSSGIGKTGQQPAKKRLNFGQTGDSESVPDPQPLGEPPATPAAVGPTTMASGGGAPMADNNEGADGVGNASGNWHCDSTWLGGRVITTSTRTWALPTYNNHLYKQISSASTGASNDNHYFGYSTPWGYFDFNRFHCHFSPRDWQRLINNNWGFRPKRLNFKLFNIQVKEVTTNDGVTTIANNLTSTVQVFSDSEYQLPYVLGSAHQGCLPPFPADVFMIPQYGYLTLNNGSQAVGRSSFYCLEYFPSQMLRTGNNSTFSYTFEEVPFHSSYAHSQSLDRLMNPLIDQYLYYLNRTQNQSGSAQNKDLLFSRGSPAGMSVQPKNWLPGPCYRQQRVSKTKTDNNNSNFTWTGASKYNLNGRESIINPGTAMASHKDDEDKFFPMSGVMIFGKESAGASNTALDNVMITDEEEIKATNPVATERFGTVAVNFQSSSTDPATGDVHAMGTLPGMVWQDRDVYLQGPIWAKIPHTDGHFHPSPLMGGFGLKNPPPQILIKNTPVPANPPAEFSATKFASFITQYSTGQVSVEIEWELQKENSKRWNPEVQYTSNYAKSANVDFTVDNNGLYTEPRPIGTRYLTRPL

SEQ ID NO: 762 - protein, 736 aa, Artificial Sequence
  source: /note="Description of Artificial Sequence: Synthetic polypeptide"
MAADGYLPDWLEDNLSEGIREWWDLKPGAPKPKANQQKQDDGRGLVLPGYKYLGPFNGLDKGEPVSAADAAALEHDKAYDQQLKAGDNPYLRYNHADAEFQERLQEDTSFGGNLGRAVFQAKKRVLEPLGLVEEGAKTAPGKKRPVEQSPQEPDSSSGIGKTGQQPAKERLNFGQTGDSESVPDPQPLGEPPATPAAVGPTTMASGGGAPMADNNEGADGVGNASGNWHCDSTWLGDRVITTSTRTWALPTYNNHLYKQISSASTGASNDNHYFGYSTPWGYFDFNRFHCHFSPRDWQRLINNNWGFRPKRLNFKLFNIQVKEVTTNDGVTTIANNLTSTVQVFSDSEYQLPYVLGSAHQGCLPPFPADVFMIPQYGYLTLNNGSQAVGRSSFYCLEYFPSQMLRTGNNFTFSYTFEEVPFHSSYAHSQSLDRLMNPLIDQYLYYLNRTQNQSGSAQNKDLLFSRGSPAGMSVQPKNWLPGPCYRQQRVSKTKTDNNNSNFTWTGASKYNLNGRESIINPGTAMASHKDDEDKFFPMSGVMIFGKESAGASNTALDNVMITDEEEIKATNPVATERFGTVAVNFQSSSTDPATGDVHAMGALPGMVWQDRDVYLQGPIWAKIPHTDGHFHPSPLMGGFGLKNPPPQILIKNTPVPANPPAEFSATKFASFITQYSTGQVSVEIEWELQKENSKRWNPEVQYTSNYAKSANVDFTVDNNGLYTEPRPIGTRYLTRPL

SEQ ID NO: 763 - protein, 736 aa, Artificial Sequence
  source: /note="Description of Artificial Sequence: Synthetic polypeptide"
MAADGYLPDWLEDNLSEGIREWWDLKPGAPKPKANQQKQDDGRGLVLPGYKYLGPFNGLDKGEPVNAADAAALEHDKAYDQQLKAGDNPYLRYNHADAEFQERLQEDTSFGGNLGRAVFQAKKRVLEPLGLVEEGAKTAPGKKRPVEQSPQEPDSSSGIGKTGQQPAKKRLNFGQTGDSESVPDPQPLGEPPATPAAVGPTTMASGGGAPMADNNEGADGVGNASGNWHCDSTWLGDRVITTSTRTWALPTYNNHLYKQISSASTGASNDNHYFGYSTPWGYFDFNRFHCHFSPRDWQRLINNNWGFRPKRLNFKLFNIQVKEVTTNDGVTTIANNLTSTVQVFSDSEYQLPYVLGSAHQGCLPPFPADVFMIPQYGYLTLNNGSQAVGRSSFYCLEYFPSQMLRTGNNFTFSYTFEEVPFHSSYAHSQSLDRLMNPLIDQYLYYLNRTQNQSGSAQNKDLLFSRGSPAGMSVQPKNWLPGPCYRQQRVSKTKTDNNNSNFTWTGASKYNLNGRESIINPGTAMASHKDDEDKFFPMSGVMIFGKESAGASNTALDNVMITDEGEIKATNPVATERFGTVAVNFQSSSTDPATGDVHAMGALPGMVWQDRDVYLQGPIWAKIPHTDGHFHPSPLMGGFGLKNPPPQILIKNTPVPANPPAEFSATKFASFITQYSTGQVSVEIEWELQKENSKRWNPEVQYTSNYAKSANVDFTVDNNGLYTEPRPIGTRYLTRPL

SEQ ID NO: 764 - protein, 736 aa, Artificial Sequence
  source: /note="Description of Artificial Sequence: Synthetic polypeptide"
MAADGYLPDWLEDNLSEGIREWWDLKPGAPKPKANQQKQDDGRGLVLPGYKYLGPFNGLDKGEPVNAADAAALEHDKAYDQQLKAGDNPYLRYNHADAEFQERLQEDTSFGGNLGRAVFQAKKRVLEPFGLVEEGAKTAPGKKRPVEQSPQEPDSSSGIGKTGQQPAKKRLNFGQTGDSESVPDPQPLGEPPATPAAVGPTTMASGGGAPMADNNEGADGVGNASGNWHCDSTWLGDRVITTSTRTWALPTYNNHLYKQISSASTGASNDNHYFGYSTPWGYFDFNRFHCHFSPRDWQRLINNNWGFRPKRLNFKLFNIQVKEVTTNDGVTTIANNLTSTVQVFSDSEYQLPYVLGSAHQGCLPPFPADVFMIPQYGYLTLNNGSQAVGRSSFYCPEYFPSQMLRTGNNFTFSYTFEEVPFHSSYAHSQSLDRLMNPLIDQYLYYLNRTQNQSGSAQNKDLLFSRGSPAGMSVQPKNWLPGPCYRQQRVSKTKTDNNNSNFTWTGASKYNLNGRESIINPGTAMASHKDDKDKFFPMSGVMIFGKESAGASNTALDNVMITDEEEIKATNPVATERFGTVAVNFQSSNTDPATGDVHVMGALPGMVWQDRDVYLQGPIWAKIPHTDGHFHPSPLMGGFGLKHPPPQILIKNTPVPANPPAEFSATKFASFITQYSTGQVSVEIEWELQKENSKRWNPEVQYTSNYAKSANVDFTVDNNGLYTEPRPIGTRYLTRPL

SEQ ID NO: 765 - protein, 736 aa, Artificial Sequence
  source: /note="Description of Artificial Sequence: Synthetic polypeptide"
MAADGYLPDWLEDNLSEGIREWWDLKPGAPKPKANQQKQDDGRGLVLPGYKYLGPFNGLDKGEPVNAADAAALEHDKAYDQQLKAGDNPYLRYNHADAEFQERLQEDTSFGGNLGRAVFQAKKRVLEPFGLVEEGAKTAPGKKRPVEQSPQEPDSSSGIGKTGQQPAKKRLNFGQTGDSESVPDPQPLGEPPATPAAVGPTTMASGGGAPMADNNEGADGVGNASGNWHCDSTWLGDRVITTSTRTWALPTYNNHLYKQISSASTGASNDNHYFGYSTPWGYFDFNRFHCHFSPRDWQRLINNNWGFRPKRLNFKLFNIQVKEVTTNDGVTTIANNLTSTVQVFSDSEYQLPYVLGSAHQGCLPPFPADVFMIPQYGYLTLNNGSQAVGRSSFYCLEYFPSQMLRTGNNFTFSYTFEEVPFHSSYAHSQSLDRLMNPLIDQYLYYLNRTQNQSGSAQNKDLLFSRGSPAGMSVQPKNWLPGPCYRQQRVSKTKTDNNNSNFTWTGASKYNLNGRESIINPGTAMASHKDDKDKFFPMSGVMIFGKESAGASNTALDNVMITDEEEIKATNPVATERFGTVAVNFQSSDTDPATGDVHVMGALPGMVWQDRDVYLQGPIWAKIPHTDGHFHPSPLMGGFGLKHPPPQILIKNTPVPANPPAEFSATKFASFITQYSTGQVSVEIEWELQKENSKRWNPEVQYTSNYAKSANVDFTVDNNGLYTEPRPIGTRYLTRPL

SEQ ID NO: 766 - protein, 736 aa, Artificial Sequence
  source: /note="Description of Artificial Sequence: Synthetic polypeptide"
MAADGYLPDWLEDNLSEGIREWWDLKPGAPKPKANQQKQGDGRGLVLPGYKYLGPFNGLDKGEPVNAADAAALEHDKAYDQQLKAGDNPYLRYNHADAEFQERLQEDTSFGGNLGRAVFQAKKRVLEPFGLVEEGAKTAPGKKRPVEQSPQEPDSSSGIGKTGQQPAKKRLNFGQTGDSESVPDPQPLGEPPATPAAVGPTTMASGGGAPMADNNEGADGVGNASGNWHCDSTWLGDRVITTNTRTWALPTYNNHLYKQISSASTGASNDNHYFGYSTPWGYFDFNRFHCHFSPRDWQRLINNNWGFRPKRLNFKLFNIQVKEVTTNDGVTTIANNLTSTVQVFSDSEYQLPYVLGSAHQGCLPPFPADVFMIPQYGYLTLNNGSQAVGRSSFYCLEYFPSQMLRTGNNFTFSYTFEEVPFHSSYGHSQSLDRLMNLLIDQYLYYLNRTQNQSGSAQNKDLLFSRGSPAGMFVQPKNWLPGPCYRQQRVSKTKTDNNNSNFTWTGASKYNLNGRESIINPGTAMASHKDDEDKFFPMSGVMIFGKESAGASNTALDNVMITDEEEIKATNPVATERFGTVAVNFQSSSTDPATGDVHVMGALPGMVWQDRDVYLQGPIWAKIPHTDGHFHPSPLMGGFGLKHPPPQILIKNTPVPANPPAEFSATKFASFITQYSTGQVSVEIEWELQKENSKRWNPEVQYTSNYAKSANVDFTVDNNGLYTEPRPIGTRYLTRPL

SEQ ID NO: 767 - protein, 736 aa, Artificial Sequence
  source: /note="Description of Artificial Sequence: Synthetic polypeptide"
MAADGYLPDWLEDNLSEGIREWWDLKPGAPKPKANQQKQDDGRGLVLPGYKYLGPFNGLDKGEPVNAADAAALEHDKAYDQQLKAGDNPYLRYNHADAEFQERLQEDTSFGGNLGRAVFQAKKRVLEPFGLVEEGAKTAPGKKRPVEQSPQEPDSSSGIGKTGQQPAKKRLNFGQTGDSESVPDPQPLGEPPATPAAVGPTTMASGGGAPMADNNEGADGVGNASGNWHCDSTWLGDRVITTNTRTWALPTYNNHLYKQISSASTGASNDNHYFGYSTPWGYFDFNRFHCHFSPRDWQRLINNNWGFRPKRLNFKLFNIQVKEVTTNDGVTTIANNLTSTVQVFSDSEYQLPYVLGSAHQGCLPPFPADVFMIPQYGYLMLNNGSQAVGRSSFYCLEYFPSQMLRTGNNFTFSYTFEEVPFHSSYAHSQSLDRLMNPLIDQYLYYLNRTQNQSGSAQNKDLLFSRGSPAGMSVQPKNWLPGPCYRQQRVSKTKTDNNNSNFTWTGASKYNLNGRESIINPGTAMASHKDDEDKFFPMSGVMIFGKESAGASNTALDNVMITDEEEIKATNPAATERFGTVAVNFQSSSTDPATGDVHVMGALPGMVWQDRDVYLQGPIWAKIPHTDGHFHPSPLMGGFGLKHPPPQILIKNTPVPANPPAEFSATKFASFITQYSTGQVSVEIEWELQKENSKRWNPEVQYTSNYAKSANVDFTVDNNGLYTEPRPIGTRYLTRPL

SEQ ID NO: 768 - protein, 736 aa, Artificial Sequence
  source: /note="Description of Artificial Sequence: Synthetic polypeptide"
MAADGYLPDWLEDNLSEGIREWWDLKPGAPKPKANQQKQDDGRGLVLPGYKYLGPFNGLDKGEPVNAADAAALEHDKAYDQQLKAGDNPYLRYNHADAEFQERLQEDTSFGGNLGRAVFQAKKRVLEPFGLVEEGAKTAPGKKRPVEQSPQEPDSSSGIGKTGQQPAKKRLNFGQTGDSESVPDPQPLGEPPATPAAVGPTTMASGGGAPMADNNEGADGVGNASGNWHCDSTWLGDRVITTSTRTWALPTYNNHLYKQISSASTGASNDNHYFGYSTPWGYFDFNRFHCHFSPRDWQRLINNNWGFRPKRLNFKLFNIQVKEVTTNDGVTTIANNLTSTVQVFSDSEYQLPYVLGSAHQGCLPPFPADVFMIPQYGYLTLNNGSQAVGRSSFYCLEYFPSQMLRTGNNFTFSYTFEEVPFHSSYAHSQSLDRLMNPLIDQYLYYLNRTQNQSGSAQNKDLLFSRGSPAGMSVQPKNWLPGPCYRQQRVSKTKTDNNNSNFTWTGASKYNLNGRESIINPGTAMASHKDDEDKFFPMSGVMIFGKESAGASNTALDNVMITDEEEIKATNPVATERFGTVAVNFQSSSTDPATGDVHVMGALPGMVWQDRDVYLQGPIWAKIPHTDGHFHPSPLMGGFGLKHPPPQILIKNTPVPANPPAEFSATKFASFITQYSTGQVSVEIEWELQKENSKRWNPEVQYTSNYAKSANVDFTVDNNGLYTEPRPIGTRYLTRPL

SEQ ID NO: 769 - protein, 736 aa, Artificial Sequence
  source: /note="Description of Artificial Sequence: Synthetic polypeptide"
  MOD_RES (102)..(102): Any amino acid
MAADGYLPDWLEDNLSEGIREWWDLKPGAPKPKANQQKQDDGRGLVLPGYKYLGPFNGLDKGEPVNAADAAALEHDKAYDQQLKAGDNPYLRYNHADAEFQXRLQEDTSFGGNLGRAVFQAKKRVLEPFGLVEEGAKTAPGKKRPVEQSPQEPDSSSGIGKTGQQPAKKRLNFGQTGDSESVPDPQPLGEPPATPAAVGPTTMASGGGAPMADNNEGADGVGNASGNWHCDSTWLGGRVITTSTRTWALPTYNNHLYKQISSASTGASNDNHYFGHSTPWGYFDFNRFHCHFSPRDWQRLINNNWGFRPKRLNFKLFNIQVKEVTTNDGVTTIANNLTSTVQVFSDSEYQLPYVLGSAHQGCLPPSPADVFMIPQYGYLTLNNGSQAVGRSSFYCLEYFPSQMLRTGNNFTFSYTFEEVPFHSSYAHSQSLDRLMNPLIDQYLYYLNRTQNQSGSAQNKDLLFSRGSPAGMSVQPKNWLPGPCYRQQRVSKTKTDNNNSNFTWTGASKYNLNGRESIINPGTAMASHKDDKDKFFPMSGVMIFGKESAGASNTALDNVMITDEEEIKATNPVATERFGTVAVNFQSSNTDPATGDVHVMGALPGMVWQDRDVYLQGPIWAKIPHTDGHFHPSPLMGGFGLKHPPPQILIKNTPVPANPPAEFSATKFASFITQYSTGQVSVEIEWELQKENSKRWNPEVQYTSNYAKSANVDFTVDNNGLYTEPRPIGTRYLTRPL

SEQ ID NO: 770 - protein, 736 aa, Artificial Sequence
  source: /note="Description of Artificial Sequence: Synthetic polypeptide"
MAADGYFPDWLEDNLSEGIREWWDLKPGAPKPKANQQKQDDGRGLVLPGYKYLGPFNGLDKGEPVNAADAAALEHDKAYDQQLKAGDNPYLRYNHADAEFQERLQEDTSFGGNLGRAVFQAKKRVLEPFGLVEEGAKTAPGKKRPVEQSPQEPDSSSGIGRTGQQPAKKRLNFGQTGDSESVPDPQPLGEPPATPAAVGPTTMASGGGAPMADNNEGADGVGNASGNWHCDSTWLGDRVITTSTRTWALPTYNNHLYKQISSASTGASNDNHYFGYSTPWGYFDFNRFHCHFSPRDWQRLINNNWGFRPKRLNFKLFNIQVKEVTTNDGVTTIANNLTSTVQVFSDSEYQLPYVLGSAHQGCLPPFPADVFMIPQYGYLTLNNGSQAVGRSSFYCLEYFPSQMLRTGNNFTFSYTFEEVPFHSSYAHSQSLDRLMNPLIDQYLYYLNRTQNQSGSAQNKDLLFSRGSPAGMSVQPKNWLPGPCYRQQRVSKTKTDNNNSNFTWTGASKYNLNGRESIINPGTAMASHKDDEDKFFPMSGVMIFGKESAGASNTALDNVMITDEEEIKATNPVATERFGTVAVNFQSSSPDPATGDVHVMGALPGMVWQDRDVYLQGPIWAKIPHTDGHFHPSPLMGGFGLKHPPPQILIKNTPVPANPPAEFSATKFASFITQYSTGQVSVEIEWELQKENSKRWNPEVQYTSNYAKSANVDFTVDNNGLYSEPRPIGTRYLTRPL

SEQ ID NO: 771 - protein, 736 aa, Artificial Sequence
  source: /note="Description of Artificial Sequence: Synthetic polypeptide"
MAADGYLPDWLEDNLSEGIREWWDLKPGAPKPKANQQKQDDGRGLVLPGYKYLGPFNGLDKGEPVNAADAAALEHDKAYDQQLKAGDNPYLRYNHADAEFQERLQEDTSFGGNLGRAVFQAKKRVLEPFGLVEEGAKTAPGKKRPVEQSPQEPDSSSGIGKTGQQPAKKRLNFGQTGDSESVPDPQPLGEPPATPAAVGPTTMASGGGAPMADNNEGADGVGNASGNWHCDSTWLGDRVITTSTRTWALPTYNNHLYKQTSSASTGASNDNHYFGYSTPWGYFDFNRFHCHFSPRDWQRLINNNWGFRPKRLNFKLFNIQVKEVTTNDGVTTIANNLTSTVQVFSDSEYQLPYVLGSAHQGCLPPFPADVFMIPQYGYLTLNNGSQAVGRSSFYCLEYFPSQMLRTGNNFTFSYTFEEVPFHSSYAHSQSLDRLMNPLIDQYLYYLNRTQNQSGSAQNKDLLFSRGSPAGMSVQPKNWLPGPCYRQQRVSKTKTDYNNSNFTWTGASKYNLNGRESIINPGTAMASHKDDEDKFFPMSGVMIFGKESAGASNTALDNVMITDEEEIKATNPVATERFGTVAVNFQSSSTDPATGDVHVMGALPGMVWQDRDVYLQGPIWAKIPHTDGHFHPSPLMGGFGLKHPPPQILIKNTPVPANPPAEFSATKFASFITQYSTGQVSVEIEWELQKENSKRWNPEVQYTSNYAKSANVDFTVDNNGLYTEPRPIGTRYLTRPL

SEQ ID NO: 772 - protein, 736 aa, Artificial Sequence
  source: /note="Description of Artificial Sequence: Synthetic polypeptide"
MAADGYPPDWLEDNLSEGIREWWDLKPGVPKPKANQQKQDDGRGLVLPGYKYLGPFNGLDKGEPVNAADAAALEHDKAYDQQLKAGDNPYLRYNHADAEFQERLQEDTSFGGNLGRAVFQAKKRVLEPFGLVEEGAKTAPGKKRPVEQSPQEPDSSSGIGKTGQQPAKKRLNFGQTGDSESVPDPQPLGEPPATPAAVGPTTMASGGGAPMADNNEGADGVGNASGNWHCDSTWLGDRVITTSTRTWALPTYNNHLYKQISSASTGASNDNHYFGYSTPWGYFDFNRFHCHFSPRDWQRLINNNWGFRPKRLNFKLFNIQVKEVTTNDGVTTIANNLTSTVQVFSDSEYQLPYVLGSAHQGCLPPFPADVFMIPQYGYLTLNNGSQAVGRSSFYCLEYFPSQMLRTGNNFTFSYTFEEVPFHSSYAHSQSLDRLMNPLIDQYLYYLNRTQNQSGSAQNKDLLFSRGSPAGMSVQPKNWLPGPCYRQQRVSKTKTDNNNSNFTWTGASKYNLNGRESIINPGTAMASHKDDEDKFFPMSGVMIFGKESAGASNTALDNVMITDEEEIKATNPVATERFGTVAVNFQSSSTDPATGDVHVMGALPGMVWQDRDVYLQGPIWAKIPHTDGHFHPSPLMGGFGLKHPPPQILIKNTPVPANPPAEFSATKFASFITQYSTGQVSVEIEWELQKENSKRWNPEVQYTSNYAKSANVDFTVDNNGLYTEPRPIGTRYLTRPL

SEQ ID NO: 773 - protein, 732 aa, Artificial Sequence
  source: /note="Description of Artificial Sequence: Synthetic polypeptide"
MAADGYLPDWLEDNLSEGIREWWDLKPGAPKPKANQQKQDDGRGLVLPGYKYLGPFNGLDKGEPVNAADAAALEHDKAYDQQLKAGDNPYLRYNHADAEFQERLQEDTSFGGNLGRAVFQAKKRVLEPFGLVEEGAKTAPGKKRPVEQSPQEPDSSSGIGKTGQQPAKKRLNFGQTGDSESVPDPQPLGEPPATPAAVGPTTMASGGGAPMADNNEGADGVGNASGNWHCDSTWLGDRVITTSTRTWALPTYNNHLYKQISSASTGASNDNHYFGYSTPWGYFDFNRFHCHFSPRDWQRLINNNWGFRPKRLNFKLFNIQVKEVTTNDGVTTIANNLTSTVQAFSDSEYQLPYVLGSAHQGCLPPFPADVFMIPQYGYLTLNNGSQAVGRSSFYCLEYFPSQMLRTGNNFTFSYTFEEVPFHSSYAHSQSLDRLMNPLIDPYLYYLNRTQNQSGSAQNKDLLFSRGSPAGMSVQPKNWLPGPCYRQQRVSKTKTDNNNSNFTWTGASKYNLNGRESIINPGTAMASHKDDEDKFFPMSGVMIFGKESAGASNTALDNVMITDEEEIKATNPVATERFGTVAVNFQSSSTDPATGDVHVMGALPGMVWQDRDVYLQGPIWAKIPHTDGHFHPSPLMGGFGLKHPPPQILIKNTPVPANPPAEFSATKFASFITQYSTGQVSVEIEWELQKENSKRWNPEVQYTSNYAKSANVDFTVDNNGLYTEPRPIGTRYL

SEQ ID NO: 774 - protein, 736 aa, Artificial Sequence
  source: /note="Description of Artificial Sequence: Synthetic polypeptide"
MAADGYLPDWLEDNLSEGIREWWDLKPGAPKPKANQQKQDDGRGLVLPGYKYLGPFNGLDKGEPVNAADAAALEHDKAYDQQLKAGDNPYLRYNHADAEFQERLQEDTSFGGNLGRAVFQAKKRVLEPFGLVEEGAKTAPGKKRPVEQSPQEPDSSSGIGKTGQQPAKKRLNFGQTGDSESVPDPQPLGEPPATPAAVGPTTMASGGGAPMADNNEGADGVGNASGNWHCDSTWLGDRVITTSTRTWALPTYNNHLYKQISSASTGASNDNHYFGYSTPWGYFDFNRFHCHFSPRDWQRLINNNWGFRPKRLNFKLFNIQVKEVTTNDGVTTIANNLTSTVQVFSDSEYQLPYVLGSAHQGCLPPFPADVFMIPQYGYLTLNNGSQAVGRSSFYCLEYFPSQMLRTGNNFTFSYTFEEVPFHSSYAHSQSLDRLMNPLIDQYLYYLNRTQNQSGSAQNKDLLFSRGSPAGMSVQPKNWLPGPCYRQQRVSKTKTDNNNSNFTWTGASKYNLNGRESIINPGTAMASHKDDEDKFFPMSGVMIFGKESAGASNTALDNVMITDEEEIKATNPVATERFGTVAVNFQSSSTDPATGDVHVMGALPGMVWQDRDVYLQGPIWAKIPHTDGHSHPSPLMGGFGLKHPPPQILIKNTPVPANPPAEFSATKFASFITQYSTGQVSVEIEWELQKENSKRWNPEVQYTSNYAKSANVDFTVDNNGLYTEPRPIGTRYLTRPL

SEQ ID NO: 775 - protein, 736 aa, Artificial Sequence
  source: /note="Description of Artificial Sequence: Synthetic polypeptide"
MAADGYLPDWLEDNLSEGIREWWDLKPGAPKPKANQQKQDDGRGLVLPGYKYLGPFNGLDKGEPVNAADAAALEHDKAYDQQLKAGDNPYLRYNHADAEFQERLQEDTSFGGNLGRAVFQAKKRVLEPFGLVEEGAKTAPGKKRPVEQSPQEPDSSSGIGKTGQQPAKKRLNFGQTGDSESVPDPQPLGEPPATPAAVGPTTMASGGGAPMADNNEGADGVGNASGNWHCDSTWLGDRVITTSTRTWALPTYNNHLYKQISSASTGASNDNHYFGYSTPWGYFDFNRFHCHFSPRDWQRLINNNWGFRPKRLNFKLFNIQVKEVTTNDGVTTIANNLTSTVQVFSDSEYQLPYVLGSAHQGCLPPFPADVFMIPQYGYLTLNNGSQAVGRSSFYCLEYFPSQMLRTGNNFTFSYTFEEVPFHSSYAHSQSLDRLMNPLIDLYLYYLNRTQNQSGSAQNKDLLFSRGSPAGMSVQPKNWLPGPCYRQQRVSKTKTDNNNSNFTWTGASKYNLNGRESIINPGTAMASHKDDEDKFFPMSGVMIFGKESAGTSNTALDNVMITDEEEIKATNPVATERFGTVAVNFQSSSTDPATGDVHVMGALPGMVWQDRDVYLQGPIWAKIPHTDGHFHPSPLMGGFGLKHPPPQILIKNTPVPANPPAEFSATKFASFITQYSTGQVSVEIEWELQKENSKRWNPEVQYTSNYAKSANVDFTVDNNGLYTEPRPIGTRYLTRPL

SEQ ID NO: 776 - protein, 736 aa, Artificial Sequence
  source: /note="Description of Artificial Sequence: Synthetic polypeptide"
MAADGYLPDWLEDSLSEGIREWWDLKPGAPKPKANQQKQDDGRGLVLPGYKYLGPFNGLDKGEPVNAADAAALEHDKAYDQQLKAGDNPYLRYNHADAEFQERLQEDTSFGGNLGRAVFQAKKRVLEPFGLVEEGAKTAPGKKRPVEQSPQEPDSSSGIGKTGQQPAKKRLNFGQTGDSESVPDPQPLGEPPATPAAVGPTTMASGGGAPMADNNEGADGVGNASGNWHCDSTWLGDRVITTSTRTWALPTYNNHLYKQISSASTGASNDNHYFGYSTPWGYFDFNRFHCHFSPRDWQRLINNNWGFRPKRLNFKLFNIQVKEVTTNDGVTTIANNLTSTVQVFSDSEYQLPYVLGSAHQGCLPPFPADVFMIPQYGYLTPNNGSQAVGRSSFYCLEYFPSQMLRTGNNFTFSYTFEEVPFHSSYAHSQSLDRLMNPLIDQYQYYLNRTQNQSGSAQNKDLLFSRGSPAGMSVQPKNWLPGPCYRQQRVSKTKTDNNNSNFTWTGASKYNLNGRESIINPGTAMASHKDDEDKFFPMSGVMIFGKESAGASNTALDNVMITDEEEIKATNPVATERFGTVAVNFQSSSTDPATGDVHVMGALPGMVWQDRDVYLQGPIWAKIPHTDGHFHPSPLMGGFGLKHPPPQILIKNTPVPANPPAEFSATKFASFITQYSTGQVSVEIEWELQKENSKRWNPEVQYTSNYAKSANVDFTVDNNGLYTEPRPIGTRYLTRPL

SEQ ID NO: 777 - protein, 736 aa, Artificial Sequence; identical to SEQ ID NO: 768
  source: /note="Description of Artificial Sequence: Synthetic polypeptide"

SEQ ID NO: 778 - protein, 735 aa, Artificial Sequence
  source: /note="Description of Artificial Sequence: Synthetic polypeptide"
MAADGYLPDWLEDTLSEGIRQWWKLKPGPPPPKPAERHKDDSRGLVLPGYKYLGPFNGLDKGEPVNEADAAALEHDKAYDRQLDSGDNPYLKYNHADAEFQERLKEDTSFGGNLGRAVFQAKKRVLEPLGLVEEPVKTAPGKKRPVEHSPVEPDSSSGTGKAGQQPARKRLNFGQTGDADSVPDPQPLGQPPAAPSGLGTNTMATGSGAPMADNNEGADGVGNSSGNWHCDSTWMGDRVITTSTRTWALPTYNNHLYKQISSQSGASNDNHYFGYSTPWGYFDFNRFHCHFSPRDWQRLINNNWGFRPKRLNFKLFNIQVKEVTQNDGTTTIANNLTSTVQVFTDSEYQLPYVLGSAHQGCLPPFPADVFMVPQYGYLTLNNGSQAVGRSSFYCLEYFPSQMLRTGNNFTFSYTFEDVPFHSSYAHSQSLDRLMNPLIDQYLYYLSRTNTPSGTTTQSRLQFSRAGASDIRDQSRNWLPGPCYRQQRVSKTSADNNNSEYSWTGATKYHLNGRDSLVNPGPAMASHKDDEEKFFPQSGVLIFGKQGSEKTNVDIEKVMITDEEEIRTTNPVATEQYGSVSTNLQRGNRQAATADVNTQGVLPGMVWQDRDVYLQGPIWAKIPHTDGHFHPSPLMGGFGLKHPPPQILIKNTPVPANPSTTFSAAKFASFITQYSTGQVSVEIEWELQKENSKRWNPEIQYTSNYNKSVNVDFTVDTNGVYSEPRPIGTRYLTRNL

SEQ ID NO: 779 - DNA, 2211 bp, Artificial Sequence
  source: /note="Description of Artificial Sequence: Synthetic polynucleotide"
atggctgctgacggttatcttccagattggctcgaggacaacctttctgaaggcattcgtgagtggtgggctctgaaacctggagtccctcaacccaaagcgaaccaacaacaccaggacaaccgtcggggtcttgtgcttccgggttacaaatacctcggacccggtaacggactcgacaaaggagagccggtcaacgaggcggacgcggcagccctcgaacacgacaaagcttacgaccagcagctcaaggccggtgacaacccgtacctcaagtacaaccacgccgacgccgagtttcaggagcgtcttcaagaagatacgtcttttgggggcaaccttggcagagcagtcttccaggccaaaaagaggatccttgagcctcttggtctggttgaggaagcagctaaaacggctcctggaaagaagaggcctgtagatcagtctcctcaggaaccggactcatcatctggtgttggcaaatcgggcaaacagcctgccagaaaaagactaaatttcggtcagactggcgactcagagtcagtcccagaccctcaacctctcggagaaccaccagcagcccccacaagtttgggatctaatacaatggcttcaggcggtggcgcaccaatggcagacaataacgagggtgccgatggagtgggtaattcctcaggaaattggcattgcgattcccaatggctgggcgacagagtcatcaccaccagcaccagaacctgggccctgcccacttacaacaaccatctctacaagcaaatctccagccaatcaggagcttcaaacgacaaccactactttggctacagcaccccttgggggtattttgactttaacagattccactgccacttctcaccacgtgactggcagcgactcattaacaacaactggggattccggcccaagaaactcagcttcaagctcttcaacatccaagttaaagaggtcacgcagaacgatggcacgacgactattgccaataaccttaccagcacggttcaagtgtttacggactcggagtatcagctcccgtacgtgctcgggtcggcgcaccaaggctgcctcccgccgtttccagcggacgtcttcatggtccctcagtatggatacctcaccctgaacaacggaagtcaagcggtgggacgctcatccttttactgcccggagtacttcccttcgcagatgctaaggactggaaataacttccaattcagctataccttcgaggatgtaccttttcacagcagctacgctcacagccagagtttggatcgcttgatgaatcctcttattgatcagtatctgtactacctgaacagaacgcaaggaacaacctctggaacaaccaaccaatcacggctgctttttagccaggctgggcctcagtctatgtctttgcaggccagaaattggctacctgggccctgctaccggcaacagagactttcaaagactgctaacgacaacaacaacagtaactttccttggacagcggccagcaaatatcatctcaatggccgcgactcgctggtgaatccaggaccagctatggccagtcacaaggacgatgaagaaaaatttttccctatgcacggcaatctaatatttggcaaagaagggacaacggcaagtaacgcagaattagataatgtaatgattacggatgaagaagagattcgtaccaccaatcctgtggcaacagagcagtatggaactgtggcaaataacttgcagagctcaaatacagctcccacgactagaactgtcaatgatcagggggccttacctggcatggtgtggcaagatcgtgacgtgtaccttcaaggacctatctgggcaaagattcctcacacggatggacactttcatccttctcctctgatgggaggctttggactgaaacatccgcctcctcaaatcatgatcaaaaatactccggtaccggcaaatcctccgacgactttcagcccggccaagtttgcttcatttatcactcagtactccactggacaggtcagcgtggaaattgagtgggagctacagaaagaaaacagcaaacgttggaatccagagattcagtacacttccaactacaacaagtctgttaatgtggactttactgtagacactaatggtgtttatagtgaacctcaccctattggaacccggtatctcacacgaaacttgtaa

SEQ ID NO: 780 - DNA, 2211 bp, Artificial Sequence
  source: /note="Description of Artificial Sequence: Synthetic polynucleotide"
atggctgctgatggttatcttccagattggctcgaggacaacctttctgaaggcattcgtgagtggtgggctctgaaacctggagtccctcaacccaaagcgaaccaacaacaccaggacaaccgtcggggtcttgtgcttccgggttacaaatacctcggacccggtaacggactcgacaaaggagagccggtcaacgaggcggacgcggcagccctcgaacacgacaaagcttacgaccagcagctcaaggccggtgacaacccgtacctcaagtacaaccacgccgacgccgagtttcaggagcgtcttcaagaagatacgtcttttgggggcaaccttggcagagcagtcttccaggccaaaaagaggatccttgagcctcttggtctggttgaggaagcagctaaaacggctcctggaaagaagaggcctgtagatcagtctcctcaggaaccggactcatcatctggtgttggcaaatcgggcaaacagcctgccagaaaaagactaaatttcggtcagactggcgactcagagtcagtcccagaccctcaacctctcggagaaccaccagcagcccccacaagtttgggatctaatacaatggcttcaggcggtggcgcaccaatggcagacaataacgagggtgccgatggagtgggtaattcctcaggaaattggcattgcgattcccaatggctgggcgacagagtcatcaccaccagcaccagaacctgggccctgcccacttacaacaaccatctctacaagcaaatctccagccaatcaggagcttcaaacgacaaccactactttggctacagcaccccttgggggtattttgactttaacagattccactgccacttctcaccacgtgactggcagcgactcattaacaacaactggggattccggcccaagaaactcagcttcaagctcttcaacatccaagttaaagaggtcacgcagaacgatggcacgacgactgttgccaataaccttaccagcacggttcaagtgtttacggactcggagtatcaactcccgtacgtgctcgggtcggcgcaccaaggctgtctcccgccgtttccagcggacgtcttcatggtccctcagtatggatacctcaccctgaacaacggaagtcaagcggtgggacgctcatccttttactgcctggagtacttcccttcgcagatgctaaggactggaaataacttccaattcagctataccttcgaggatgtaccttttcacagcagctacgctcacagccagagtttggatcgcttgatgaatcctcttattgatcagtatctgtactacctgaacagaacgcaaggaacaacctctggaacaaccaaccaatcacggctgctttttagccaggctgggcctcagtctatgtctttgcaggccagaaattggctacctgggccctgctaccggcaacagagactttcaaagactgctaacgacaacaacaacagtaactttccttggacagcggccagcaaatatcatctcaatggccgcgactcgctggtgaatccaggaccagctatggccagtcacaaggacgatgaagaaaaatttttccctatgcacggcaatctaatatttggcaaagaagggacaacggcaagtaacgcagaattagataatgtaatgattacggatgaagaagagattcgtaccaccaatcctgtggcaacagagcagtatggaactgtggcaaataacttgcagagctcaaatacagctcccacgactagaactgtcaatgatcagggggccttacctggcatggtgtggcaagatcgtgacgtgtaccttcaaggacctatctgggcaaagattcctcacacggatggacactttcatccttctcctctgatgggaggctttggactgaaacatccgcctcctcaaatcatgatcaaaaatactccggtaccggcaaatcctccgacgactttcagcccggccaagtttgcttcatttatcactcagtactccactggacaggtcagcgtggaaattgagtgggagctacagaaagaaaacagcaaacgttggaatccagagattcagtacacttccaactacaacaagtctgttaatgtggactttactgtagacactaatggtgtttatagtgaacctcgccctattggaacccggtatctcacacgaaacttgtaa

SEQ ID NO: 781 - DNA, 2211 bp, Artificial Sequence
  source: /note="Description of Artificial Sequence: Synthetic polynucleotide"
atggctgctgacggttatcttccagattggctcgaggacaacctttctgaaggcattcgtgagtggtgggctctgaaacctggagtccctcaacccaaagcgaaccaacaacaccaggacaaccgtcggggtcttgtgcttccgggttacaaatacctcggacccggtaacggactcgacaaaggagagccggtcaacgaggcggacgcggcagccctcgaacacgacaaagcttacgaccagcagctcaaggccggtgacaacccgtacctcaagtacaaccacgccgacgccgagtttcaggagcgtcttcaagaagatacgtcttttgggggcaaccttggcagagcagtcttccaggccaaaaagaggatccttgagcctcttggtctggttgaggaagcagctaaaacggctcctggaaagaagaggcctgtagatcagtctcctcaggaaccggactcatcatctggtgttggcaaatcgggcaaacagcctgccagaaaaagactaaatttcggtcagactggcgactcagagtcagtcccagaccctcaacctctcggagaaccaccagcagcccccacaagtttgggatctaatacaatggcttcaggcggtggcgcaccaatggcagacaataacgagggtgccgatggagtgggtaattcctcaggaaattggcattgcgattcccaatggctgggcgacagagtcatcaccaccagcaccagaacctgggccctgcccacttacaacaaccatctctacaagcaaatctccggccaatcaggagcttcaaacgacaaccactactttggctacagcaccccttgggggtattttgactttaacagattccactgccacttctcaccacgtgactggcagcgactcattaacaacaactggggattccggcccaagaaactcagcttcaagctcttcaacatccaagttaaagaggtcacgcagaacgatggcacgacgactattgccaataaccttaccagcacggttcaagtgtttacggactcggagtatcagctcccgtacgtgctcgggtcggcgcaccaaggctgtctcccgccgtttccagcggacgtcttcatggtccctcagtatggatacctcaccctgaacaacggaagtcaagcggtgggacgctcatccttttactgcctggagtacttcccttcgcagatgctaaggactggaaataacttccaattcagctataccttcgaggatgtaccttttcacagcagctacgctcacagccagagtttggatcgcttgatgaatcctcttattgatcagtatctgtactacctgaacagaacgcaaggaacaacctctggaacaaccaaccaatcacggctgctttttagccaggctgggcctcagtctatgtctttgcaggccagaaattggctacctgggccctgctaccggcaacagagactttcaaagactgctaacggcaacaacaacagtaactttccttggacagcggccagcaaatatcatctcaatggccgcgactcgctggtgaatccaggaccagctatggccagtcacaaggacgatgaagaaaaatttttccctatgcacggcaatctaatatttggcaaagaagggacaacggcaagtaacgcagaattagataatgtaatgattacggatgaagaagagattcgtaccaccaatcctgtggcaacagagcagtgtggaactgtggcaaataacttgcagagctcaaatacagctcccacgactagaactgtcaatgatcagggggccttacctggcatggtgtggcaagatcgtgacgtgtaccttcaaggacctatctgggcaaagattcctcacacggatggacactttcatccttctcctctgatgggaggctttggactgaaacatccgcctcctcaaatcatgatcaaaaatactccggtaccggcaaatcctccgacgactttcagcccggccaagtttgcttcatttatcactcagtactccactggacaggtcagcgtggaaattgagtgggagctacagaaagaaaacagcaaacgttggaatccagagattcagtacacttccaactacaacaagtctgttaatgtggactttactgtagacactaatggtgtttatagtgaacctcgccctattggaacccggtatctcacacgaaacttgtaa

SEQ ID NO: 782 - DNA, 2212 bp, Artificial Sequence
  source: /note="Description of Artificial Sequence: Synthetic polynucleotide"
  modified_base (1283)..(1283): a, c, t, or g
atggctgctgacggttatcttccagattggctcgaggacaacctttctgaaggcattcgtgagtggtgggctctgaaacctggagtccctcaacccaaagcgaaccaacaacaccaggacaaccgtcggggtcttgtgcttccgggttacaaatacctcggaccgggtaacggactcgacaaaggagagccggtcaacgaggcggacgcggcagccctcgaacacgacaaagcttacgaccagcagctcaaggccggtgacaacccgtacctcaagtacaaccacgccgacgccgagtttcaggagcgtcttcaagaagatacgtcttttgggggcaaccttggcagagcagtcttccaggccaaaaagaggatccttgagcctcttggtctggttgagggagcagctaaaacggctcctggaaagaagaggcctgtagatcagtctcctcaggaaccggactcatcatctggtgttggcaaatcgggcaaacagcctgccagaaaaagactaaatttcggtcagactggcgactcagagtcagtcccagaccctcaacctctcggagaaccaccagcagcccccacaagtttgggatctaatacaatggcttcaggcggtggcgcaccaatggcagacaataacgagggtgccgatggagtgggtaattcctcaggaaattggcattgcgattcccaatggctgggcgacagagtcatcaccaccagcaccagaacctgggccctgcccacttacaacagccatctctacaagcaaatctccagccaatcaggagcttcaaacgacaaccactactttggctacagcaccccttgggggtattttgactttaacagattccactgccacttctcaccacgtgactggcagcgactcattaacaacaactggggattccggcccaagaaactcagcttcaagctcttcaacatccaagttaaagaggtcacgcagaacgatggcacgacgactattgccaataaccttaccagcacggtccaagtgtttacggactcggagtatcagctcccgtacgtgctcgggtcggcgcaccaaggctgtctcccgccgtttccagcggacgccttcatggtccctcagtatggatacctcaccctgaacaacggaagtcaagcggtgggacgctcatccttttactgcctggagtacttcccttcgcagatgctaaggactggaaataacttccaattcagctataccttcgaggatgtaccttttcacggcagctacgctcacagccngagtttggatcgcttgatgaatcctcttattgatcagtatctgtactacctgaacagaacgcaaggaacaacctctggaacaaccaaccaatcacggctgctttttagccaggctgggcctcagtctatgtctttgcaggccagaaattggctacctgggccctgctaccggcaacagagacttttcaaagactgctaacgacaacaacaacagtaactttccttggacagcggccagcaaatatcatctcaatggccgcgactcgctggtgaatccaggaccagctatggccagtcacaaggacgatgaagaaaaatttttccctatgcacggcaatctaatatttggcaaagaagggacaacggcaagtaacgcagaattagataatgtaatgattacggatgaagaagagattcgtaccaccaatcctgtggcaacagagcagtatggaactgtggcaaataacttgcagagctcaaatacagctcccacgactagaactgtcaatgatcagggggccttacctggcatggtgtggcaagatcgtgacgtgtaccttcaaggacctatctgggcaaagattcctcacacggatggacactttcatccttctcctctgatgggaggctttggactgaaacatccgcctcctcaaatcatgatcaaaaatactccggtaccggcaaatcctccgacgactttcagcccggccaagtttgcttcatttatcactcagtactccactggacaggtcagcgtggaaattgagtgggagctacagaaagaaaacagcaaacgttggaatccagagattcagtacacttccaactacaacaagtctgttaatgtggactttactgtagacactaatggtgtttatagtgaacctcgccctattggaacccggtatctcacacgaaactcgtaa

SEQ ID NO: 783 - DNA, 2212 bp, Artificial Sequence
  source: /note="Description of Artificial Sequence: Synthetic polynucleotide"
atggctgctgacggttatcttccagattggctcgaggacaacctttctgaaggcattcgtgagtggtgggctctgaaacctggagtccctcaacccaaagcgaaccaacaacaccaggacaaccgtcggggtcttgtgcttccgggttacaaatacctcggacccggtaacggactcgacaaaggagagccggtcaacgaggcggacgcggcagccctcgaacacgacaaagcttacgaccagcagctcaaggccggtgacaacccgtacctcaagtacaaccacgccgacgccgagtttcaggagcgtcttcaagaagatacgtcttttgggggcaaccttggcagagcagtcttccaggccaaaaagaggatccttgagcctcttggtctggttgagggagcagctaaaacggctcctggaaagaagaggcctgtagatcagtctcctcaggaaccggactcatcatctggtgttggcaaatcgggcaaacagcttgccagaaaaagactaaatttcggtcagactggcgactcagagtcagtcccagaccctcaacctctcggagaaccaccagcagcccccacaagtttgggatctaatacaatggcttcaggcggtggcgcaccaatggcagacaataacgagggtgccgatggagtgggtaattcctcaggaaattggcattgcgattcccaatggctgggcgacagagtcatcaccaccagcaccagaacctgggccctgcccacttacaacagccatctctacaagcaaatctccggccaatcaggagcttcaaacgacaaccactactttggctacagcaccccctgggggtattttgactttaacagattccactgccacttctcaccacgtgactggcagcgactcattaacaacaactggggattccggcccaagaaactcagcttcaagctcttcaacatccaagttaaagaggtcacgcagaacgatggcacgacgactattgccaataaccttaccagcacggttcaagtgtttacggactcggagtatcagctcccgtacgtgctcgggtcggcgcaccaaggctgtctcccgccgtttccagcggacgtcttcatggtccctcagtatggatacctcaccctgaacaacggaagtcaagcggtgggacgctcatccttttactgcctggagtacttcccttcgcagatgctaaggactggaaataacttccaattcagctataccttcgaggatgtaccttttcacagcagctacgctcacagccagagtttggatcgcttgatgaatcctcttattgatcagtatctgtactacctgaacagaacgcaaggaacaacctctggaacaaccaaccaatcacggctgctttttagccaggctgggcctcagtctatgtctttgcaggccagaaattggctacctgggccctgctaccggcaacagagactttcaaagactgctaacgacaacaacaacagtaactttccttggacagcggccagcaaatatcatctcaatggccgcgactcgctggtgaatcccaggaccagctatggccagtcacaaggacgatgaagaaaaatttttccctatgcacggcaatctaatatttggcaaagaagggacaacggcaagtaacgcagaattagataatgtaatgattacggatgaagaagagattcgtaccaccaatcctgtggcaacagagcagtatggaactgtggcaaataacttgcagagctcaaatacagctcccacgactagaactgtcaatgatcagggggccttacctggcatggtgtggcaagatcgtgacgtgtaccttcaaggacctatctgggcaaagattcctcacacggatggacactttcatccttctcctctgatgggaggctttggactgaaacatccgcctcctcaaatcatgatcaaaaatactccggtaccggcaaatcctccgacgactttcagcccggccaagtttgcttcatttatcactcagtactccactggacaggtcagcgtggaaattgagtgggagctacagaaagaaaacagcaaacgttggaatccagagattcagtacacttccaactacaacaagtctgttaatgtggactttactgtagacactaatggtgtttatagtgaacctcgccctattggaacccggtatctcacacgaaacttgtaa

SEQ ID NO: 784 - DNA, 2212 bp, Artificial Sequence
  source: /note="Description of Artificial Sequence: Synthetic polynucleotide"
atggctgctgacggttatcttccagattggctcgaggacaacctttctgaaggcattcgtgagtggtgggctctgaaacctggagtccctcaacccaaagcgaaccaacaacaccaggacgaccgtcggggtcttgtgcttccgggttacaaatacctcggacccggtaacggactcgacaaaggagagccggtcaacgaggcggacgcggcagccctcgaacacgacaaagcttacgaccagcagctcaaggccggtgacaacccgtgcctcaagtacaaccacgccgacgccgagtttcaggagcgtcttcaagaagatacgtcttttgggggcaaccttggcagagcagtcttccaggccaaaaagaggatccttgagcctcttggtctggttgaggaagcagctaaaacggctcctggaaagaagaggcctgtagatcagtctcctcaggaaccggactcatcatctggtgttggcaaatcgggcaaacagcctgccagaaaaagactaaatttcggtcagactggcgactcagagtcagtcccagaccctcaacctctcggagaaccaccagcagcccccacaagtttgggatctaatacaatggcttcaggcggtagcgcaccaatggcagacaataacgagggtgccgatggagtgggtaattcctcaggaaattggcattgcgattcccaatggctgggcgacagagtcatcaccaccagcaccagaacctgggccctgcccacttacaacaaccatctctacaagcaaatctccagccaatcaggagcttcaaacgacaaccactactttggctacagcaccccttgggggtattttgactttaacagattccactgccacttctcaccacgtgactggcagcgactcattaacaacaactggggattccggcccaagaaactcagcttcaagctcttcaacatccaagttaaagaggtcacgcagaacgatggcacgacgactattgccaataaccttaccagcacggttcaagtgtttacggactcggagtatcagctcccgtacgtgctcgggtcggcgcaccaaggctgtctcccgccgtttccagcggacgtcttcatggtccctcagtatggatacctcaccctgaacaacggaagtcaagcggtgggacgctcatccttttactgcctggagtacttcccttcgcagatgctaaggactggaaataacttccaattcagctataccttcgaggatgtaccttttcacagcagctacgctcacagccagagtttggatcgcttgatggatcctcttattgatcagtatctgtactacctgaacagaacgcaaggaacaacctctggaacaaccaaccaatcacggctgctttttagccaggctgggcctcagtctatgtctttgcaggccagaaattggctacctgggccctgctaccggcaacagagactttcaaagactgctaacgacaacaacaacagtaactttccttggacagcggccagcaaatatcatctcaatggccgcgactcgctggtgaatccaggaccagctatggccagtcacaaaggacgatgaagaaaaatttttccctatgcacggcaatctaatatttggcaaagaagggacaacggcaagtaacgcagaattagataatgtaatgattacggatgaagaagagattcgtaccaccaatcctgtggcaacagagcagtatggaactgtggcaaataacttgcagagctcaaatacagctcccacgactagaactgtcaatgatcagggggccttacctggcatggtgtggcaagatcgtgacgtgtaccttcaaggacctatctgggcaaagattcctcacacggatggacactttcatccttctcctctgatgggaggctttggactgaaacatccgcctcctcaaatcatgatcaaaaatactccggtaccggcaaatcctccgacgactttcagcccggccaagtttgcttcatttatcactcagtactccactggacaggtcagcgtggaaattgagtgggagctacagaaagaaaacagcaaacgttggaatccagagattcagtacacttccaactacaacaagtctgttaatgtggactttactgtagacactaatggtgtttatagtgaacctcgccctattggaacccggtatctcacacgaaacctgtaa

SEQ ID NO: 785 - DNA, 2211 bp, Artificial Sequence
  source: /note="Description of Artificial Sequence: Synthetic polynucleotide"
atggctgctgacggttatcttccagattggctcgaggacaacctttctgaaggcattcgtgagtggtgggctctgaaacctggagtccctcaacccaaagcgaaccaacaacaccaggacgaccgtcggggtcttgtgcttccgggttacaaatacctcggacccggtaacggactcgacaaaggagagccggtcaacgaggcggacgcggcagccctcgaacacgacaaagcttacgaccagcagctcaaggccggtgacaacccgtacctcaagtacaaccacgccgacgccgagtttcaggagcgtcttcaagaagatacgtcttttgggggcaaccttggcagagcagtcttccaggccaaaaagaggatccttgagcctcttggtctggttgaggaagcagctaaaacggctcctggaaagaagaggcctgtagatcagtctcctcaggaaccggactcatcatctggtgttggcaaatcgggcaaacagcctgccagaaaaagactaaatttcggtcagactggcgactcagagtcagtcccagaccctcaacctctcggagaaccaccagcagcccccacaagtttgggatctaatacaatggcttcaggcggtggcgcaccaatggcagacaataacgagggtgccgatggagtgggtaattcctcaggaaattggcattgcgattcccaatggctgggcaacagagtcatcaccaccagcaccagaacctgggccctgcccacttacaacaaccatctctacaagcaaatctccagccaatcaggagcttcaaacgacaaccactactttggctacagcaccccttgggggtattttgactttaacagattccactgccacttctcaccacgtgactggcagcgactcattaacaacaactggggattccggcccaagaaactcagcttcaagctcttcaacatccaagttaaagaggtcacgcagaacgatggcacgacgactattgccaataaccttaccagcacggttcaagtgtttacggactcggagtatcagctcccgtacgtgctcgggtcggcgcaccaaggctgtctcccgccgtttccagcggacgtcttcatggtccctcagtatggatacctcaccctgaacaacggaagtcaagcggtgggacgctcatccttttactgcctggagtacttcccttcgcagatgctaaggactggaaataacttccaattcagctataccttcgaggatgtaccttttcacagcagctacgctcacagccagagtttggatcgcttgatgaatcctcttattgatcagtatctgtactacctgaacagaacgcaaggaacaacctctggaacaaccaaccaatcacggctgctttttagccaggctgggcctcagtctatgtctttgcaggccagaaattggctacctgggccctgctaccggcaacagagactttcaaagactgctaacgacaacaacaacagtaactttccttggacagcggccagcaaatatcatctcaatggccgcgactcgctggtgaatccaggaccagctatggccagtcacaaggacgatgaagaaaaatttttccctatgcacggcaatctaatatttggcaaagaagggacaacggcaagtaacgcagaattagataatgtaatgattacggatgaagaagagattcgtaccaccaatcctgtggcaacagagcagtatggaactgtggcaaataacttgcagagctcaaatacagctcccacgactagaactgtcaatgatcagggggccttacctggcatggtgtggcaagatcgtgacgtgtaccttcaaggacctatctgggcaaagattcctcacacggatggacactttcatccttctcctctgatgggaggctttggactgaaacatccgcctcctcaaatcatgatcaaaaatactccggtaccggcaaatcctccgacgactttcagcccggccaagtttgcttcatttatcactcagtactccactggacaggtcagcgtggaaattgagtgggagctacagaaagaaaacagcaaacgttggaatccagagattcagtacacttccaactacaacaagtctgttaatgtggactttactgtagacactaatggtgtttatagtgaacctcgccctattggaacccggtatctcacacgaaacttgtaa

SEQ ID NO: 786 - DNA, 2211 bp, Artificial Sequence
  source: /note="Description of Artificial Sequence: Synthetic polynucleotide"
atggctgctgacggttatcttccagattggctcgaggacaacctttctgaaggcattcgtgagtggtgggctctgaaacctggagtccctcaacccaaagcgaaccaacaacaccaggacgaccgtcggggtcttgtgcttccgggttacaaatacctcggacccggtaacggactcgacaaaggagagccggtcaacgaggcggacgcggcagccctcgaacacgacaaagcttacgaccagcagctcaaggccggtgacaacccgtacctcaagtacaaccacgccgacgccgagtttcaggagcgtcttcaagaagatacgtcttttgggggcaaccttggcagagcagtcttccaggccaaaaagaggatccttgagcctcttggtctggttgaggaagcagctaaaacggctcctggaaagaagaggcctgtagatcagtctcctcaggaaccggactcatcatctggtgttggcaaatcgggcaaacagcctgccagaaaaagactaaatttcggtcagactggcgactcagagtcagtcccagaccctcaacctctcggagaaccaccagcagcccccacaagtttgggatctaatacaatggcttcaggcggtggcgcaccaatggcggacaataacgagggtgccgatggagtgggtaattcctcaggaaattggcattgcgattcccaatggctgggcgacagagtcatcaccaccagcaccagaacctgggccctgcccacttacaacaaccatctctacaagcaaatctccagccaatcaggagcttcaaacgacaaccactactttggctacagcaccccttgggggtattttgactttaacagattccactgccacttctcaccacgtgactggcagcgactcattaacaacaactggggattccggcccaagaaactcagcttcaagctcttcaacatccaagttaaagaggtcacgcagaacgatggcacgacgactattgccaataaccttaccagcacggttcaagtgtttacggactcggagtatcagctcccgtacgtgctcgggtcggcgcaccaaggctgtctcccgccgtttccagcggacgtcttcatggtccctcagtatggatacctcaccctgaacaacggaagtcaagcggtgggacgctcatccttttactgcctggagtacttcccttcgcagatgctaaggactggaaataacttccaattcagctataccttcgaggatgtaccttttcacagcagctacgctcacagccagagtttggatcgcttgatgaatcctcttattgatcagtatctgtactacctgaacagaacgcaaggaacaacctctggaacaaccaaccaatcacggctgctttttagccaggctgggcctcagtctatgtctttgcaggccagaaattggctacctgggccctgctaccggcaacagagactttcaaagactgctaacgacaacaacaacagtaactttccttggacagcggccagcaaatatcatctcaatggccgcgactcgctggtgaatccaggaccagctatggccagtcacaaggacgatgaagaaaaatttttccctatgcacggcaatctaatatttggcaaagaagggacaacggcaagtaacgcagaattagataatgtaatgattacggatgaagaagagattcgtaccaccaatcctgtggcaacagtgcagtatggaactgtggcaaataacttgcagagctcaaatacagctcccacgactagaactgtcaatgatcagggggccttacctggcatggtgtggcaagatcgtgacgtgtaccttcaaggacctatctgggcaaagattcctcacacggatggacactttcatccttctcctctgatgggaggctttggactgaaacatccgcctcctcaaatcatgatcaaaaatactccggtaccggcaaatcctccgacgactttcagcccggccaagtttgcttcatttatcactcagtactccactggacaggtcagcgtggaaattgagtgggagctacagaaagaaaacagcaaacgttggaatccagagattcagtacacttccaactacaacaagtctgttaatgtggactttactgtagacactaatggtgtttatagtgaacctcgccctattggaacccggtatctcacacgaaacttgtaa

SEQ ID NO: 787 - DNA, 2211 bp, Artificial Sequence
  source: /note="Description of Artificial Sequence: Synthetic polynucleotide"
atggctgctgacggttatcttccagattggctcgaggacaacctttctgaaggcattcgtgagtggtgggctctgaaacctggagtccctcaacccaaagcgaaccaacaacaccaggacaaccgtcggggtcttgtgcttccgggttacaaatacctcggacccggtaacggactcgacaaaggagagccggtcaacgaggcggacgcggcagccctcgaacacgacaaagcttacgaccagcagctcaaggccggtgacaacccgtacctcaagtacaaccacgccgacgccgagtttcaggagcgtcttcaagaagatacgtcttttgggggcaaccttggcagagcagtcttccaggccaaaaaggggatccttgagcctcttggtctggttgaggaagcagctaaaacggctcctggaaagaagaggcctgtagatcagtctcctcaggaaccggactcatcatctggtgttggcaaatcgggcaaacagcctgccagaaaaagactaaatttcggtcagactggcgactcagagtcagtcccagaccctcaacctctcggagaaccaccagcagcccccacaagtttgggatctaatacaatggcttcaggcggtggcgcaccaatggcagacaataacgagggtgccgatggagtgggtaattcctcaggaaattggcattgcgattcccaatggctgggcgacagagtcatcaccaccagcaccagaacctgggccctgcccacttacaacaaccatctctacaagcaaatctccagccaatcaggagcttcaaacgacaaccactactttggctacagcaccccttgggggtattttgactttaacagattccactgccacttctcaccacgtgactggcagcgactcattaacaacaactggggattccggcccaagaaactcagcttcaagctcttcaacatccaagttaaagaggtcacgcagaacgatggcacgacgactattgccaataaccttaccagcacggttcaagtgtttacggactcggagtatcagctcccgtacgtgttcgggtcggcgcaccaaggctgtctcccgccgtttccagcggacgtcttcatggtccctcagtatggatacctcaccctgaacaacggaagtcaagcggtgggacgctcatccttttactgcctggagtacttcccttcgcagatgctaaggactggaaataacttccaattcagctataccttcgaggatgtaccttttcacagcagctacgctcacagccagagttcggatcgcttgatgaatcctcttattgatcagtatctgtactacctgaacagaacgcaaggaacaacctctggaacaaccaaccaatcacggctgctttttagccaggctgggcctcagtctatgtctttgcaggccagaaattggctacctgggccctgctaccggcaacagagactttcaaagactgctaacgacaacaacaacagtaactttccttgaacagcggccagcaaatatcatctcaatggccgcgactcgctggtgaatccaggaccagctatggccagtcacaaggacgatgaagaaaaatttttccctatgcacggcaatctaatatttggcaaagaagggacaacggcaagtaacgcagaattagataatgtaatgattacggatgaagaagagattcgtaccaccaatcctgtggcaacagagcagtatggaactgtggcaaataacttgcagagctcaaatacagctcccacgactagaactgtcaatgatcagggggccttacctggcatggtgtggcaagatcgtgacgtgtaccttcaaggacctatctgggcaaagattcctcacacggatggacactttcatccttctcctctgatgggaggctttggactgaaacatccgcctcctcaaatcatgatcaaaaatactccggtaccggcaaatcctccgacgactttcagcccggccaagtttgcttcatttatcactcagtactccactggacaggtcagcgtggaaattgagtgggagctacagaaagaaaacagcaaacgttggaatccagagattcagtacacttccaactacaacaagtctgttaatgtggactttactgtagacactaatggtgtttatagtgaacctcgccctattggaacccggtatctcacacgaaacttgtaa

SEQ ID NO: 788 - DNA, 2211 bp, Artificial Sequence
  source: /note="Description of Artificial Sequence: Synthetic polynucleotide"
atggctgctgacggttatcttccagattggctcgaggacaacctttctgaaggcattcgtgagtggtgggctctgaaacctggagtccctcaacccaaagcgaaccaacaacaccaggacaaccgtcggggtcttgtgcttccgggttacaaatacctcggacccggtaacggactcgacgaaggagagccggtcaacgaggcggacgcggcagccctcgaacacgacaaagcttacgaccagcagctcaaggccggtgacaacccgtacctcaagtacaaccacgccgacgccgagtttcaggagcgtcttcaagaagatacgtcttttgggggcaaccttggcagagcagtcttccaggccaaaaagaggatccttgagcctcttggtctggttgagggagcagctaaaacggctcctggaaagaagaggcctgtagatcagtctcctcaggaaccggactcatcatctggtgttggcaaatcgggcaaacagcctgccagaaaaagactaaatttcggtcagactggcgactcagagtcagtcccagaccctcaacctctcggagaaccaccagcagcccccacaagtttgggatctaatacaatggcttcaggcggtggcgcaccaatggcagacaataacgagggtgccgatggagtgggtaattcctcaggaaattggcattgcgattcccaatggctgggcgacagagtcatcaccaccagcaccagaacctgggccctgcccacttacaacagccacctctacaagcaaatctccagccaatcaggagcttcaaacgacaaccactactttggctacagcaccccttgggggtattttgactttaacagattccactgccacttctcaccacgtgactggcagcgactcattaacaacaactggggattccggcccaagaaactcagcttcaagctcttcaacatccaagttaaagaggtcacgcagaacgatggcacgacgactattgccaataaccttaccagcacggttcaagtgtttacggactcggagtatcagctcccgtacgtgctcgggtcggcgcaccaaggctgtctcccgccgtttccagcggacgtcttcatggtccctcagtatggatacctcaccctgaacaacggaagtcaagcggtgggacgctcatccttttactgcctggagtacttcccttcgcagatgctaaggactggaaataacttccaattcagctataccttcgaggatgtaccttttcacagcagctacgctcacagccagagtttggatcgcttgatgaatcctcttattgatcagtatctgtactacctgaacagaacgcaaggaacaacctctggaacaaccaaccaatcacggctgctttttagccaggctgggcctcagtctatgtctttgcaggccagaaattggctacctgggccctgctaccggcaacagagactttcaaagactgctaacgacaacaacaacagtaactttccttggacagcggccagcaaatatcatctcaatggccgcgactcgctggtgaatccaggaccagctatggccagtcacaaggacgatgaagaaaaatttttccctatgcacggcaatctaatatttggcaaagaagggacaacggcaagtaacgcagaattagataatgtaatgattacggatgaagaagagattcgtaccaccaatcctgtggcaacagagcagtatggaactgtggcaaataacttgcagagctcaaatacagctcccacgactagaactgtcaatgatcagggggccttacctggcatggtgtggcaagatcgtgacgtgtaccttcaaggacctatctgggcaaagattcctcacacggatggacactttcatccttctcctctgatgggaggctttggactgaaacatccgcctcctcaaatcatgatcaaaaatactccggtaccggcaaatcctccgacgactttcagcccggccaagtttgcttcatttatcactcagtactccactggacaggtcagcgtggaaattgagtgggagctacagaaagaaaacagcaaacgttggaatccagagattcagtacacttccaactacaacaagtctgttaatgtggactttactgtagacactaatggtgtttatagtgaacctcgccctattggaacccggtatctcacacgaaacttgtaa

SEQ ID NO: 789 - DNA, 2211 bp, Artificial Sequence
  source: /note="Description of Artificial Sequence: Synthetic polynucleotide"
atggctgctgacggttatcttccagattggctcgaggacaacctttctgaaggcattcgtgagtggtgggctctgaaacctggagtccctcaacccaaagcgaaccaacaacaccaggacaaccgtcggggtcttgtgcttccgggttacaaatacctcggacccggtaacggactcgacaaaggagagccggtcaacgaggcggacgcggcagccctcgaacacgacaaagcttacgaccagcagctcaaggccggtgacaacccgtacctcaagtacaaccacgccgacgccgagtttcaggagcgtcttcaagaagatacgtcttttgggggcaaccttggcagagcagtcttccaggccaaaaagaggatccttgagcctcttggtctggttgagggagcagctaaaacggctcctggaaagaagaggcctgtagatcagtctcctcaggaaccggactcatcatctggtgttggcaaatcgggcaaacagcctgccagaaaaagactaaatttcggtcagactggcgactcagagtcagtcccagaccctcaacctctcggagaaccaccagcagcccccacaagtttgggatctaatacaatggcttcaggcggtggcgcaccaatggcagacaataacgagggtgccgatggagtgggtaattcctcaggaaattggcattgcgattcccaatggctgggcgacagagtcatcaccaccagcaccagaacctgggccctgcccacttacaacagccatctctacaagcaaatctccagccaatcaggagcttcaaacgacaaccactactttggctacagcaccccttggggtattttgactttaacagattccactgccacttctcaccacgtgactggcagcgactcattaacaacaactggggattccggcccaagaaactcagcttcaagctcttcaacatccaagttaaagaggtcacgcagaacgatggcacgacgactattgccaataaccttaccagcacggttcaagtgtttacggactcggagtatcagctcccgtacgtgctcgggtcggcgcaccaaggctgtctcccgccgtttccagcggacgccttcatggtccctcagtatggatacctcaccctgaacaacggaagtcaagcggtgggacgctcatccttttactgcctggagtacttcccttcgcagatgctaaggactggaaataacttccaattcagctataccctcgaggatgtaccttttcacagcagctacgctcacagccagagtttggatcgcttgatgaatcctcttattgatcagtatctgtactacctgaacagaacgcaaggaacaacctctggaacaaccaaccaatcacggctgctttttagccaggctgggcctcagtctatgtctttgcaggccagaaattggctacctgggccctgctaccggcaacagagactttcaaagactgctaacgacaacaacaacagtaactttccttggacagcggccagcaaatatcatctcaatggccgcgactcgctggtgaatccaggaccagctatggccagtcacaaaggacgatgaagaaaaatttttccctatgcacggcaatctaatatttggcaaagaagggacaacggcaagtaacgcagaattagatagtgtaatgattacggatgaagaagagattcgtaccaccaatcctgtggcaacagagcagtatggaactgtggcaaataacttgcagagctcaaatacagctcccacgactagaactgtcaatgatcagggggccttacctggcatggtgtggcaagatcgtgacgtgtaccttcaaggacctatctgggcaaagattcctcacacggatggacactttcatccttctcctctgatgggaggctttggactgaaacatccgcctcctcaaatcatgatcaaaaatactccggtaccggcaaatcctccgacgactttcagcccggccaagtttgcttcatttatcactcagtactccactggacaggtcagcgtggaaattgagtgggagctacagaaagaaaacagcaaacgttggaatccagagattcagtacacttccaactacaacaagtctgttaatgtggactttactgtagacactaatggtgtttatagtgaacctcgccctattggaacccggtatctcacacgaaacttgtaa

SEQ ID NO: 790 - DNA, 2205 bp, Artificial Sequence
  source: /note="Description of Artificial Sequence: Synthetic polynucleotide"
atgactgacggttaccttccagattggctagaggacaacctctctgagggcgttcgagagtggtgggcgctgcaacctggagcccctaaacccaaggcaaatcaacaacatcaggacaacgctcggggtcttgtgcttccgggttacaaatacctcggacccggcaacggactcgacaagggggaacccgtcaacgcagcggacgcggcagccctcgagcacgacaaggcctacgaccagcagctcaaggccggtgacaacccctacctcaagtacaaccacgccgacgcggagttccagcagcggcttcagggcgacacatcgtttgggggcaacctcggcagagcagtcttccaggccaaaaagagggttcttgaacctcttggtctggttgagcaagcgggtgagacggctcctggaaagaagagaccgttgattgaatccccccagcagcccgactcctccacgggtatcggcaaaaaaggcaagcagccggctaaaaagaagctcgttttcgaagacgaaactggagcaggcgacggaccccctgagggatcaacttccggagccatgtctgatgacagtgagatgcgtgcagcaactggcggagctgcagtcgagggcggacaaggtgccgatggagtgggtaatgcctcgggtgattggcattgcgattccacctggtctgagggccacgtcacgaccaccagcaccagaacctgggtcttgcccacctacaacaaccacctctacaagcgactcggagagagcctgcagtccaacacctacaacggattctccaccccctggggatactttgacttcaaccgcttccactgccacttctcaccacgtgactggcagcgactcatcaacaacaactggggcatgcgacccaaagccatgcgggtcaaaatcttcaacatccaggtcaaggaggtcacgacgtcgaacggcgagacaacggtggctaataaccttaccagcacggttcagatctttgcggactcgtcgtacgaactgccgtacgtgatggatgcgggtcaagagggcagcctgcctccttttcccaacgacgtctttatggtgccccagtacggctactgtggactggtgaccggcaacacttcgcagcaacagactgacagaaatgccttctactgcctggagtactttccttcgcagatgctgcggactggcaacaactttgaaattacgtacagttttgagaaggtgcctttccactcgatgtacgcgcacagccagagcctggaccggctgatgaaccctctcatcgaccagtacctgtggggactgcaatcgaccaccaccggaaccaccctgaatgccgggactgccaccaccaactttaccaagctgcggcctaccaacctttccaactttaaaaagaactggctgcccgggccttcaatcaagcagcagggcttctcaaagactgccaatcaaaactacaagatccctgccaccgggtcagacagtctcatcaaatacgagacgcacagcactctggacggaagatggagtgccctgacccccggacctccaatggccacggctggacctgcggacagcaagttcagcaacagccagctcatctttgcggggcctaaacagaacggcaacacggccaccgtacccgggactctgatcttcacctctgaggaggagctggcagccaccaacgctaccgatacggacatgtggggcaacctacctggcggtgaccagagcaacagcaacctgccgaccgtggacagactgacagccttgggagccgtgcctggaatggtctggcaaaacagagacatttactaccagggtcccatttgggccaagattcctcataccgatggacactttcacccctcaccgctgattggtgggtttgggctgaaacacccgcctcctcaaatttttatcaagaacaccccggtacctgcgaatcctgcgacgaccttcagctctactccggtaaactccttcattactcagtacagcactggccaggtgtcggtgcagattgactgggagatccagaaggagcggtccaaacgctggaaccccgaggtccagtttacctccaactacggacagcaaaactctctgttgtgggctcccgatgcggctgggaaatacactgagcctagggctatcggtacccgctacctcacccaccacctgtaa

SEQ ID NO: 791 - DNA, 2205 bp, Artificial Sequence
  source: /note="Description of Artificial Sequence: Synthetic polynucleotide"
atgactgacggttaccttccagattggctagaggacaacctctctgaaggcgttcgagagtggtgggcgctgcaacctggagcccctaaacccaaggcaaatcaacaacatcaggacaacgctcggggtcttgtgcttccgggttacaaatacctcggacccggcaacggactcgacaagggggaacccgtcaacgcagcggacgcggcagccctcgagcacgacaaggcctacgaccagcagctcaaggccggtgacaacccctacctcaagtacaaccacgccgacgcggagttccagcagcggcttcagggcgacacatcgtttgggggcaacctcggcagagcagtcttccaggccaaaaagagggttcttgaacctcttggtctggttgagcaagcgggtgagacggctcctggaaagaagagaccgttgattgaatccccccagcagcccgactcctccacgggtatcggcaaaaaaggcaagcagccggctaaaaagaagctcgttttcgaagacgaaactggagcaggcgacggaccccctgagggatcaacttccggagccatgtctgatgacagtgagatgcgtgcagcagctggcggagctgcagtcgagggcggacaaggtgccgatggagtgggtaatgcctcgggtgattggcattgcgattccacctggtctgagggccacgtcacgaccaccagcaccagaacctgggtcttgcccacctacaacaaccacctctacaagcgactcggagagagcctgcagtccaacacctacaacggattctccaccccctggggatactttgacttcaaccgcttccactgccacttcttaccacgtgactggcagcgactcatcaacaacaactggggcgtgcgacccaaagccatgcgggtcaaaatcttcaacatccaggtcaaggaggtcacgacgtcgaacggcgagacaacggtggctaataaccttaccagcacggttcagatctttgcggactcgtcgtacgaactgccgtacgtgatggatgcgggtcaagagggcagcctgcctccttttcccaacgacgtctttatggtgccccagtacggctactgtggactggtgaccggcgacacttcgcagcaacagactgacagaaatgccttctactgcctggagtactttccttcgcagatgctgcggactggcaacaactttgaaattacgtacagttttgagaaggtgcctttccactcgatgtacgcgcacagccagagcctggaccggctgatgaaccctctcatcgaccagtacctgtggggactgcaatcgaccaccaccggaaccaccctgaatgccgggactgccaccaccaactttaccaagctgcggcctaccaacttttccaactttaaaaagaactggctgcccgggccttcaatcaagcagcagggcttctcaaagactgccaatcaaaactacaagatccctgccaccgggtcagacagtctcatcaaatacgagacgcacagcactctggacggaagatggagtgccctgacccccggacctccaatggccacggctggacctgcggacagcaagttcagcaacagccagctcatctttgcggggcctaaacagaacggcaacacggccaccgtacccgggactctgatcttcacctctgaggaggagctggcagccaccaacgccaccgatacggacatgtggggcaacctacctggcggtgaccagagcaacagcaacctgccgaccgtggacagactgacagccttgggagccgtgcctggaatggtctggcaaaacagagacatttactaccagggtcccatttgggccaagattcctcataccgatggacactttcacccctcaccgctgattggtgggtttgggctgaaacacccgcctcctcaaatttttatcaagaacaccccggtacctgcgaatcctgcgacgaccttcagctctactccggtaaactccttcattactcagtacagcactggccaggtgtcggtgcagattgactgggagatccagaaggagcggtccaaacgctggaaccccgaggtccagtttacctccaactacggacagcaaaactctctgttgtgggctcccgatgcggctgggaaatacactgagcctagggctatcggtacccgctacctcacccaccacctgtaa

SEQ ID NO: 792 - DNA, 2205 bp, Artificial Sequence
  source: /note="Description of Artificial Sequence: Synthetic polynucleotide"
atgactgacggttaccttccagattggctagaggacaacctctctgaaggcgttcgagagtggtgggcgctgcaacctggagcccctaaacccaaggcaaatcaacaacatcaggacaacgctcggggtcttgtgcttccgggttacaaatacctcggacccggcaacggactcgacgagggggaacccgtcaacgcagcggacgcggcagccctcgagcacgacaaggcctacgaccagcagctcaaggccggtgacaacccctacctcaagtacaaccacgccgacgcggagttccagcagcggcttcagggcgacacatcgtttgggggcaacctcggcagagcagtcttccaggccaaaaagagggttcttgaacctcttggtctggttgagcaagcgggtgagacggctcctggaaagaagagaccgttgattgaatccccccagcagcccgactcctccacgggtatcggcaaaaaaggcaagcagccggctaaaaagaagctcgttttcgaagacgaaactggagcaggcgacggaccccctgagggatcaacttccggagccatgtctgatgacagtgagatgcgtgcagcagctggcggagctgcagtcgagggcggacaaggtgccgatggagtgggtaatgcctcgggtgattggcattgcgattccacctggtctgagggccacgtcacgaccaccagcaccagaacctgggtcttgcccacctacaacaaccacctctacaagcgactcggagagagcctgcagtccaacacctacaacggattctccaccccctggggatactttgacttcaaccgcttccactgccacttctcaccacgtgactggcagcgactcatcaacaacaactggggcatgcgacccaaagccatgcgggtcaaaatcttcaacatccaggtcaaggaggtcacgacgtcgaacggcgagacaacggtggctaataaccttaccagcacggttcagatctttgcggactcgtcgtacgaactgccgtacgtgatggatgcgggtcaagagggcagcctgcctccttttcccaacgacgtctttatggtgccccagtacggctactgtggactggtgaccggcaacacttcgcagcaacagactgacagaaatgccttctactgcctggagtactttccttcgcagatgctgcggactggcaacaactttgaaattacgtacagttttgagaaggtgcctttccactcgatgtacgcgcacagccagagcctggaccggctgatgaaccctctcatcgaccagtacctgtggggactgcaatcgaccaccaccggaaccaccctgaatgccgggactgccaccaccaactttaccaagctgcggcctaccaacttttccaactttaaaaagaactggctgcccgggccttcaatcaagcagcagggcttctcaaagactgccaatcaaaactacaagatccctgccaccgggtcagacagtctcatcaaatacgagacgcacagcactctggacggaagatggagtgccctgacccccggacctccaatggccacggctggacctgcggacagcaagttcagcaacagccagctcatctttgcggggcctaaacagaacggcaacacggccaccgtacccgggactctgatcttcacctctgaggaggagctggcagccaccaacgctaccgatacggacatgtggggcaacctacctggcggtgaccagagcaacagcaacctgccgaccgtggacagactgacagccttgggagccgtgcctggaatggtctggcaaaacagagacatttactaccagggtcccatttgggccaagattcctcataccgatggacactttcacccctcaccgctgattggtgggtttgggctgaaacacccgcctcctcaaatttttatcaagaacaccccggtacctgcgaatcctgcgacgaccttcagctctactccggtaaactccttcattactcagtacagcactggccaggtgtcggtgcagattgactgggagatccagaaggagcggtccaaacgctggaaccccgaggtccagtttacctccaactacggacagcaaaactctctgttgtgggctcccgatgcggctgggaaatacactgagcctagggctatcggtacccgctacctcacccaccacctgtaa

SEQ ID NO: 793 - DNA, 2205 bp, Artificial Sequence
  source: /note="Description of Artificial Sequence: Synthetic polynucleotide"
atgactgacggttaccttccagattggctagaggacaacctctctgaaggcgttcgagagtggtgggcgctgcaacctggagcccctaaacccaaggcaaatcaacaacatcaggacaacgctcggggtcttgtgcttccgggttacaaatacctcggacccggcaacggactcgacaagggggaacccgtcaacgcagcggacgcggcagccctcgagcacgacaaggcctacgaccagcagctcaaggccggtgacaacccctacctcaagtacaaccacgccgacgcggagttccagcagcggcttcagggcgacacatcgtttgggggcaacctcggcagagcagtcttccaggccaaaaagagggttcttgaacctcttggtctggttgagcaagcgggtgagacggctcctggaaagaagagaccgttgattgaatccccccagcagcccgactcctccacgggtatcggcaaaaaaggcaagcagccggctaaaaagaagctcgttttcgaagacggaactggagcaggcgacggaccccctgagggatcaacttccggagccatgtctgatgacagtgagatgcgtgcagcagctggcggagctgcagtcgagggcggacaaggtgccgatggagtgggtaatgcctcgggtgattggcattgcgattccacctggtctgagggccacgtcacgaccaccagcaccagaacctgggtcttgcccacctacaacaaccacctctacaagcgactcggagagagcctgcagtccaacacctacaacggattccccaccccctggggatactttgacttcaaccgcttccactgccacttctcaccacgtgactggcagcgactcatcaacaacaactggggcatgcgacccaaagccatgcgggtcaaaatcttcaacatccaggtcaaggaggtcacgacgtcgaacggcgagacaacggcggctaataaccttaccagcacggttcagatctttgcggactcgtcgtacgaactgccgtacgtgatggatgcgggtcaagagggcagcctgcctccttttcccaacgacgtctttatggtgccccagtacggctactgtggactggtgaccggcaacacttcgcagcaacagactgacagaaatgccttctactgcctggagtactttccttcgcagatgctgcggactggcaacaactttgaaattacgtacagttttgagaaggtgcctttccactcgatgtacgcgcacagccagagcctggaccggctgatgaaccctctcatcgaccagtacctgtggggactgcaatcgaccaccaccggaaccaccctgaatgccgggactgccaccaccaactttaccaagctgcggcctaccaacttttccaactttaaaaagaactggctgcccgggccttcaatcaagcagcagggcttctcaaagactgccaatcaaaactacaagatccctgccaccgggtcagacagtctcatcaaatacgagacgcacagcactctggacggaagatggagtgccctgacccccggacctccaatggccacggctggacctgcggacagcaagttcagcaacagccagctcatctttgcggggcctaaacagaacggcaacacggccaccgtacccgggactctgatcttcacctctgaggaggagctggcagccaccaacgccaccgatacggacatgtggggcaacctacctggcggtgaccagagcaacagcaacctgccgaccgtggacagactgacagccttgggagccgtgcctggaatggtctggcaaaacagagacatttactaccagggtcccatttgggccaagattcctcataccgatggacactttcacccctcaccgctgattggtgggtttgggctgaaacacccgcctcctcaaatttttatcaagaacaccccggtacctgcgaatcctgcgacgaccttcagctctactccggtaaactccttcattactcagtacagcactggccaggtgtcggtgcagattgactgggagatccagaaggagcggtccaaacgctggaaccccgaggtccagtttacctccaactacggacagcaaaactctctgttgtgggctcccgatgcggctgggaaatacactgagcctagggctatcggtacccgctacctcacccaccacctgtaa

SEQ ID NO: 794 - DNA, 2205 bp, Artificial Sequence
  source: /note="Description of Artificial Sequence: Synthetic polynucleotide"
atgactgacggttaccttccagattggctagaggacaacctctctgaaggcgttcgagagtggtgggcgctgcaacctggagcccctaaacccaaggcaaatcaacaacatcaggacaacgctcggggtcttgtgcttccgggttacaaatacctcggacccggcaacggactcgacaagggggaacccgtcaacgcagcggacgcggcagccctcgagcacgacaaggcctacgaccagcagctcaaggccggtgacaacccctacctcaagtacaaccacgccgacgcggagttccagcagcggcttcagggcgacacatcgtttgggggcaacctcggcagagcagtcttccaggccaaaaagagggttcttgaacctcttggtctggttgagcaagcgggtgagacggctcctggaaagaagagaccgttgattgaatccccccagcagcccgactcctccacgggtatcggcaaaaaaggcaagcagccggctaaaaagaagctcgttttcgaagacgaaactggagcaggcgacggaccccctgagggatcaacttccggagccatgtctgatgacagtgagatgcgtgcagcagctggcggagctgcagtcgagggcggacaaggtgccgatggagtgggtaatgcctcgggtgattggcattgcgattccacctggtctgagggccacgtcacgaccaccagcaccagaacctgggtcttgcccacctacaacaaccacctctacaagcgactcggagagagcctgcagtccaacacctacaacggattctccaccccctggggatactttgacttcaaccgcttccactgccacttctcaccacgtgactggcagcgactcatcaacaacaactggggcatgcgacccaaagccatgcgggtcaaaatcttcaacatccaggtcaaggaggtcacgacgtcgaacggcgagacaacggtggctaataaccttaccagcacggttcagatctttgcggactcgtcgtacgaactgccgtacgtgatggatgcgggtcaagagggcagcctgcctccttttcccaacgacgtctttatggtgccccagtacggctaccgtggactggtgaccggcaacacttcgcagcaacagactgacagaaatgccttctactgcctggagtactttccttcgcagatgctgcggactggcaacaactttgaaattacgtacagttttgagaaggtgcctttccactcgatgtacgcgcacagccagagcctggaccggctgatgaaccctctcatcgaccagtacctgtggggactgcaatcgaccaccaccggaaccaccctgaatgccgggactgccaccaccaactttaccaagctgcggcctaccaacttttccaactttaaaaagaactggctgcccgggccttcaatcaagcagcagggcttctcaaagactgccaatcaaaactacaagatccctgccaccgggtcagacagtctcatcaaatacgagacgcacagcactctggacggaagatggagtgccctgacccccggacctccaatggccacggctggacctgcggacagcaagttcagcaacagccagctcatctttgcggggcctaaacagaacggcaacacggccaccgtacccgggactctgatcttcacctctgaggaggagctggcagccaccaacgccaccgatacggacatgtggggcaacctacctggcggtgaccagagcaacagcaacctgccgaccgtggacagactgacagccttgggagccgtgcctggaatggtctggcaaaacagagacatttactaccagggtcccatttgggccaagattcctcataccgatggacactttcacccctcaccgctgattggtgggtttgggctgaaacacccgcctcctcaaatttttatcaagaacaccccggtacctgcgaatcctgcgacgaccttcagctctactccggtaaactccttcattactcagtacagcactggccaggtgtcggtgcagattgactgggagatccagaaggagcggtccaaacgctggaaccccgaggtccagtttacctccaactacggacagcaaaactctctgttgtgggctcccgatgcggctgggaaatacactgagcctagggctatcggtacccgctacctcacccaccacctgtaa

SEQ ID NO: 795 - DNA, 2205 bp, Artificial Sequence
  source: /note="Description of Artificial Sequence: Synthetic polynucleotide"
atgactgacggttaccttccagattggctagaggacaacctctctgaaggcgttcgagagtggtgggcgctgcaacctggagcccctaaacccaaggcaaatcaacaacatcaggacaacgctcggggtcttgtgcttcagggttacaaatacctcggacccggcaacggactcgacaagggggaacccgtcaacgcagcggacgcggcagccctcgagcacgacaaggcctacgaccagcagctcaaggccggtgacaacccctacctcaagtacaaccacgccgacgcggagttccagcagcggcttcagggcgacacatcgtttgggggcaacctcggcagagcagtcttccaggccaaaaagagggttcttgaaccccttggtctggttgagcaagcgggtgagacggctcctggaaagaagagaccgttgattgaatccccccagcagcccgactcctccacgggtatcggcaaaaaaggcaagcagccggctaaaaagaagctcgttttcgaagacgaaactggagcaggcgacggaccccctgagggatcaacttccggagccatgtctgatgacagtgagatgcgtgcagcagctggcggagctgcagtcgagggcggacaaggtgccgatggagtgggtaatgcctcgggtgattggcattgcgattccacccggtctgagggccacgtcacgaccaccagcaccagaacctgggtcttgcccacctacaacaaccacctctacaagcgactcggagagagcctgcagtccaacacctacaacggattctccaccccctggggatactttgacttcaaccgcttccactgccacttctcaccacgtgactggcagcgactcatcaacaataactggggcatgcgacccaaagccatgcgggtcaaaatcttcaacatccaggtcaaggaggtcacgacgtcgaacggcgagacaacggtggctaataaccttaccagcacggttcagatctttgcggactcgtcgtacgaactgccgtacgtgatggatgcgggtcaagagggcagcctgcctccttttcccaacgacgtctttatggtgccccagtacggctactgtggactggtgaccggcaacacttcgcagcaacagactgacagaaatgccttctactgcctggagtactttccttcgcagatgctgcggactggcaacaactttgaaattacgtacagttttgagaaggtgcctttccactcgatgtacgcgcacagccagagcctggaccggctgatgaaccctctcatcgaccagtacctgtggggactgcaatcgaccaccaccggaaccaccctgaatgccgggactgccaccaccaactttaccaagctgcggcctaccaacttttccaactttaaaaagaactggctgcccgggccttcaatcaagcagcagggcttctcaaagactgccaatcaaaactacaagatccctgccaccgggtcagacagtctcatcaaatacgagacgcacagcactctggacggaagatggagtgcccggacccccggacctccaatggccacggctggacctgcggacagcaagttcagcaacagccagctcatctttgcggggcctaaacagaacggcaacacggccaccgtacccgggactctgatcttcacctctgaggaggagctggcagccaccaacgccaccgatacggacatgtggggcaacctacctggcggtgaccagagcaacagcaacctgccgaccgtggacagactgacagccttgggagccgtgcctggaatggtctggcaaaacagagacatttactaccagggtcccatttgggccaagattcctcataccgatggacactttcacccctcaccgctgattggtgggtttgggctgaaacacccgcctcctcaaatttttatcaagaacaccccggtacctgcgaatcctgcgacgaccttcagctctactccggtaaactccttcattactcagtacagcactggccaggtgtcggtgcagattgactgggagatccagaaggagcggtccaaacgctggaaccccgaggtccagtttacctccaactacggacagcaaaactctctgttgtgggctcccgatgcggctgggaaatacactgagcctagggctatcggtacccgctacctcacccaccacctgtaa

SEQ ID NO: 796 - DNA, 2175 bp, Artificial Sequence
  source: /note="Description of Artificial Sequence: Synthetic polynucleotide"
atgtcttttgttgatcaccctccagattggttggaagaagttggtgaaggtcttcgcgagtttttgggccttgaagcgggcccaccgaaaccaaaacccaatcagcagcatcaagatcaagcccgtggtcttgtgctgcctggttataactatctcggacccggaaacggtctcgatcgaggagagcctgtcaacagggcagacgaggtcgcgcgagagcacgacatctcgtacaacgagcagcttgaggcgggagacaacccctacctcaagtacaaccacgcggacgccgagtttcaggagaggctcgccgacgacacatccttcgggggaaacctcggaaaggcagtctttcaggccaagaaaagggttctcgaaccttttggcctggttgaagagggtgctaagacggcccctaccggaaagcggatagacgaccactttccaaaaagaaagaaggcccggaccgaagaggactccaagccttccacctcgtcagacgccgaagctggacccagcggatcccagcagctgcaaatcccagcccaaccagcctcaagtttgggagctgatacaatgtctgcgggaggtggcggcccattgggcgacaataaccaaggtgccgatggagtgggcaatgcctcgggagattggcattgcgattccacgtggatgggggacagagtcgtcaccaagtccacccgaacctgggtgctgcccagctacaacaaccaccagtaccgagagatcaaaagcggctccgtcgacggaagcaacgccaacgcctactttggatacagcaccccctgggggtactttgactttaaccgcttccacagccactggagcccccgagactggcaaagactcatcaacaactactggggcttcagaccccggtccctcagagtcaaaatcttcaacattcaagtcaaagaggtcacggtgcaggactccaccaccaccatcgccaacaacctcacctccaccgtccaagtgtttacggacgacgactaccagctgccctacgtcgtcggcaacgggaccgagggatgcctgccggccttccctccgcaggtctttacgctgccgcagtacggttacgcgacgctgaaccgcgacaacacagaaaatcccaccgagaggagcagcttcttctgcctagagtactttcccagcaagatgctgagaacgggcaacaactttgagtttacctacaactttgaggaggtgcccttccactccagcttcgctcccagtcagaacctcttcaagctggccaacccgctggtggaccagtacttgtaccgcttcgtgagcacaaataacactggcggagtccagttcaacaagaacctggccgggagatacgccaacacctacaaaaactggttcccggggcccatgggccgaacccagggctggaacctgggctccggggtcaaccgcgccagtgtcagcgccttcgccacgaccaataggatggagctcgagggcgcgagttaccaggtgcccccgcagccgaacggcatgaccaacaacctccagggcagcaacacctatgccctggagaacactatgatcttcaacagccagccggcgaacccgggcaccaccgccacgtacctcgagggcaacatgctcatcaccagcgagagcgagacgcagccggtgaaccgcgtggcgtacaacgtcggcgggcagatggccaccaacaaccagagctccaccactgcccccgcgaccggcacgtacaacctccaggaaatcgtgcccggcagcgtgtggatggagagggacgtgtacctccaaggacccatctgggccaagatcccagagacggaggcgcactttcacccctctccggccatgggcggattcggactcaaacacccaccgcccatgatgctcatcaagaacacgcctgtgcccggaaatatcaccagcttctcggacgtgcccgtcagcagcttcatcacccagtacagcaccgggcaggtcaccgtggagatggagtgggagctcaagaaggaaaactccaagaggtggaacccagagatccagtacacaaacaactacaacgacccccagtttgtggactttgccccggacagcaccggggaatacagaaccaccagacctatcggaacccgataccttacccgacccctttaa

SEQ ID NO: 797 - DNA, 2175 bp, Artificial Sequence
  source: /note="Description of Artificial Sequence: Synthetic polynucleotide"
atgtcttttgttgatcaccctccagattggttggaagaagttggtgaaggtcttcgcgagtttttgggccttgaagcgggcccaccgaaaccaaaacccaatcagcagcatcaagatcaagcccgtggtcttgtgctgcctggttataactatctcggacccggaaacggtctcgatcgaggagagcctgtcaacagggcagacgaggtcgcgcgagagcacgacatctcgtacaacgagcagcttgaggcgggagacaacccctacctcaagtacaaccacgcggacgccgagtttcaggagaagctcgccgacgacacatcctccgggggaaacctcggaaaggcagtctttcaggccaagaaaagggttctcgaaccttttggcctggttgaagagggtgctaagacggcccctaccggaaagcggatagacgaccactttccaaaaagaaagaaggcccggaccgaagaggactccaagccttccacctcgtcagacgccgaagctggacccagcggatcccagcagctgcaaatcccagcccaaccagcctcaagtttgggagctgatacaatgtctgcgggaggtggcggcccattgggcgacaataaccaaggtgccgatggagtgggcaatgcctcgggagattggcattgcgattccacgtggatgggggacagagtcgtcaccaagtccacccgaacctgggtgctgcccagctacaacaaccaccagtaccgagagatcaaaagcggctccgtcgacggaagcaacgccaacgcctactttggatacagcaccccctgggggtactttgactttaaccgcttccacagccactggagcccccgagactggcaaagactcatcaacaactactggggcttcagaccccggtccctcagagtcaaaatcttcaacattcaagtcaaagaggtcacggtgcaggactccaccaccaccatcgccaacaacctcacctccaccgtccaagtgtttacggacgacgactaccagctgccctacgtcgtcggcaacgggaccgagggatgcctgccggccttccctccgcaggtctttacgctgccgcagtacggttacgcgacgctgaaccgcgacaacacagaaaatcccaccgagaggagcagcttcttctgcctagagtactttcccagcaagatgctgagaacgggcaacaactttgagtttacctacaactttgaggaggtgcccttccactccagcttcgctcccagtcagaacctcttcaagctggccaacccgctagtggaccagtacttgtaccgcttcgtgagcacaaataacactggcggagtccagttcaacaagaacctggccgggagatacgccaacacctacaaaaactggttcccggggcccatgggccgaacccagggctggaacctgggctccggggtcaaccgcgccagtgtcagcgccttcgccacgaccaataggatggagctcgagggcgcgagttaccaggtgcccccgcagccgaacggcatgaccaacaacctccagggcagcaacacctatgccctggagaacactatgatcttcaacagccagccggcgaacccgggcaccaccgccacgtacctcgagggcaacatgctcatcaccagcgagagcgagacgcagccggtgaaccgcgtggcgtacaacgtcggcgggcagatggccaccaacaaccagagctccaccactgcccccgcgaccggcacgtacaacctccaggaaatcgtgcccggcagcgtgtggatggagagggacgtgtacctccaaggacccatctgggccaagatcccagagacgggggcgcactttcacccctctccggccatgggcggattcggactcaaacacccaccgcccatgatgctcatcaagaacacgcctgtgcccggaaatatcaccagcttctcggacgtgcccgtcagcagcttcatcacccagtacagcaccgggcaggtcaccgtggagatggagtgggagctcaagaaggaaaactccaagaggtggaacccagagatccagtacacaaacaactacaacgacccccagtttgtggactttgccccggacagcaccggggaatacagaaccaccagacctatcggaacccgataccttacccgacccctttaa

SEQ ID NO: 798 - DNA, 2175 bp, Artificial Sequence
  source: /note="Description of Artificial Sequence: Synthetic polynucleotide"
atgtcttttgttgatcaccctccagattggttggaagaagttggtgaaggtcttcgcgagtttttgggccttgaagcgggcccaccgaaaccaaaacccaatcagcagcatcaagatcaagcccgtggtcttgtgctgcctggttataactatctcggacccggaaacggtctcgatcgaggagagcctgtcaacagggcagacgaggtcgcgcgagagcacgacatctcgtacaacgagcagcttgaggcgggagacaacccctacctcaagtacaaccacgcggacgccgagtttcaggagaagctcgccgacgacacatccttcgggggaaacctcggaaaggcagtctttcaggccaagaaaagggttctcgaaccttttggcctggttgaagagggtgctaagacggcccctaccggaaagcggatagacgaccactttccaaaaagaaagaaggcccggaccgaagaggactccaagccttccacctcgtcagacgccgaagctggacccagcggatcccagcagctgcaaatcccagcccaaccagcctcaagtttgggagctgatacaatgtctgcgggaggtggcggcccattgggcgacaataaccaaggtgccgatggagtgggcaatgcctcgggagattggcattgcgattccacgtggatgggggacagagtcgtcaccaagtccacccgaacctgggtgctgcccagctacaacaaccaccagtaccgagagatcaaaagcggctccgtcgacggaagcaacgccaacgcctactttggatacagcaccccctgggggtactttgactttaaccgcttccacagccactggagcccccgagactggcaaagactcatcaacaactactggggcttcagaccccggtccctcagagtcaaaatcttcaacattcaagtcaaagaggtcacggtgcaggactccaccaccaccatcgccaacaacctcacctccaccgtccaagtgtttacggacgacgactaccagctgccctacgtcgtcggcaacgggaccgagggatgcctgccggccttccctccgcaggtctttacgctgccgcagtacggttacgcgacactgaaccgcgacaacacagaaaatcccaccgagaggagcagcttcttctgcctagagtactttcccagcaagatgctgagaacgggcaacaactttgagtttacctacaactttgaggaggtgcccttccactccagcttcgctcccagtcagaacctcttcaagctggccaacccgctggtggaccagtacttgtaccgcttcgtgagcacaaataacactggcggagtccagttcaacaagaacctggccgggagatacgccaacacctacaaaaactggttcccggggcccatgggccgaacccagggctggaacctgggctccggggtcaaccgcgccagtgtcagcgccttcgccacgaccaataggatggagctcgagggcgcgagttaccaggtgcccccgcagccgaacggcatgaccaacaacctccagggcagcaacacctatgccctggagaacactatgatcttcaacagccagccggcgaacccgggcaccaccgccacgtacctcgagggcaacatgctcatcaccagcgagagcgagacgcagccggtgaaccgcgtggcgtacaacgtcggcgggcagatggccaccaacaaccagagctccaccactgcccccgcgaccggcacgtacaacctccaggaaatcgtgcccggcagcgtgtggatggagagggacgtgtacctccaaggacccatctgggccaagatcccagagacgggggcgcactttcacccctctccggccatgggcggattcggactcaaacacccaccgcccatgatgctcatcaagagcacgcctgtgcccggaaatatcaccagcttctcggacgtgcccgtcagcagcttcatcacccagtacagcaccgggcaggtcaccgtggagatggagtgggagctcaagaaggaaaactccaagaggtggaacccagagatccagtacacaaacaactacaacgacccccagtttgtggactttgccccggacagcaccggggaatacagaaccaccagacctatcggaacccgataccttacccgacccctttaa

SEQ ID NO: 799 - DNA, 2175 bp, Artificial Sequence
  source: /note="Description of Artificial Sequence: Synthetic polynucleotide"
atgtcttttgttgatcaccctccagattggttggaagaagttggtgaaggtcttcgcgagtttttgggccctgaagcgggcccaccgaaaccaaaacccaatcagcagcatcaagatcaagcccgtggtcttgtgctgcctggttataactatctcggacccggaaacggtctcgatcgaggagagcctgtcaacagggcagacgaggtcgcgcgagagcacgacatctcgtacaacgagcagcttgaggcgggagacaacccctacctcaagtacaaccacgcggacgccgagtttcaggagaagctcgccgacgacacatccttcgggggaaacctcggaaaggcagtctttcaggccaagaaaagggttctcgaaccttttggcctggttgaagagggtgctaagacggcccctaccggaaagcggatagacgaccactttccaaaaagaaagaaggtccggaccgaagaggactccaagccttccacctcgtcagacgccgaagctggacccagcggatcccagcagctgcaaatcccagcccaaccagcctcaagtttgggagctgatacaatgtctgcgggaggtggcggcccattgggcgacaataaccaaggtgccgatggagtgggcaatgcctcgggagattggcattgcgattccacgtggatgggggacagagtcgtcaccaagtccacccgaacctgggtgccgcccagctacaacaaccaccagtaccgagagatcaaaagcggctccgtcgacggaagcaacgccaacgcctactttggatacagcaccccctgggggtactttgactttaaccgcttccacagccactggagcccccgagactggcaaagactcatcaacaactactggggcttcagaccccggtccctcagagtcaaaatcttcaacattcaagtcaaagaggtcacggtgcaggactccaccaccaccatcgccaacaacctcacctccaccgtccaagtgtttacggacgacgactaccagctgccctacgtcgtcggcaacgggaccgagggatgcctgccggccttccctccgcaggtctttacgctgccgcagtacggttacgcgacgctgaaccgcgacaacacagaaaatcccaccgagaggagcagcttcttctgcctagagtactttcccagcaagatgctgagaacgggcaacaactttgagtttacctacaactttgaggaggtgcccttccactccagcttcgctcccagtcagaacctcttcaagctggccaacccgctggtggaccagtacttgtaccgcttcgtgagcacaaataacactggcggagtccagttcaacaagaacctggccgggagatacgccaacacctacaaaaactggttcccggggcccatgggccgaacccagggctggaacctgggctccggggtcaaccgcgccagtgtcagcgccttcgccacgaccaataggatggagctcgagggcgcgagttaccaggtgcccccgcagccgaacggcatgaccaacaacctccagggcagcaacacctatgccctggagaacactatgatcttcaacagccagccggcgaacccgggcaccaccgccacgtacctcgagggcaacatgctcatcaccagcgagagcgagacgcagccggtgaaccgcgtggcgtgcaacgtcggcgggcagatggccaccaacaaccagagctccaccactgcccccgcgaccggcacgtacaacctccaggaaatcgtgcccggcagcgtgtggatggagagggacgtgtacctccaaggacccatctgggccaagatcccagagacgggggcgcactttcacccctctccggccatgggcggattcggactcaaacacccaccgcccatgatgctcatcaagaacacgcctgtgcccggaaatatcaccagcttctcggacgtgcccgtcagcagcttcatcacccagtacagcaccgggcaggtcaccgtggagatggagtgggagctcaagaaggaaaactccaagaggtggaacccagagatccagtacacaaacaactacaacgacccccagtttgtggactttgccccggacagcaccggggaatacagaaccaccagacctattggaacccgataccttacccgacccctttaa

SEQ ID NO: 800 - DNA, 2175 bp, Artificial Sequence
  source: /note="Description of Artificial Sequence: Synthetic polynucleotide"
atgtcttttgttgatcaccctccagattggttggaagaagttggtgaaggtcttcgcgagtttttgggccttgaagcgggcccaccgaaaccaaaacccaatcagcagcatcaagatcaagcccgtggtcttgtgctgcctggttataactatctcggacccggaaacggtctcgatcgaggagagcctgtcaacagggcagacgaggtcgcgcgagagcacgacatctcgtacaacgagcagcttgaggcgggagacaacccctacctcaagtacaaccacgcggacgccgagtttcaggagaagctcgccgacgacacatccttcgggggaaacctcggaaaggcagtctttcaggccaagaaaagggttctcgaaccttttggcctggttgaagagggtgctaagacggcccctaccggaaagcggatagacgaccactttccaaaaagaaagaaggcccggaccgaagaggactccaagccttccacctcgtcagacgccgaagctggacccagcggatcccagcagctgcaaatcccagcccaaccagcctcaagtttgggagctgatacaatgtctgcgggaggtggcggcccattgggcgacaataaccaaggtgccgatggagtgggcaatgcctcgggagattggcattgcgattccacgtggatgggggacagagtcgtcaccaagtccacccgaacctgggtgctgcccagctacaacaaccaccagtaccgagagatcaaaagcggctccgtcgacggaagcaacgccaacgcctactttggatacagcaccccctgggggtactttgactttaaccgcttccacagccactggagcccccgagactggcaaagactcatcaacaactactggggcttcagaccccggtccctcagagtcaaaatcttcaacattcaagtcaaagaggtcacggtgcaggactccaccaccaccatcgccaacaacctcacctccaccgtccaagtgtttacggacgacgactaccagctgccctacgtcgtcggcaacgggaccgagggatgcctgccggccttccctccgcaggtctttacgctgccgcagtacggttacgcgacgctgaaccgcgacaacaccgaaaatcccaccgagaggagcagcttcttctgcctagagtactttcccagcaagatgctgagaacgggcaacaactttgagtttacctacaactttgaggaggtgcccttccactccagcttcgctcccagtcagaacctcttcaagctggccaacccgctggtggaccagtacttgtaccgcttcgtgagcacaaataacactggcggagtccagttcaacaagaacctggccgggagatacgccaacacctacaaaaactggttcccggggcccatgggccgaacccagggctggaacctgggctccggggtcaaccgcgccagtgtcagcgccttcgccacgaccaataggatggagctcgagggcgcgagttaccaggtgcccccgcagccgaacggcatgaccaacaacctccagggcagcaacacctatgccctggagaacactatgatcttcaacagccagccggcgaacccgggcaccaccgccacgtacctcgagggcaacatgctcatcaccagcgagagcgagacgcagccggtgaaccgcgtggcgtacaacgtcggcgggcagatggccaccaacaaccagagctccaccactgcccccgcgaccggcgcgtacaacctccaggaaatcgtgcccggcagcgtgtggatggagagggacgtgtacctccaaggacccatctgggccaagatcccagagacgggggcgcactttcacccctctccggccatgggcggattcggactcaaacacccaccgcccatgatgctcatcaagaacacgcctgtgcccggaaatatcaccagcttctcggacgtgcccgtcagcagcttcatcacccagtacagcaccgggcaggtcaccgtggagatggagtgggagctcaagaaggaaaactccaagaggtggaacccagagatccagtacacaaacaactacaacgacccccagtttgtggactttgccccggacagcaccggggaatacagaaccaccagacctatcggaacccgataccttacccgacccctttaa

SEQ ID NO: 801 - DNA, 2175 bp, Artificial Sequence
  source: /note="Description of Artificial Sequence: Synthetic polynucleotide"
atgtcttttgttgatcaccctccagattggttggaagaagttggtgaaggtcttcgcgagtttttgggccttgaagcgggcccaccgaaaccaaaacccaatcagcagcatcaagatcaagcccgtggtcttgtgctgcctggttataactatctcggacccggaaacggtctcgatcgaggagagcctgtcaacagggcagacggggtcgcgcgagagcacgacatctcgtacaacgagcagcttgaggcgggagacaacccctacctcaagtacaaccacgcggacgccgagtttcaggagaagctcgccgacgacacatccttcgggggaaacctcggaaaggcagtctttcaggccaagaaaagggttctcgaaccttttggcctggttgaagagggtgctaagacggcccctaccggaaagcggatagacgaccactttccaaaaagaaagaaggcccggaccgaagaggactccaagccttccacctcgtcagacgccgaagctggacccagcggatcccagcagctgcaaatcccagcccaaccagcctcaagtttgggagctgatacaatgtctgcgggaggtggcggcccattgggcgacaataaccaaggtgccgatggagtgggcaatgcctcgggagattggcattgcgattccacgtggatgggggacagagtcgtcaccaagtccacccgaacctgggtgctgcccagctacaacaaccaccagtaccgagagatcaaaagcggctccgtcgacggaagcaacgccaacgcctactttggatacagcaccccctgggggtactttgactttaaccgcttccacagccactggagcccccgagactggcaaagactcatcaacaactactggggcttcagaccccggtccctcagagtcaaaatcttcaacattcaagtcaaagaggtcacggtgcaggactccaccaccaccatcgccaacaacctcacctccaccgtccaagcgtttacggacgacgactaccagctgccctacgtcgtcggcaacgggaccgagggatgcctgccggccttccctccgcaggtctttacgctgccgcagtacggttacgcgacgctgaaccgcgacaacacagaaaatcccaccgagaggagcagcttcttctgcctagagtactttcccagcaagatgctgagaacgggcaacaactttgagtttacctacaactttgaggaggtgcccttccactccagcttcgctcccagtcagaacctcttcaagctggccaacccgctggtggaccagtacttgtaccgcttcgtgagcacaaataacactggcggagtccagttcaacaagaacctggccgggagatacgccaacacctacaaaaactggttcccggggcccatgggccgaacccagggctggaacctgggctccggggtcaaccgcgccagtgtcagcgccttcgccacgaccaataggatggagctcgagggcgcgagttaccaggtgcccccgcagccgaacggcatgaccaacaacctccagggcagcaacacctatgccctggagaacactatgatcttcaacagccagccggcgaacccgggcaccaccgccacgtacctcgagggcaacatgctcatcaccagcgagagcgagacgcagccggtgaaccgcgtggcgtacaacgtcggcgggcagatggccaccaacaaccagagctccaccactgcccccgcgaccggcacgtacaacctccaggaaatcgtgcccggcagcgtgtggatggagagggacgtgtacctccaaggacccatctgggccaagatcccagagacgggggcgcactttcacccctctccggccatgggcggattcggactcaaacacccaccgcccatgatgctcatcaagaacacgcctgtgcccggaaatatcaccagcttctcggacgtgcccgtcagcagcttcatcacccagtacagcaccgggcaggtcaccgtggagatggagtgggagctcaagaaggaaaactccaagaggtggaacccagagatccagtacacaaacaactacaacgacccccagtttgtggactttgccccggacagcaccggggaatacagaaccaccagacctatcggaacccgataccttacccgacccctttaa

SEQ ID NO: 802 - DNA, 2175 bp, Artificial Sequence
  source: /note="Description of Artificial Sequence: Synthetic polynucleotide"
atgtcttttgttgatcaccctccagattggttggaagaagttggtgaaggtcttcgcgagtttttgggccttgaagcgggcccaccgaaaccaaaacccaatcagcagcatcaagatcaagcccgtggtcttgtgctgcctggttataactatctcggacccggaaacggtctcgatcgaggagagcctgtcaacagggcagacgaggtcgcgcgagagcacgacatctcgtacaacgagcagcttgaggcgggagacaacccctacctcaagtacaaccacgcggacgccgagtttcaggagaagctcgccgacgacacatccttcgggggaaacctcggaaaggcagtctttcaggccaagaaaagggttctcgaaccttttggcctggttgaagagggtgctaagacggcccctaccggaaagcggatagacgaccactttccaaaaagaaagaaggcccggaccgaagaggactccaagccttccacctcgtcagacgccgaagctggacccagcggatcccagcagctgcaaatcccagcccaaccagcctcaagtttgggagctgatacaatgtctgcgggaggtggcggcccattgggcgacaataaccaaggtgccgatggagtgggcaatgcctcgggagattggcattgcgattccacgtggatgggggacagagtcgtcaccaagtccacccgaacctgggtgctgcccagctacaacaaccaccagtaccgagagatcaaaagcggctccgtcgacggaagcaacgccaacgcctactttggatacagcaccccctgggggtactttgactttaaccgcttccacagccactggagcccccgagactggcaaagactcatcaacaactactggggcttcagaccccggtccctcagagtcaaaatcttcaacattcaagtcaaagaggtcacggtgcaggactccaccaccaccatcgccaacaacctcacctccaccgtccaagtgtttacggacgacgactaccagctgccctacgtcgtcggcaacgggaccgagggatgcctgccggccttccctccgcaggtctttacgctgccgcagtacggttacgcgacgctgaaccgcgacaacacagaaaatcccaccgagaggagcagcttcttctgcctagagtactttcccagcaagatgctgagaacgggcaacaactttgagtttacctacaactttgaggaggtgcccttccactccagcttcgctcccagtcagaacctcttcaagctggccaacccgctggtggaccagtacttgtaccgcttcgtgagcacaaataacactggcggagtccagttcaacaagaacctggccgggagatacgccaacacctacaaaaactggttcccggggcccatgggccgaacccagggctggaacctgggctccggggtcaaccgcgccagtgtcagcgccttcgccacgaccaataggatggagctcgagggcgcgagttactaggtgcccccgcagccgaacggcatgaccaacaacctccagggcagcaacacctatgccctggagaacactatgatcttcaacagccagccggcgaacccgggcaccaccgccacgtacctcgagggcaacatgctcatcaccagcgagagcgagacgcagccggtgaaccgcgtggcgtacaacgtcggcgggcagatggccaccaacaaccagagctccaccactgcccccgcgaccggcacgtacaacctccaggaaatcgtgcccggcagcgtgtggatggagggggacgtgtacctccaaggacccatctgggccaagatcccagagacgggggcgcactttcacccctctccggccatgggcggattcggactcaagcacccaccgcccatgatgctcatcaagaacacgcctgtgcccggaaatatcaccagcttctcggacgtgcccgtcagcagcttcatcacccagtacagcaccgggcaggtcaccgtggagatggagtgggagctcaagaaggaaaactccaagaggtggaacccagagatccagtacacaaacaactacaacgacccccagtttgtggactttgccccggacagcaccggggaatacagaaccaccagacctatcggaacccgataccttacccgacccctttaa

SEQ ID NO: 803 - DNA, 2175 bp, Artificial Sequence
  source: /note="Description of Artificial Sequence: Synthetic polynucleotide"
atgtcttttgttgatcaccctccagattggttggaagaagttggtgaaggtcttcgcgagtttttgggccttgaagcgggcccaccgaaaccaaaacccaatcagcagcatcaagatcaagcccgtggtcttgtgctgcctggttataactatctcggacccggaaacggtctcgatcgaggagagcctgtcaacagggcagacgaggtcgcgcgagagcacgacatctcgtacaacgagcagcttgaggcgggagacaacccctacctcaagtacaaccacgcggacgccgagtttcaggagaagctcgccgacgacacatccttcgggggaaacctcggaaaggcagtctttcaggccaagaaaagggttctcgaaccttttggcctggttgaagagggtgctaagacggcccctaccggaaagcggatagacgaccactttccaaaaagaaagaaggtccggaccgaagaggactccaagccttccacctcgtcagacgccgaagctggacccagcggatcccagcagctgcaaatcccagcccaaccagcctcaagtttgggagctgatacaatgtctgcgggaggtggcggcccattgggcgacaataaccaaggtgccgatggagtgggcaatgcctcgggagattggcattgcgattccacgtggatgggggacagagtcgtcaccaagtccacccgaacctgggtgctgcccagctacaacaaccaccagtaccgagagatcaaaagcggctccgtcgacggaagcaacgccaacgcctactttggatacagcaccccctgggggtactttgactttaaccgcttccacagccactggagcccccgagactggcaaagactcatcaacaactactggggcttcagaccccggtccctcagagtcaaaatcttcaacattcaagtcaaagaggtcacggtgcaggactccaccaccaccatcgccaacaacctcacctccaccgtccaagtgtttacggacgacgactaccagctgccctacgtcgtcggcaacgggaccgagggatgcctgccggccttccctccgcaggtctttacgctgccgcagtacggttacgcgacgctgaaccgcgacaacacagaaaatcccaccgagaggagcagcttcttctgcctagagtactttcccagcaagatgctgagaacgggcaacaactttgagtttacctacaactttgaggaggtgcccttccactccagcttcgctcccagtcagaacctcttcaagctggccaacccgctggtggaccagtacttgtaccgcttcgtgagcacaaataacactggcggagtccagttcaacaagaacctggccgggagatacgccaacacctacaaaaactggttcccggggcccatgggccgaacccagggctggaacctgggctccggggtcaaccgcgccagtgtcagcgccttcgccacgaccaataggatggagctcgagggcgcgagttaccaggtgcccccgcagccgaacggcatgaccaacaacctccagggcagcaacacctatgccctggagaacactatgatcttcaacagccagccggcgaacccgggcaccaccgccacgtacctcgagggcaacatgctcatcaccagcgagagcgagacgcagccggtgaaccgcgtggcgtacaacgtcggcgggcagatggccaccaacaaccagagctccaccactgcccccgcgaccggcacgtacaacctccaggaaatcgtgcccggcagcgtgtggatggagagggacgtgtacctccaaggacccatctgggccaagatcccagagacgggggcgcactttcacccctctccggccatgggcggattcggactcaaacacccaccgcccatgatgctcatcaagaacacgcctgtgcccggaaatatcaccagcttctcggacgtgcccgtcagcagcttcatcacccagtacagcaccgggcaggtcaccgtggagatggagtgggagctcaagaaggaaaactccgagaggtggaacccagagatccagtacacaaacaactacaacgacccccagtttgtggactttgccccggacagcaccggggaatacagaaccaccagacctattggaacccgataccttacccgacccctttaa

SEQ ID NO: 804 - DNA, 2175 bp, Artificial Sequence
  source: /note="Description of Artificial Sequence: Synthetic polynucleotide"
atgtcttttgttgatcaccctccagattggttggaagaagttggtgaaggtcttcgcgagtttttgggccttgaagcgggcccaccgaaaccaaaacccaatcagcagcatcaagatcaagcccgtggtcttgtgctgcctggttataactatctcggacccggaaacggtctcgatcgaggagagcctgtcaacagggcagacgaggtcgcgcgagagcacgacatctcgtacagcgagcagcttgaggcgggagacaacccctacctcaagtacaaccacgcggacgccgagtttcaggagaagctcgccgacgacacatccttcgggggaaacctcggaaaggcagtctttcaggccaagaaaagggttctcgaaccttttggcctggttgaagagggtgctaagacggcccctaccggaaagcggatagacgaccactttccaaaaagaaagaaggcccggaccgaagaggactccaagccttccacctcgtcagacgccgaagctggacccagcggatcccagcagctgcaaatcccagcccaaccagcctcaagtttgggagctgatacaatgtctgcgggaggtggcggcccattgggcgacaataaccaaggtgccgatggagtgggcaatgcctcgggagattggcattgcgattccacgtggatgggggacagagtcgtcaccaagtccacccgaacctgggtgctgcccagctacaacaaccaccagtaccgagagatcaaaagcggctccgtcgacggaagcaacgccaacgcctactttggatacagcaccccctgggggtactttgactttaaccgcttccacagccactggagcccccgagactggcaaagactcatcaacaactactggggcttcagaccccggtccctcagagtcaaaatcttcaacattcaagtcaaagaggtcacggtgcaggactccaccaccaccatcgccaacaacctcacctccaccgtccaagtgtttacggacgacgactaccagctgccctacgtcgtcggcaacgggaccgagggatgcctgccggccttccctccgcaggtctttacgctgccgcagtacggttacgcgacgctgaaccgcgacaacacagaaaatcccaccgagaggagcagcttcttctgcctagagtactttcccagcaagatgctgagaacgggcaacaactttgagtttacctacaactttgaggaggtgcccttccactccagcttcgctcccagtcagaacctcttcaagctggccaacccgctggtggaccagtacttgtaccgcttcgtgagcacaaataacactggcggagtccagttcaacaagaacctggccgggagatacgccaacacctacaaaaactggttcccggggcccatgggccgaacccagggctggaacctgggctccggggtcaaccgcgccagtgtcagcgccttcgccacgaccaataggatggagctcgagggcgcgagttaccaggtgcccccgcagccgaacggcatgaccaacaacctccagggcagcaacacctatgccctggagaacactatgatcttcaacagccagccggcgaacccgggcaccaccgccacgtacctcgagggcaacatgctcatcaccagcgagagcgagacgcagccggtgaaccgcgtggcgtacaacgtcggcgggcagatggccaccaacaaccagagctccaccactgcccccgcgaccggcacgtacaacctccaggaaatcgtgcccggcagcgtgtggatggagagggacgtgtacctccaaggacccatctgggccaagatcccagagacgggggcgcactttcacccctctccggccatgggcggattcggactcaaacacccaccgcccatgatgctcatcaagaacacgcctgtgcccggaaatatcaccagcttctcggacgtgcccgtcagcagcttcatcacccagtacagcaccgggcaggtcaccgtggagatggagtgggagctcaagaaggaaaactccaagaggtggaacccagagatccagtacacaaacaactacaacgacccccagtttgtggactttgccccggacagcaccggggaatacagaaccgccagacctatcggaacccgataccttacccgacccctttaa

SEQ ID NO: 805 - DNA, 2175 bp, Artificial Sequence
  source: /note="Description of Artificial Sequence: Synthetic polynucleotide"
atgtcttttgttgatcaccctccagattggttggaagaagttggtgaaggtcttcgcgagtttttgggccctgaagcgggcccaccgaaaccaaaacccaatcagcagcatcaagatcaagcccgtggtcttgtgctgcctggttataactatctcggacccggaaacggtctcgatcgaggagagcctgtcaacagggcagacgaggtcgcgcgagagcacgacatctcgtacaacgagcagcttgaggcgggagacaacccctacctcaagtacaaccacgcggacgccgagtttcaggagaagctcgccgacgacacatccttcgggggaaacctcggaaaggcagtctttcaggccaagaaaagggttctcgaaccttttggcctggttgaagagggtgctaagacggcccctaccggaaagcggatagacgaccactttccaaaaagaaagaaggcccggaccgaagaggactccaagccttccacctcgtcagacgccgaagctggacccagcggatcccagcagctgcaaatcccagcccaaccagcctcaagtttgggagctgatacaatgtctgcgggaggtggcggcccattgggcgacaataaccaaggtgccgatggagtgggcaatgcctcgggagattggcattgcgattccacgtggatgggggacagagtcgtcaccaagtccacccgaacctgggtgctgcccagctacaacaaccaccagtaccgagagatcaaaagcggctccgtcgacggaagcaacgccaacgcctactttggatacagcaccccctgggggtactttgactttaaccgcttccacagccactggagcccccgagactggcaaagactcatcaacaactactggggcttcagaccccggtccctcagagtcaaaatcttcaacattcaagtcaaagaggtcacggtgcaggactccaccaccaccatcgccaacaacctcacctccaccgtccaagtgtttacggacgacgactaccagctgccctacgtcgtcggcaacgggaccgagggatgcctgccggccttccctccgcaggtctttacgctgccgcagtacggttacgcgacgctgaaccgcgacaacacagaaaatcccaccgagaggagcagcttcttctgcctagagtactttcccagcaagatgctgagaacgggcaacaactttgagtttacctacaactttgaggaggtgcccttccactccagcttcgctcccagtcagaacctcttcaagctggccaacccgctggtggaccagtacttgtaccgcttcgtgagcacaaataacactggcggagtccagttcaacaagaacctggccgggagatacgccaacacctacaaaaactggttcccggggcccatgggccgaacccagggctggaacctgggctccggggtcaaccgcgccagtgtcagcgccttcgccacgaccaataggatggagctcgagggcgcgagttaccaggtgcccccgcagccgaacggcatgaccaacaacctccagggcagcaacacctatgccctggagaacactatgatcttcaacagccagccggcgaacccgggcaccaccgccacgtacctcgagggcaacatgctcatcaccagcgagagcgagacgcagccggtgaaccgcgtggcgtacaacgtcggcgggcagatgaccaccaacaaccagagctccaccactgcccccgcgaccggcacgtacaacctccaggaaatcgtgcccggcagcgtgtggatggagagggacgtgtacccccaaggacccatctgggccaagatcccagagacgggggcgcactttcacccctctccggccatgggcggattcggactcaaacacccaccgcccatgatgctcatcaagaacacgcctgtgcccggaaatatcaccagcttctcggacgtgcccgtcagcagcttcatcacccagtacagcaccgggcaggtcaccgtggagatggagtgggagctcaagaaggaaaactccaagaggtggaacccagagatccagtacacaaacaactacaacgacccccagtttgtggactttgccccggacagcaccggggaatacaggaccaccagacctatcggaacccgataccttacccgacccctttaa

SEQ ID NO: 806 - DNA, 2175 bp, Artificial Sequence
  source: /note="Description of Artificial Sequence: Synthetic polynucleotide"
atgtcttttgttgatcaccctccagattggttggaagaagttggtgaaggtcttcgcgagtttttgggccttgaagcgggcccaccgaaaccaaaacccaatcagcagcatcaagatcaagcccgtggtcttgtgctgcctggttataactatctcggacccggaaacggtctcgatcgaggagagcctgtcaacagggcagacgaggtcgcgcgagagcacgacatctcgtacaacgagcagcttgaggcgggagacaacccctacctcaagtacaaccacgcggacgccgagtttcaggagaagctcgccgacgacacatccttcgggggaaacctcggaaaggcagtctttcaggccaagaaaagggttctcgaaccttttggcctggttgaagagggtgctaagacggcccctaccggaaagcggatagacgaccactttccaaaaagaaagaaggcccggaccgaagaggactccaagccttccacctcgtcagacgccgaagctggacccagcggatcccagcagctgcaaatcccagcccaaccagcctcaagtttgggagctgatacaatgtctgcgggaggtggcggcccattgggcgacaataaccaaggtgccgatggagtgggcaatgcctcgggagattggcattgcgattccacgtggatgggggacagagtcgtcaccaagtccacccgaacctgggtgctgcccagctacaacaaccaccagtaccgagagatcaaaagcggctccgtcgacggaagcaacgccaacgcctactttggatacagcaccccctgggggtactttgactttaaccgcttccacagccactggagcccccgagactggcaaagactcatcaacaactactggggcttcagaccccggtccctcagagtcaaaatcttcaacattcaagtcaaagaggtcacggtgcaggactccaccaccaccatcgccaacaacctcacctccaccgtccaagtgtttacggacgacgactaccagctgccctacgtcgtcggcaacgggaccgagggatgcctgccggccttccctccgcaggtctttacgctgccgcagtacggttacgcgacgctgaaccgcgacaacacagaaaatcccaccgagaggagcagcttcctctgcctagagtactttcccagcaagatgctgagaacgggcaacaactttgagtttacctacaactttgaggaggtgcccttccactccagcttcgctcccagtcagaacctcttcaagctggccaacccgctggtggaccagtacttgtaccgcttcgtgagcacaaataacactggcggagtccagttcaacaagaacctggccgggagatacgccaacacctacaaaaactggttcccggggcccatgggccgaacccagggctggaacctgggctccggggtcaaccgcgccagtgtcagcgccttcgccacgaccaataggatggagctcgagggcgcgagttaccaggtgcccccgcagccgaacggcatgaccaacaacctccagggcagcaacacctatgccctggagaacactatgatcttcaacagccagccggcgaacccgggcaccaccgccacgtacctcgagggcaacatgctcatcaccagcgagagcgagacgcagccggtgaaccgcgtggcgtacaacgtcggcgggcagatggccaccaacaaccagagctccaccactgcccccgcgaccggcacgtacaacctccaggaaatcgtgcccggcagcgtgtggatgaagagggacgtgtacctccaaggacccatctgggccaagatcccagagacgggggcgcactttcacccctctccggccatgggcggattcggactcaaacacccaccgcccatgatgctcatcaagaacacgcctgtgcccggaaatatcaccagcttctcggacgtgcccgtcagcagcttcatcacccagtacagcaccgggcaggtcaccgtggagatggagtgggagctcaagaaggaaaactccaagaggtggaacccagagatccagtacacaaacaactacaacgacccccagtttgtggactttgccccggacagcaccggggaatacagaaccaccagacctatcggaacccgataccttacccgacccctttaa

SEQ ID NO: 807 - DNA, 2175 bp, Artificial Sequence
  source: /note="Description of Artificial Sequence: Synthetic polynucleotide"
atgtcttttgttgatcaccctccagattggttggaagaagttggtgaaggtcttcgcgagtttttgggccttgaggcgggcccaccgaaaccaaaacccaatcagcagcatcaagatcaagcccgtggtcttgtgctgcctggttataactatctcggacccggaaacggtctcgatcgaggagagcctgtcaacagggcagacgaggtcgcgcgagagcacgacatctcgtacaacgagcagcttgaggcgggagacaacccctacctcaagtacaaccacgcggacgccgagtttcaggagaagctcgccgacgacacatccttcgggggaaacctcggaaaggcagtctttcaggccaagaaaagggttctcgaaccttttggcctggttgaagagggtgctaagacggcccctaccggaaagcggatagacgaccactttccaaaaagaaagaaggcccggaccgaagaggactccaagccttccaccccgtcagacgccgaagctggacccagcggatcccagcagctgcaaatcccagcccaaccagcctcaagtttgggagctgatacaatgtctgcgggaggtggcggcccattgggcgacaataaccaaggtgccgatggagtgggcaatgcctcgggagattggcattgcgattccacgtggatgggggacagagtcgtcaccaagtccacccgaacctgggtgctgcccagctacaacaaccaccagtaccgagagatcaaaagcggctccgtcgacggaagcaacgccaacgcctactttggatacagcaccccctgggggtactttgactttaaccgcttccacagccactggagcccccgagactggcaaagactcatcaacaactactggggcttcagaccccggtccctcagagtcaaaatcttcaacattcaagtcaaagaggtcacggtgcaggactccaccaccaccatcgccaacaacctcacctccaccgtccaagtgtttacggacgacgactaccagctgccctacgtcgtcggcaacgggaccgagggatgcctgccggccttccctccgcaggtctttacgctgccgcagtacggttacgcgacgctgaaccgcgacaacacagaaaatcccaccgagaggagcagcttcttctgcctagagtactttcccagcaagatgctgagaacgggcaacaactttgagtttacctacaactttgaggaggtgcccttccactccagcttcgctcccagtcagaacctcttcaagctggccaacccgctggtggaccagtacttgtaccgcttcgtgagcacaaataacactggcggagtccagttcaacaagaacctggccgggagatacgccaacacctacaaaaactggttcccggggcccatgggccgaacccagggctggaacctgggctccggggtcaaccgcgccagtgtcagcgccttcgccacgaccaataggatggagctcgagggcgcgagttaccaggtgcccccgcagccgaacggcatgaccaacaacctccagggcagcaacacctatgccctggagaacactatgatcttcaacagccagccggcgaacccgggcaccaccgccacgtacctcgagggcaacatgctcatcaccagcgagagcgagacgcagccggtgaaccgcgtggcgtacaacgtcggcgggcagatggccaccaacaaccagagctccaccactgcccccgcgaccggcacgtacaacctccaggaaatcgtgcccggcagcgtgtggatggagagggacgtgtacctccaaggacccatctgggccaagatcccagagacgggggcgcactttcacccctctccggccatgggcggattcggactcaaacacccaccgcccatgatgctcatcaagaacacgcctgtgcccggaaatatcaccagcttctcggacgtgcccgtcagcagcttcatcacccagtacagcaccgggcaggtcaccgtggagatggagtgggagctcaagaaggaaaactccaagaggtggaacccagagatccagtacacaaacaactacaacgacccccagtttgtggactttgccccggacagcaccggggaatacagaaccaccagacctatcggaacccgataccttacccgacccctttaa

SEQ ID NO: 808 - DNA, 2175 bp, Artificial Sequence
  source: /note="Description of Artificial Sequence: Synthetic polynucleotide"
atgtcttttgttgatcaccctccagattggttggaagaagttggtgaaggtcttcgcgagtttttgggccttgaagcgggcccaccgaaaccaaaacccaatcagcagcatcaagatcaagcccgtggtcttgtgctgcctggttataactatctcggacccggaaacggtctcgatcgaggagagcctgtcaacagggcagacgaggtcgcgcgagagcacgacatctcgtacaacgagcagcttgaggcgggagacaacccctacctcaagtacaaccacgcggacgccgagtttcaggagaagctcgccgacgacacatccttcgggggaaacctcggaaaggcagtctttcaggccaagaaaagggttctcgaaccttttggcctggttgaagagggtgctaagacggcccctaccggaaagcggatagacgaccactttccaaaaagaaagaaggcccggaccgaagaggactccaagccttccacctcgtcagacgccgaagctggacccagcggatcccagcagctgcaaatcccagcccaaccagcctcaagtttgggagctgatacaatgtctgcgggaggtggcggcccattgggcgacaataaccaaggtgccgatggagtgggcaatgcctcgggagattggcattgcgattccacgtggatgggggacagagtcgtcaccaagtccacccgaacctgggtgctgcccagctacaacaaccaccagtaccgagagatcaaaagcggctccgtcgacggaagcaacgccaacgcctactttggatacagcaccccctgggggtactttgactttaaccgcttccacagccactggagcccccgagactggcaaagactcatcaacaactactggggcttcagaccccggtccctcagagtcaaaatcttcaacattcaagtcaaagaggtcacggtgcaggactccaccaccaccatcgccaacaacctcacctccaccgtccaagtgtttacggacgacgactaccagctgccctacgtcgtcggcaacgggaccgagggatgcctgccggccttccctccgcaggtctttacgctgccgcagtacggttacgcgacgctgaaccgcgacaacacagaaaatcccaccgagaggagcagcttcttctgcctagagtactttcccagcaagatgctgagaacgggcaacaactttgagtttacctacaactttgaggaggtgcccttccactccagcttcgctcccagtcagaacctcttcaagctggccaacccgctggtggaccagtacttgtaccgcttcgtgagcacaaataacactggcggagtccagttcaacaagaacctggccgggagatacgccaacacccacaaaaactggttcccggggcccatgggccgaacccagggctggaacctgggctccggggtcaaccgcgccagtgtcagcgccttcgccacgaccaataggatggagctcgagggcgcgagttaccaggtgcccccgcagtcgaacggcatgaccaacaacctccggggcagcaacacctatgccctggagaacactatgatcttcaacagccagccggcgaacccgggcaccaccgccacgtacctcgagggcaacatgctcatcaccagcgagagcgagacgcagccggtgaaccgcgtggcgtacaacgtcggcgggcagatggccaccaacaaccagagctccaccactgcccccgcgaccggcacgtacaacctccaggaaatcgtgcccggcagcgtgtggatggagagggacgtgtacctccaaggacccatctgggccaagatcccagagacgggggcgcactttcacccctctccggccatgggcggattcggactcaaacacccaccgcccatgatgctcatcaagaacacgcctgtgcccggaaatatcaccagcttctcggacgtgcccgtcagcagcttcatcacccagtacagcaccgggcaggtcaccgtggagatggagtgggagctcaagaaggaaaactccaagaggtggaacccagagatccagtacacaaacaactacaacgacccccagtttgtggactttgccccggacagcaccggggaatacagaaccaccagacctatcggaacccgataccttacccgacccctttaa

SEQ ID NO: 809 - DNA, 2175 bp, Artificial Sequence
  source: /note="Description of Artificial Sequence: Synthetic polynucleotide"
atgtcttttgttgatcaccctccagattggttggaagaagttggtgaaggtcttcgcgagtttttgggccttgaagcgggcccaccgaaaccaaaacccaatcagcagcatcaagatcaagcccgtggtcttgtgctgcctggttataactatctcggacccggaaacggtctcgatcgaggagagcctgtcaacagggcagacgaggtcgcgcgagagcacgacatctcgtacaacgagcagcttgaggcgggagacaacccctacctcaagtacaaccacgcggacgccgagtttcaggagaagctcgccgacgacacatccttcgggggaaacctcggaaaggcagtctttcaggccaagaaaagggttctcgaaccttttggcctggttgaagagggtgctaagacggcccctaccggaaagcggatagacgaccactttccaaaaagaaagaaggcccggaccgaagaggactccaagccttccacctcgtcagacgccgaagctggacccagcggatcccagcagctgcaaatcccagcccaaccagcctcaagtttgggagctgatacaatgtctgcgggaggtggcggcccattgggcgacaataaccaaggtgccgatggagtgggcaatgcctcgggagattggcattgcgattccacgtggatgggggacagagtcgtcaccaagtccacccgaacctgggtgctgcccagctacaacaaccaccagtaccgagagatcaaaagcggctccgtcgacggaagcaacgccaacgcctactttggatacagcaccccctgggggtactttgactttaaccgcttccacagccactggagcccccgagactggcaaagactcatcaacaactactggggcttcagaccccggtccctcagagtcaaaatcttcaacattcaagtcaaagaggtcacggtgcaggactccaccaccaccatcgccaacaacctcacctccaccgtccaagtgtttacggacgacgactaccagctgccctacgtcgtcggcaacgggaccgagggatgcctgccggccttccctccgcaggtctttacgctgccgcagtacggttacgcgacgctgaaccgcgacaacacagaaaatcccaccgagaggagcagcttcttctgcctagagtactttcccagcaagatgctgagaacgggcaacaactttgagtttacctacaactttgaggaggtgcccttccactccagcttcgctcccagtcagaacctcttcaagctggccaacccgctggtggaccagtacttgtaccgcttcgtgagcacaaataacactggcggagtccagttcaacaagaacctggccgggagatacgccaacacctacaaaaactggttcccggggcccatgggccgaacccagggctggaacctgggctccggggtcaaccgcgccagtgtcagcgccttcgccacgaccaataggatggagctcgagggcgcgagttaccaggtgcccccgcagccgaacggcatgaccaacaacctccagggcagcaacacctatgccctggagaacactatgatcttcaacagccagccggcgaacccgggcaccaccgccacgtacctcgagggcaacatgctcatcaccagcgagagcgagacgcagccggtgaaccgcgtggcgtacagcgtcggcgggcagatggccaccaacaaccagagctccaccactgcccccacgaccggcacgtacaacctccaggaaatcgtgcccggcagcgtgtggatggagagggacgtgtacctccaaggacccatctgggccaagatcccagagacgggggcgcactttcacccctctccggccatgggcggattcagactcaaacacccaccgcccatgatgctcatcaagaacacgcctgtgcccggaaatatcaccagcttctcggacgtgcccgtcagcagcttcatcacccagtacagcaccgggcaggtcaccgtggagatggagtgggagctcaagaaggaaaactccaagaggtggaacccagagatccagtacacaaacaactacaacgacccccagtttgtggactttgccccggacagcaccggggaatacagaaccaccagacctatcggaacccgataccttacccgacccctttaa

SEQ ID NO: 810 - DNA, 2175 bp, Artificial Sequence
  source: /note="Description of Artificial Sequence: Synthetic polynucleotide"
atgtcttttgttgatcaccctccagattggttggaagaagttggtgaaggtcttcgcgagtttttgggccttgaagcgggcccaccgaaaccaaaacccaatcagcagcatcaagatcaagcccgtggtcttgtgctgcctggttataactatctcggacccggaaacggtctcgatcgaggagagcctgtcaacagggcagacgaggtcgcgcgagagcacgacatctcgtacaacgagcagcttgaggcgggagacaacccctacctcaagtacaaccacgcggacgccgagtttcaggagaagctcgccgacgacacatccttcgggggaaacctcggaaaggcagtctttcaggccaagaaaagggttctcgaaccttttggcctggttgaagagggtgctaagacggcccctaccggaaagcggatagacgaccactttccaaaaagaaagaaggcccggaccgaagaggactccaagccttccacctcgtcagacgccgaagctggacccagcggatcccagcagctgcaaatcccagcccaaccagcctcaagtttgggagctgatacaatgtctgcgggaggtggcggcccattgggcgacaataaccaaggtgccgatggagtgggcaatgcctcgggagattggcattgcgattccacgtggatgggggacagagtcgtcaccaagtccacccgaacctgggtgctgcccagctacaacaaccaccagtaccgagagatcaaaagcggctccgtcgacggaagcaacgccaacgcctactttggatacagcaccccctgggggtactttgactttaaccgcttccacagccactggagcccccgagactggcaaagactcatcaacaactactggggcttcagaccccggtccctcagagtcaaaatcttcaacattcaagtcaaagaggtcacggtgcaggactccaccaccaccatcgccaacaacctcacctccaccgtccaagtgtttacggacgacgactaccagctgccctacgtcgtcggcaacgggaccgagggatgcctgccggccttccctccgcaggtctttacgctgccgcagtacggttacgcgacgctgaaccgcgacaacacagaaaatcccaccgagaggagcagcttcttctgcctagagtactttcccagcaagatgctgagaacgggcaacaactttgagtttacctacaactttgaggaggtgcccttccactccagcttcgctcccagtcagaacctcttcaagctggccaacccgctggtggaccagtacttgtaccgcttcgtgagcacaaataacactggcggagtccagttcaacaagaacctggccgggagatacgccaacacctacaaaaactggttcccggggcccatgggccgaacccagggctggaacctgggctccggggtcaaccgcgccagtgtcagcgccttcgccgcgaccaataggatggagctcgagggcgcgagttaccaggtgcccccgcagccgaacggcatgaccaacaacctccagggcagcaacacctatgccctggagaacactatgatcttcaacagccagccggcgaacccgggcaccaccgccacgtacctcgagggcaacatgctcatcaccagcgagagcgagacgcagccggtgaaccgcgtggcgtacaacgtcggcgggcagatggccaccaacaaccagagctccaccactgcccccgcgaccggcacgtacaacctccaggaaatcgtgcccggcggcgtgtggatggagagggacgtgtacctccaaggacccatctgggccaagatcccagagacgggggcgcactttcacccctctccggccatgggcggattcggactcaaacacccaccgcccatgatgctcatcaagaacacgcctgtgcccggaaataccaccagcttctcggacgtgcccgtcagcagcttcatcacccagtacagcaccgggcaggtcaccgtggagatggagtgggagctcaagaaggaaaactccaagaggtggaacccagagatccagtacacaaacaactacaacgacccccagtttgtggactttgccccggacagcaccggggaatacagaaccaccagacctatcggaacccgataccttacccgacccctttaa

SEQ ID NO: 811 - DNA, 2175 bp, Artificial Sequence
  source: /note="Description of Artificial Sequence: Synthetic polynucleotide"
atgtcttttgttgatcaccctccagattggttggaagaagttggtgaaggtcttcgcgagtttttgggccttgaagcgggcccaccgaaaccaaaacccaatcagcagcatcaagatcaagcccgtggtcttgtgctgcctggttataactatctcggacccggaaacggtctcgatcgaggagagcctgtcaacagggcagacgaggtcgcgcgagagcacgacatctcgtacaacgagcagcttgaggcgggagacaacccctacctcaagtacaaccacgcggacgccgagtttcaggagaagctcgccgacgacacatccttcgggggaaacctcggaaaggtagtctttcaggccaagaaaagggttctcgaaccttttggcctggttgaagagggtgctaagacggcccctaccggaaagcggatagacgaccactttccaaaaagaaagaaggcccggaccgaagaggactccaagccttccacctcgtcagacgccgaagctggacccagcggatcccagcagctgcaaatcccagcccaaccagcctcaagtttgggagctgatacaatgtctgcgggaggtggcggcccattgggcggcaataaccaaggtgccgatggagtgggcaatgcctcgggagattggcattgcgattccacgtggatgggggacagagtcgtcaccaagtccacccgaacctgggtgctgcccagctacaacaaccaccagtaccgagagatcaaaagcggctccgtcgacggaagcaacgccaacgcctactttggatacagcaccccctgggggtactttgactttaaccgcttccacagccactggggcccccgagactggcaaagactcatcaacaactactggggcttcagaccccggtccctcagagtcaaaatcttcaacattcaagtcaaagaggtcacggtgcaggactccaccaccaccatcgccaacaacctcacctccaccgtccaagtgtttacggacgacgactaccagctgccctacgtcgtcggcaacgggaccgagggatgcctgccggccttccctccgcaggtctttacgctgccgcagtacggttacgcgacgctgaaccgcgacaacacagaaaatcccaccgagaggagcagcttcttctgcctagagtactttcccagcaagatgctgagaacgggcaacaactttgagtttacctacaactttgaggaggtgcccttccactccagcttcgctcccagtcagaacctcttcaagctggccaacccgctggtggaccagtacttgtaccgcttcgtgagcacaaataacactggcggagtccagttcaacaagaacctggccgggagatacgccaacacctacaaaaactggttcccggggcccatgggccgaacccagggctggaacctgggctccggggtcaaccgcgccagtgtcagcgccctcgccacgaccaataggatggagctcgagggcgcgagttaccaggtgcccccgcagccgaacggcatgaccaacaacctccagggcagcaacacctatgccctggagaacactatgatcttcaacagccagccggcgaacccgggcaccaccgccacgtacctcgagggcaacatgctcatcaccagcgagagcgagacgcagccggtgaaccgcgtggcgtacaacgtcggcgggcagatggccaccaacaaccagagctccaccactgcccccgcgaccggcacgtacaacctccaggaaatcgtgcccggcagcgtgtggatggagagggacgtgtacctccaaggacccatctgggccaagatcccagagacgggggcgcactttcacccctctccggccatgggcggattcggactcaaacacccaccgcccatgatgctcatcaagaacacgcctgtgcccggaaatatcaccagcttctcggacgtgcccgtcagcagcttcatcacccagtacagcaccgggcaggtcaccgtggagatggagtgggagctcaagaaggaaaactccaagaggtggaacccagagatccagtacacaaacaactacaacgacccccagtttgtggactttgccccggacagcaccggggaatacagaaccaccagacctatcggaacccgataccttacccgacccctttaa

SEQ ID NO: 812 - DNA, 2175 bp, Artificial Sequence
  source: /note="Description of Artificial Sequence: Synthetic polynucleotide"
atgtcttttgttgatcaccctccagattggttggaagaagttggtgaaggtcttcgcgagtttttgggccttgaagcgggcccaccgaaaccaaaacccaatcagcagcatcaagatcaagcccgtggtcttgtgctgcctggttataactatctcggacccggaaacggtctcgatcgaggagagcctgtcaacagggcagacgaggtcgcgcgagagcacgacatctcgtacaacgagcagcttgaggcgggagacaacccctacctcaagtacaaccacgcggacgccgagtttcaggagaagctcgccgacgacacatccttcgggggaaacctcggaaaggcagtctttcaggccaagaaaagggttctcgaaccttttggcctggttgaagagggtgctaagacggcccctaccggaaagcggatagacgaccactttccaaaaagaaagaaggcccggaccgaagaggactccaagccttccacctcgtcagacgccgaagctggacccagcggatcccagcagctgcaaatcccagcccaaccagcctcaagtttgggagctgatacaatgtctgcgggaggtggcggcccattgggcgacaataaccaaggtgccgatggagtgggcaatgcctcgggagattggcattgcgattccacgtggatgggggacagagtcgtcaccaagtccacccgaacctgggtgctgcccagctacaacaaccaccagtaccgagagatcaaaagcggctccgtcgacggaagcaacgccaacgcctactttggatacagcaccccctgggggtactttgactttaaccgcttccacagccactggagcccccgagactggcaaagactcatcaacaactactggggcttcagaccccggtccctcagagtcaaaatcttcaacattcaagtcaaagaggtcacggtgcaggactccaccaccaccatcgccaacaacctcacctccaccgtccaagtgtttacggacgacgactaccagctgccctacgtcgtcggcaacgggaccgagggatgcctgccggccttccctccgcaggtctttacgctgccgcagtacggttacgcgacgctgaaccgcgacaacacagaaaatcccaccgagaggagcagcttcttctgcctagagtactttcccagcaagatgctgagaacgggcaacaactttgagtttacctacaactttgaggaggtgcccttccactccagcttcgctcccagtcagaacctcttcaagctggccaacccgctggtggaccagtacttgtaccgcttcgtgagcacaaataacactggcggagtccagttcaacaagaacctggccgggagatacgccaacacctacaaaaactggttcccggggcccatgggccgaacccagggctggaacctgggctccggggtcaaccgcgccagtgtcagcgccttcgccacgaccaataggatggagctcgagggcgcgagttaccaggtgcccccgcagccgaacggcatgaccaacaacctccagggcagcaacacctatgccctggagaacactatgatcttcaacagccagccggcgaacccgggcaccaccgccacgtacctcgagggcaacatgctcatcaccagcgagagcgagacgcagccggtgaaccgcgtggcgtacaacgtcggcgggcagatggccaccaacaaccagagctccaccactgcccccgcgaccggcacgtacaacctccaggaaatcgtgcccggcagcgtgtggatggagagggacgtgtacctccaaggacccatctgagccaagatcccagagacgggggcgcactttcacccctctccggccatgggcggattcggactcaaacacccaccgcccatgatgctcatcaagaacacgcctgtgcccggaaatatcaccagcttctcggacgtgcccgtcagcagcttcatcacccagtacagcaccgggcaggtcaccgtggagatggagtgggagctcaagaaggaaaactccaagaggtggaacccagagatccagtacacaaacaactacaacgacccccagtttgtggactttgccccggacagcaccggggaatgcagaaccaccagacctatcggaacccgataccttacccgacccctttaa

SEQ ID NO: 813 - DNA, 2175 bp, Artificial Sequence
  source: /note="Description of Artificial Sequence: Synthetic polynucleotide"
atgtcttttgttgatcaccctccagattggttggaagaagttggtgaaggtcttcgcgagtttttgggccttgaagcgggcccaccgaaaccaaaacccaatcagcagcatcaagatcaagcccgtggtcttgtgctgcctggttataactatctcggacccggaaacggtctcgatcgaggagagcctgtcaacagggcagacgaggtcgcgcgagagcacgacatctcgtacaacgagcagcttgaggcgggagacaacccctacctcaagtacaaccacgcggacgccgagtttcaggagaagctcgccgacgacacatccttcgggggaaacctcggaaaggcagtctttcaggccaagaaaagggttctcgaaccttttggcctggttgaagagggtgctaagacggcccctaccggaaagcggatagacgaccactttccaaaaagaaagaaggcccggaccgaagaggactccaagccttccacctcgtcagacgccgaagctggacccagcggatcccagcagctgcaaatcccagcccaaccagcctcaagtttgggagctgatacaatgtctgcgggaggtggcggcccattgggcgacaataaccaaggtgccgatggagtgggcaatgcctcgggagattggcattgcgattccacgtggatgggggacagagtcgtcaccaagtccacccgaacctgggtgctgcccagctacaacaaccaccagtaccgagagatcaaaagcggctccgtcgacggaagcaacgccaacgcctactttggatacagcaccccctgggggtactttgactttaaccgcttccacagccactggagcccccgagactggcaaagactcatcaacaactactggggcttcagaccccggtccctcagagtcaaaatcctcaacattcaagtcaaagaggtcacggtgcaggactccaccaccaccatcgccaacaacctcacctccaccgtccaagtgtttacggacgacgactaccagctgccctacgtcgtcggcaacgggaccgagggatgcctgccggccttccctccgcaggtctttacgctgccgcagtacggttacgcgacgctgaaccgcgacaacacagaaaatcccaccgagaggagcagcttcttctgcctagagtactttcccagcaagatgctgagaacgggcaacaactttgagtttacctacaactttgaggaggtgcccttccactccagcttcgctcccagtcagaacctcttcaagctggccaacccgctggtgggccagtacttgtaccgcttcgtgagcacaaataacactggcggagtccagttcaacgagaacctggccgggagatacgccaacacctacaaaaactggttcccggggcccatgggccgaacccagggctggaacctgggctccggggtcaaccgcgccagtgtcagcgccttcgccacgaccaataggatggagctcgagggcgcgagttaccaggtgcccccgcagccgaacggcatgaccaacaacctccagggcagcaacacctatgccctggagaacactatgatcttcaacagccagccggcgaacccgggcaccaccgccacgtacctcgagggcaacatgctcatcaccagcgagagcgagacgcagccggtgaaccgcgtggcgtacaacgtcggcgggcagatggccaccaacaaccagagctccaccactgcccccgcgaccggcacgtacaacctccaggaaatcgtgcccggcagcgtgtggatggagagggacgtgtacctccaaggacccatctgggccaagatcccagagacgggggcgcactttcacccctctccggccatgggcggattcggactcaaacacccaccgcccatgatgctcatcaagaacacgcctgtgcccggaaatatcaccagcttctcggacgtgcccgtcagcagcttcatcacccagtacagcaccgggcaggccaccgtggagatggagtgggagctcaagaaggaaaactccaagaggtggaacccagagatccagtacacaaacaactacaacgacccccagtttgtggactttgccccggacagcaccggggaatacagaaccaccagacctatcggaacccgataccttacccgacccctttaa

SEQ ID NO: 814 - DNA, 2175 bp, Artificial Sequence
  source: /note="Description of Artificial Sequence: Synthetic polynucleotide"
atgtcttttgttgatcaccctccagattggttggaagaagttggtgaaggtcttcgcgagtttttgggccttgaagcgggcccaccgaaaccaaaacccaatcagcagcatcaagatcaagcccgtggtcttgtgctgcctggttataactatctcggacccggaaacggcctcgatcgaggagagcctgtcaacagggcagacgaggtcgcgcgagagcacgacatctcgtacaacgagcagcttgaggcgggagacaacccctacctcaagtacaaccacgcggacgccgagtttcaggagaagctcgccgacgacacatccttcgggggaaacctcggaaaggcagtctttcaggccaagaaaagggttctcgaaccttttggcctggttgaagagggtgctaagacggcccctaccggaaagcggatagacgaccactttccaaaaagaaagaaggcccggaccgaagaggactccaagccttccacctcgtcagacgccgaagctggacccagcggatcccagcagctgcaaatcccagcccaaccagcctcaagtttgggagctgatacaatgtctgcgggaggtggcggcccattgggcgacaataaccaaggtgccgatggagtgggcaatgcctcgggagattggcattgcgattccacgtggatgggggacagagtcgtcaccaagtccacccgaacctgggtgctgcccagctacaacaaccaccagtaccgagagatcaaaagcggctccgtcgacggaagcaacgccaacgcctactttggatacagcaccccctgggggtactttgactttaaccgcttccacagccactggagcccccgagactggcaaagactcatcaacaactactggggcttcagaccccggtccctcagagtcaaaatcttcaacattcaagtcaaagaggtcacggtgcaggactccaccaccatcatcgccaacaacctcacctccaccgtccaagtgtttacggacgacgactaccagctgccctacgtcgtcggcaacgggaccgagggatgcctgccggccttccctccgcaggtctttacgctgccgcagtacggttacgcgacgctgaaccgcgacaacacagaaaatcccaccgagaggagcagcttcttctgcctagagtactttcccagcaagatgctgagaacgggcaacaactttgagtttacctacaactttgaggaggtgcccttccactccagcttcgcccccagtcagaacctcttcaagctggccaacccgctggtggaccagtacttgtaccgcttcgtgagcacaaataacactggcggagtccagttcaacaagaacctggccgggagatacgccaacacctacaaaaactggttcccggggcccatgggccgaacccagggctggaacctgggctccggggtcaaccgcgccagtgtcagcgccttcgccacgaccaataggatggagctcgagggcgcgagttaccaggtgcccccgcagccgaacggcatgaccaacaacctccagggcagcaacacctatgccctggagaacactatgatcttcaacagccagccggcgaacccgggcaccaccgccacgtacctcgagggcaacatgctcatcaccagcgagagcgagacgcagccggtgaaccgcgtggcgtacaacgtcggcgggcagatggccaccaacaaccagagctccaccactgcccccgcgaccggcacgtacaacctccaggaaatcgtgcccggcagcgtgtggatggagagggacgtgtacctccaaggacccatctgggccaagatcccagagacgggggcgcactttcacccctctccggccatgggcggattcggactcaaacacccaccgcccatgatgctcatcaagaacacgcctgtgcccggaaatatcaccagcttctcggacgtgcccgtcagcagcttcatcacccagtacagcaccgggcaggtcaccgtggagatggagtgggagctcaagaaggaaaactccaagaggtggaacccagagatccagtacacaaacaactacaacgacccccagtttgtggactttgccccggacagcaccggggaatacagaaccaccagacctatcggaacccgataccttacccgacccctttaa

SEQ ID NO: 815 - DNA, 2175 bp, Artificial Sequence
  source: /note="Description of Artificial Sequence: Synthetic polynucleotide"
atgtcttttgttgatcaccctccagattggttggaagaagttggtgaaggtcttcgcgagtttttgggccttgaagcgggcccaccgaaaccaaaacccaatcagcagcatcaagatcaagcccgtggtcttgtgctgcctggttataactatctcggacccggaaacggtctcgatcgaggagagcctgtcaacagggcagacgaggtcgcgcgagagcacgacatctcgtacaacgagcagcttgaggcgggagacaacccctacctcaagtacaaccacgcggacgccgagtttcaggagaagctcgccgacgacacatccttcgggggaaacctcggaaaggcagtctttcaggccaagaaaagggttctcgaaccttttggcctggttgaagagggtgctaagacggcccctaccggaaagcggatagacgaccactttccaaaaagaaagaaggcccggaccgaagaggactccaagccttccacctcgtcagacgccgaagctggacccagcggatcccagcagctgcaaatcccagcccaaccagcctcaagtttgggagctgatacaatgtctgcgggaggtggcggcccattgggcgacaataaccaaggtgccgatggagtgggcaatgcctcgggagattggcattgcgattccacgtggatgggggacagagtcgtcaccaagtccacccgaacctgggtgctgcccagctacaacaaccaccagtaccgagagatcaaaagcggctccgtcgacggaagcaacgccaacgcctactttggatacagcaccccctgggggtactttgactttaaccgcttccacagccactggagcccccgagactggcaaagactcatcaacaactactggggcttcagaccccggtccctcagagtcaaaatcttcaacattcaagtcaaagaggtcacggtgcaggactccaccaccaccatcgccaacaacctcacctccaccgtccaagtgtttacggacgacgactaccagctgccctacgtcgtcggcaacgggaccgagggatgcctgccggccttccctccgcaggtctttacgctgccgcagtacggttacgcgacgctgaaccgcgacaacacagaaaatcccaccgagaggagcagcttcttctgcctagagtactttcccagcaagatgctgagaacgggcaacaactttgagtttacctacaactttgaggaggtgcccttccactccagcttcgctcccagtcagaacctcttcaagctggccaacccgctggtggaccagtacttgtaccgcttcgtgagcacaaataacactggcggagtccagttcaacaagaacctggccgggagatacgccaacacctacaaaaactggttcccggggcccatgggccgaacccagggctggaacctgggctccggggtcaaccgcgccagtgtcagcgccttcgccacgaccaataggatggagctcgagggcgcgagttaccaggtgcccccgcagccgaacggcatgaccaacaacctccagggcagcaacacctatgccctggagaacactatgatcttcaacagccagccggcgaacccgggcaccaccgccacgtacctcgagggcaacatgctcatcaccagcgagagcgagacgcagccggtgaaccgcgtggcgtacaacgtcggcgggcagatggccaccaacaaccagagctccaccactgcccccgcgaccggcacgtacaacctccaggaaatcgtgcccggcagcgtgtggatggagagggacgtgtacctccaaggacccatctgggccaagatcccagagacgggggcgcactttcacccctctccggccatgggcggattcggactcaaacacccaccgcccatgatgctcatcaagaacacgcctgtgcccggaaatatcaccagcctctcggacgtgcccgtcagcagcttcatcacccagtacagcaccgggcaggtcaccgtggagatggagtgggagctcaagaaggaaaactccaagaggtggaacccagagatccagtacacaaacaactacaacgacccccagtttgtggactttgccccggacagcaccggggaatacagaaccaccagacctatcggaacccgataccttacccgacccctttaa

SEQ ID NO: 816 - DNA, 2175 bp, Artificial Sequence
  source: /note="Description of Artificial Sequence: Synthetic polynucleotide"
atgtcttttgttgatcaccctccagattggttggaagaagttggtgaaggtcttcgcgagtttttgggccttgaagcgggcccaccgaaaccaaaacccaatcagcagcatcaagatcaagcccgtggtcttgtgctgcctggttataactatctcggacccggaaacggtctcgatcgaggagagcctgccaacagggcagacgaggtcgcgcgagagcacgacatctcgtacaacgagcagcttgaggcgggagacaacccctacctcaagtacaaccacgcgggcgccgagtttcaggagaagctcgccgacgacacatccttcgggggaaacctcggaaaggcagtctttcaggccaagaaaagggttctcgaaccttttggcctggttgaagagggtgctaagacggcccctaccggaaagcggatagacgaccactttccaaaaagaaagaaggcccggaccgaagaggactccaagccttccacctcgtcagacgccgaagctggacccagcggatcccagcagctgcaaatcccagcccaaccagcctcaagtttgggagctgatacaatgtctgcgggaggtggcggcccattgggcgacaataaccaaggtgccgatggagtgggcaatgcctcgggagattggcattgcgattccacgtggatgggggacagagtcgtcaccaagtccacccgaacctgggtgctgcccggctacaacaaccaccagtaccgagagatcaaaagcggctccgtcgacggaagcaacgccaacgcctactttggatacagcaccccctgggggtactttgactttaaccgcttccacagccactggagcccccgagactggcaaagactcatcaacaactactggggcttcagaccccggtccctcagagtcaaaatcttcaacattcaagtcaaagaggtcacggtgcaggactccaccaccaccatcgccaacaacctcacctccaccgtccaagtgtttacggacgacgactaccagctgccctacgtcgtcggcaacgggaccgagggatgcctgccggccttccctccgcaggtctttacgctgccgcagtacggttacgcgacgctgaaccgcgacaacacagaaaatcccaccgagaggagcagcttcttctgcctagagtactttcccagcaagatgctgagaacgggcaacaactttgagtttacctacaactttgaggaggtgcccttccactccagcttcgctcccagtcagaacctcttcaagctggccaacccgctggtggaccagtacttgtaccgcttcgtgagcacaaataatactggcggagtccagttcaacaagaacctggccgggagatacgccaacacctacaaaaactggttcccggggcccatgggccgaacccagggctggaacctgggctccggggtcaaccgcgccagtgtcagcgccttcgccacgaccaataggatggagctcgagggcgcgagttaccaggtgcccccgcagccgaacggcatgaccaacaacctccagggcagcaacacctatgccctggagaacactatgatcttcaacagccagccggcgaacccgggcaccaccgccacgtacctcgagggcaacatgctcatcaccagcgagagcgagacgcagccggtgaaccgcgtggcgtacaacgtcggcgggcagatggccaccaacaaccagagctccaccactgcccccgcgaccggcacgtacaacctccaggaaatcgtgcccggcagcgtgtggatggagagggacgtgtacctccaaggacccatctgggccaagatcccagagacgggggcgcactttcacccctctccggccatgggcggattcggactcaaacacccaccgcccatgatgctcatcaagaacacgcctgtgcccggaaatatcaccagcttctcggacgtgcccgtcagcagcttcatcacccagtacagcaccgggcaggtcaccgtggagatggagtgggagctcaagaaggaaaactccaagaggtggaacccagagatccagtacacaaacaactacaacgacccccagtttgtggactttgccccggacagcaccggggaatacagaaccaccagacctatcggaacccgataccttacccgacccctttaa

SEQ ID NO: 817 - DNA, 2175 bp, Artificial Sequence
  source: /note="Description of Artificial Sequence: Synthetic polynucleotide"
atgtcttttgttgatcaccctccagattggttggaagaagttggtgaaggtcttcgcgagtttttgggccttgaagcgggcccaccgaaaccaaaacccaatcagcagcatcaagatcaagcccgtggtcttgtgctgcctggttataactatctcggacccggaaacggtctcgatcgaggagagcctgtcaacagggcagacgaggtcgcgcgagagcacgacatctcgtacaacgagcagcttgaggcgggagacaacccctacctcaagtacaaccacgcggacgccgagtttcaggagaagctcgccgacgacacatccttcgggggaaacctcggaaaggcagtctttcaggccaagaaaagggttctcgaaccttttggcctggttgaagagggtgctaagacggcccctaccggaaagcggatagacgaccactttccaaaaagaaagaaggcccggaccgaagaggactccaagcctcccacctcgtcagacgccgaagctggacccagcggatcccagcagctgcaaatcccagcccaaccagcctcaagtttgggagctgatacaatgtctgcgggaggtggcggcccattgggcgacaataaccaaggtgccgatggagtgggcaatgcctcgggagattggcattgcgattccacgtggatgggggacagagtcgtcaccaagtccacccgaacctgggtgctgcccagctacaacaaccaccagtaccgagagatcaaaagcggctccgtcgacggaagcaacgccaacgcctactttggatacagcaccccctgggggtactttgactttaaccgcttccacagccactggagcccccgagactggcaaagactcatcaacaactactggggcttcagaccccggtccctcagagtcaaaatcttcaacattcaagtcaaagaggtcacggtgcaggactccgccaccaccatcgccaacaacctcacctccaccgtccaagtgtttacggacgacgactaccagctgccctacgtcgtcggcaacgggaccgagggatgcctgccggccttccctccgcaggtctttacgctgccgcagtacggttacgcgacgctgaaccgcgacaacacagaaaatcccaccgagaggagcagcttcttctgcctagagtactttcccagcaagatgctgagaacgggcaacaactttgagtttacctacaactttgaggaggtgcccttccactccagcttcgctcccagtcagaacctcttcaagctggccaacccgctggtggaccagtacttgtaccgcttcgtgagcacaaataacactggcggagtccagttcaacaagaacctggccgggagatacgccaacacctacaaaaactggttcccggggcccatgggccgaacccagggctggaacctgggctccggggtcaaccgcgccagtgtcagcgccttcgccacgaccaataggatggagctcgagggcgcgagttaccaggtgcccccgcagccgaacggcatgaccaacaacctccagggcagcaacacctatgccctggagaacactatgatcttcaacagccagccggcgaacccgggcaccaccgccacgtacctcgagggcaacatgctcatcaccagcgagagcgagacgcagccggtgaaccgcgtggcgtacaacgtcggcgggcagatggccaccaacaaccagagctccaccactgcccccgcgaccggcacgtacaacctccaggaaatcgtgcccggcagcgtgtggatggagagggacgtgtacctccaaggacccatctgggccaagatcccagagacgggggcgcactttcacccctctccggccatgggcggattcggactcaaacacccaccgcccatgatgctcatcaagaacacgcctgtgcccggaaatatcaccagcttctcggacgtgcccgtcagcagcttcatcacccagtacagcaccgggcaggtcaccgtggagatggagtgggagctcaagaaggaaaactccaagaggtggaacccagagatccagtacacaaacaactacaacgacccccagtttgtggactttgccccggacagcaccggggaatacagaaccaccagacctatcggaacccgataccttacccgacccctttaa

SEQ ID NO: 818 - DNA, 2175 bp, Artificial Sequence
  source: /note="Description of Artificial Sequence: Synthetic polynucleotide"
atgtcttttgttgatcaccctccagattggttggaagaagttggtgaaggtcttcgcgagtttttgggccttgaagcgggcccaccgaaaccaaaacccaatcagcagcatcaagatcaagcccgtggtcttgtgctgcctggttataactatctcggacccggaaacggtctcgatcgaggagagcctgtcaacagggcagacgaggtcgcgcgagagcacgacatctcgtacaacgagcagcttgaggcgggagacaacccctacctcaagtacaaccacgcggacgccgagtttcaggagaagctcgccgacgacacatccttcgggggaaacctcggaaaggcagtctttcaggccaagaaaagggttctcgaaccttttggcctggttgaagagggtgctaagacggcccctaccggaaagcggatagacgaccactttccaaaaagaaagaaggcccggaccgaagaggactccaagccttccacctcgtcagacgccgaagctggacccagcggatcccagcagccgcaaatcccagcccaaccagcctcaagtttgggagctgatacaatgtctgcgggaggtggcggcccattgggcgacaataaccaaggtgccgatggagtgggcaatgcctcgggagattggcattgcgattccacgtggatgggggacagagtcgtcaccaagtccacccgaacctgggtgctgcccagctacaacaaccaccagtaccgagagatcaaaagcggctccgtcgacggaagcaacgccaacgcctactttggatacagcaccccctgggggtactttgactttaaccgcttccacagccactggagcccccgagactggcaaagactcatcaacaactactggggcttcagaccccggtccctcagagtcaaaatcttcaacattcaagtcaaagaggtcacggtgcaggactccaccaccaccatcgccaacaacctcacctccaccgtccaagtgtttacggacgacgactaccagctgccctacgtcgtcggcaacgggaccgagggatgcctgccggccttccctccgcaggtctttacgctgccgcagtacggttacgcgacgctgaaccgcgacaacacagaaaatcccaccgagaggagcagcttcttctgcctagagtactttcccagcaagatgctgagaacgggcaacaactttgagtttacctacaactttgaggaggtgcccttccactccagcttcgctcccagtcagaacctcttcaagctggccaacccgctggtggaccagtacttgtaccgcttcgtgagcacaaataacactggcggagtccagttcaacaagaacctggccgggagatacgccaacacctacaaaaactggttcccggggcccatgggccgaacccagggctggaacctgggctccggggtcaaccgcgccagtgtcagcgccttcgccacgaccaataggatggagctcgagggcgcgagttaccaggtgcccccgcagccgaacggcatgaccaacaacctccagggcagcaacacctatgccctggagaacactatgatcttcaacagccagccggcgaacccgggcaccaccgccacgtacctcgagggcaacatgctcatcaccagcgagagcgagacgcagccggtgaaccgcgtggcgtacaacgtcggcgggcagatggccaccaacaaccagagctccaccactgcccccgcgaccggcacgtacaacctccaggaaatcgtgcccggcagcgtgtggatggagagggacgtgtacctccaaggacccatctgggccaagatcccagagacgggggcgcactttcacccctctccggccatgggcggattcggactcaaacacccaccgcccatgatgctcatcaagaacacgcctgcgcccggaaatatcaccagcttctcggacgtgcccgtcagcagcttcatcacccagtacagcaccgggcaggtcaccgtggagatggagtgggagctcaagaaggaaaactccaagaggtggaacccagagatccagtacacaaacaactacaacgacccccagtttgtggactttgccccggacagcaccggggaatacagaaccaccagacctatcggaacccgataccttacccgacccctttaa

SEQ ID NO: 819 - DNA, 2175 bp, Artificial Sequence
  source: /note="Description of Artificial Sequence: Synthetic polynucleotide"
atgtcttttgttgatcaccctccagattggttggaagaagttggtgaaggtcttcgcgagtttttgggccttgaagcgggcccaccgaaaccaaaacccaatcagcagcatcaagatcaagcccgtggtcttgtgctgcctggttataactatctcggacccggaaacggtctcgatcgaggagagcctgtcaacagggcagacgaggtcgcgcgagagcacgacatctcgtacaacgagcagcttgaggcgggagacaacccctacctcaagtacaaccacgcggacgccgagtttcaggagaagctcgccgacgacacatccttcgggggaaacctcggaaaggcagtctttcaggccaagaaaagggttctcgaaccttttggcctggttgaagagggtgctaagacggcccctaccggaaagcggatagacgaccactttccaaaaagaaagaaggcccggaccgaagaggactccaagcctcccacctcgtcagacgccgaagctggacccagcggatcccagcagctgcaaatcccagcccaaccagcctcaagtttgggagctgatacaatgtctgcgggaggtggcggcccattgggcgacaataaccaaggtgccgatggagtgggcaatgcctcgggagattggcattgcgattccacgtggatgggggacagagtcgtcaccaagtccacccgaacctgggtgctgcccagctacaacaaccaccagtaccgagagatcaaaagcggctccgtcgacggaagcaacgccaacgcctactttggatacagcaccccctgggggtactttgactttaaccgcttccacagccactggagcccccgagactggcaaagactcatcaacaactactggggcttcagaccccggtccctcagagtcaaaatcttcaacattcaagtcaaagaggtcacggtgcaggactccaccaccaccatcgccaacaacctcacctccaccgtccaagtgtttacggacgacgactaccagctgccctacgtcgtcggcaacgggaccgagggatgcctgccggccttccctccgcaggtctttacgctgccgcagtacggttacgcgacgctgaaccgcgacaacacagaaaatcccaccgagaggagcagcttcttctgcctagagtactttcccagcaagatgctgagaacgggcaacaactttgagtttacctacaactttgaggaggtgcccttccactccagcttcgctcccagtcagaacctcttcaagctggccaacccgctggtggaccagtacttgtaccgcttcgtgagcacaaataacactggcggagtccagttcaacaagaacctggccgggagatacgccaacacctacaaaaactggttcccggggcccatgggccgaacccagggctggaacctgggctccggggtcaaccgcgccagtgtcagcgccttcgccacgaccaataggatggagctcgagggcgcgagttaccaggtgcccccgcagccgaacggcatgaccaacaacctccagggcagcaacacctatgccctggagaacactatgatcttcaacagccagccggcgaacccgggcaccaccgccacgtacctcgagggcaacatgctcatcaccagcgagagcgagacgcagccggtgaaccgcgtggcgtacaacgtcggcgggcagatggccaccaacaaccagagctccaccactgcccccgcgaccggcacgtacaacctccaggaaatcgtgcccggcagcgtgtggatggagagggacgtgtacctccaaggacccatctgggccaagatcccagagacgggggcgcactttcacccctctccggccatgggcggattcggactcaaacacccaccgcccatgatgctcatcaagaacacgcctgtgcccggaaatatcaccagcttctcggacgtgcccgtcagcagcttcatcacccagtacagcaccgggcaggtcaccgtggagatggagtgggagctcaagaaggaaaactccaagaggtggaacccagagatccagtacacaaacaactacaacgacccccagtttgtggactttgccccggacagcaccggggaatacagaaccaccagacctatcggaacccgataccttacccgacccctttaa

SEQ ID NO: 820 - DNA, 2175 bp, Artificial Sequence
  source: /note="Description of Artificial Sequence: Synthetic polynucleotide"
atgtcttttgttgatcaccctccagattggttggaagaagttggtgaaggtcttcgcgagtttttgggccttgaagcgggcccaccgaaaccaaaacccaatcagcagcatcaagatcaagcccgtggtcttgtgctgcctggttataactatctcggacccggaaacggtctcgatcgaggagagcctgtcaacagggcagacgaggtcgcgcgagagcacgacatctcgtacaacgagcagcttgaggcgggagacaacccctacctcaagtacaaccacgcggacgccgagtttcaggagaagctcgccgacgacacatccttcgggggaaacctcggaaaggcagtctttcaggccaagaaaagggttctcgaaccttttggcctggttgaagagggtgctaagacggcccctaccggaaagcggatagacgaccactttccaaaaagaaagaaggcccggaccgaagaggactccaagcctcccacctcgtcagacgccgaagctggacccagcggatcccagcagctgcaaatcccagcccaaccagcctcaagtttgggagctgatacaatgtctgcgggaggtggcggcccattgggcgacaataaccaaggtgccgatggagtgggcaatgcctcgggagattggcattgcgattccacgtggatgggggacagagtcgtcaccaagtccacccgaacctgggtgccgcccagctacaacaaccaccagtaccgagagatcaaaagcggctccgtcgacggaagcaacgccaacgcctactttggatacagcaccccctgggggtactttgactttaaccgcttccacagccactggagcccccgagactggcaaagactcatcaacaactactggggcttcagaccccggtccctcagagtcaaaatcttcaacattcaagtcaaagaggtcacggtgcaggactccaccaccaccatcgccaacaacctcacctccaccgtccaagtgtttacggacgacgactaccagctgccctacgtcgtcggcaacgggaccgagggatgcctgccggccttccctccgcaggtctttacgctgccgcagtacggttacgcgacgctgaaccgcgacaacacagaaaatcccaccgagaggagcagcttcttctgcctagagtactttcccagcaagatgctgagaacgggcaacaactttgagtttacctacaactttgaggaggtgcccttccactccagcttcgctcccagtcagaacctcttcaagctggccaacccgctggtggaccagtacttgtaccgcttcgtgagcacaaataacactggcggagtccagttcaacaagaacctggccgggagatacgccaacacctacaaaaactggttcccggggcccatgggccgaacccagggctggaacctgggctccggggtcaaccgcgccagtgtcagcgccttcgccacgaccaataggatggagctcgagggcgcgagttaccaggtgcccccgcagccgaacggcatgaccaacaacctccagggcagcaacacctatgccctggagaacactatgatcttcaacagccagccggcgaacccgggcaccaccgccacgtacctcgagggcaacatgctcatcaccagcgagagcgagacgcagccggtgaaccgcgtggcgtacaacgtcggcgggcagatggccaccaacaaccagagctccaccactgcccccgcgaccggcacgtacaacctccaggaaatcgtgcccggcagcgtgtggatggagagggacgtgtacctccaaggacccatctgggccaagatcccagagacgggggcgcactttcacccctctccggccatgggcggattcggactcaaacacccaccgcccatgatgctcatcaagaacacgcctgtgcccggaaatatcaccagcttctcggacgtgcccgtcagcagcttcatcacccagtacagcaccgggcaggtcgccgtggagatggagtgggagctcaagaaggaaaactccaagaggtggaacccagagatccagtacacaaacaactacaacgacccccagtttgtggactttgccccggacagcaccggggaatacagaaccaccagacctatcggaacccgataccttacccgacccctttaa

SEQ ID NO: 821 - DNA, 2175 bp, Artificial Sequence
  source: /note="Description of Artificial Sequence: Synthetic polynucleotide"
atgtcttttgttgatcaccctccagattggttggaagaagttggtgaaggtcttcgcgagtttttgggccttgaagcgggcccaccgaaaccaaaacccaatcagcagcatcaagatcaagcccgtggtcttgtgctgcctggttataactatctcggacccggaaacggtctcgatcgaggagagcctgtcaacagggcagacgaggtcgcgcgagagcacgacatctcgtacaacgagcagcttgaggcgggagacaacccctacctcaagtacaaccacgcggacgccgagtttcaggagaagctcgccgacgacacatccttcgggggaaacctcggaaaggcagtctttcaggccaagaaaagggttctcgaaccttttggcctggttgaagagggtgctaagacggcccctaccggaaagcggatagacgaccactttccaaaaagaaagaaggcccggaccgaagaggactccaagccttccacctcgtcagacgccgaagctggacccagcggatcccagcagctgcaaatcccagcccaaccagcctcaagtttgggagctgatacaatgtctgcgggaggtggcggcccattgggcgacaataaccaaggtgccgatggagtgggcaatgcctcgggagattggcattgcgattccacgtggatgggggacagagtcgtcaccaagtccacccgaacctgggtgctgcccagctacaacaaccaccagtaccgagagatcaaaagcggctccgtcgacggaagcaacgccaacgcctactttggatacagcaccccctgggggtactttgactttaaccgcttccacagccactggagcccccgagactggcaaagactcatcaacaactactggggcttcagaccccggtccctcagagtcaaaatcttcaacattcaagtcaaagaggtcacggtgcaggactccaccaccaccatcgccaacaacctcacctccaccgtccaagtgtttacggacgacgactaccagctgccctacgtcgtcggcaacgggaccgagggatgcctgccggccttccctccgcaggtctttacgctgccgcagtacggttacgcgacgctgaaccgcgacaacacagaaaatcccaccgagaggagcagcttcttctgcctagagtactttcccagcaagatgctgagaacgggcaacaactttgagtttacctacaactttgaggaggtgcccttccactccagcttcgctcccagtcagaacctcttcaagctggccaacccgctggtggaccagtacttgtaccgcttcgtgagcacaaataacactggcggagtccagttcaacaagaacctggccgggagatacgccaacacctacaaaaactggttcccggggcccatgggccgaacccagggctggaacctgggctccggggtcaaccgcgccagtgtcagcgccttcgccacgaccaataggatggagctcgagggcgcgagttaccaggtgcccccgcagccgaacggcatgaccaacaacctccagggcagcaacacctatgccctggagaacactatgatcttcaacagccagccggcgaacccgggcaccaccgccacgtacctcgagggcaacatgctcatcaccagcgagagcgagacgcagccggtgaaccgcgtggcgtacaacgtcggcgggcagatggccaccaacaaccagagctccaccactgcccccgcgaccggcacgtacaacctccaggaaatcgtgcccggcagcgtgtggatggagagggacgtgtacctccaaggacccatctgggccaagatcccagagacgggggcgcactttcacccctctccggccatgggcggattcggactcaaacacccaccgcccatgatgctcatcaagaacacgcctgcgcccggaaatatcaccagcttctcggacgtgcccgtcagcagcttcatcacccagtacagcaccgggcaggtcaccgtggagatggagtgggagctcaagaaggaaaactccaagaggtggaacccagagatccagtacacaaacaactacaacgacccccagtttgtggactttgccccggacagcaccggggaatacagaaccaccagacctatcggaacccgataccttacccgacccctttaa

SEQ ID NO: 822 - DNA, 2175 bp, Artificial Sequence
  source: /note="Description of Artificial Sequence: Synthetic polynucleotide"
atgtcttttgttgatcaccctccagattggttggaagaagttggtgaaggtcttcgcgagtttttgggccttgaagcgggcccaccgaaaccaaaacccaatcagcagcatcaagatcaagcccgtggtcttgtgctgcctggttataactatctcggacccggaaacggtctcgatcgaggagagcctgtcaacagggcagacgaggtcgcgcgagagcacgacatctcgtacaacgagcagcttgaggcgggagacaacccctacctcaagtacaaccacgcggacgccgagtttcaggagaagctcgccgacgacacatccttcgggggaaacctcggaaaggcagtctttcaggccaagaaaagggttctcgaaccttttggcctggctgaagagggtgctaagacggcccctaccggaaagcggatagacgaccactttccaaaaagaaagaaggcccggaccgaagaggactccaagccttccacctcgtcagacgccgaagctggacccagcggatcccagcagctgcaaatcccagcccaaccagcctcaagtttgggagctgatacaatgtctgcgggaggtggcggcccattgggcgacaataaccaaggtgccgatggagtgggcaatgcctcgggagattggcattgcgattccacgtggatgggggacagagtcgtcaccaagtccacccgaacctgggtgctgcccagctacaacaaccaccagtaccgagagatcaaaagcggctccgtcgacggaagcaacgccaacgcctactttggatacagcaccccctgggggtactttgactttaaccgcttccacagccactggagcccccgagactggcaaagactcatcaacaactactggggcttcagaccccggtccctcagagccaaaatcttcaacattcaagtcaaagaggtcacggtgcaggactccaccaccaccatcgccaacaacctcacctccaccgtccaagtgtttacggacgacgactaccagctgccctacgtcgtcggcaacgggaccgagggatgcctgccggccttccctccgcaggtctttacgctgccgcagtacggttacgcgacgctgaaccgcgacaacacagaaaatcccaccgagaggagcagcttcttctgcctagagtactttcccagcaagatgctgagaacgggcaacaaccttgagtttacctacaactttgaggaggtgcccttccactccagcttcgctcccagtcagaacctcttcaagctggccaacccgctggtggaccagtacttgtaccgcttcgtgagcacaaataacactggcggagtccagttcaacaagaacctggccgggagatacgccaacacctacaaaaactggttcccggggcccatgggccgaacccagggctggaacctgggctccggggtcaaccgcgccagtgtcagcgccttcgccacgaccaataggatggagctcgagggcgcgagttaccaggtgcccccgcagccgaacggcatgaccaacaacctccagggcagcaacacctatgccctggagaacactatgatcttcaacagccagccggcgaacccgggcaccaccgccacgtacctcgagggcaacatgctcatcaccagcgagagcgagacgcagccggtgaaccgcgtggtgcacaacgtcggcgggcagatggccaccaacaaccagagctccaccactgcccccgcgaccggcacgtacaacctccaggaaatcgtgcccggcagcgtgtggatggagagggacgtgtacctccaaggacccatctgggccaagatcccagagacgggggcgcactttcacccctctccggccatgggcggattcggactcaaacacccaccgcccatgatgctcatcaagaacacgcctgtgcccggaaatatcaccagcttctcggacgtgcccgtcagcagcttcatcacccagtacagcaccgggcaggtcaccgtggagatggagtgggagctcaagaaggaaaactccaagaggtggaacccggagatccagtacacaaacaactacaacgacccccagtttgtggactttgccccggacagcaccggggaatacagaaccaccagacctatcggaacccgataccttacccgacccctttaa

SEQ ID NO: 823 - DNA, 2175 bp, Artificial Sequence
  source: /note="Description of Artificial Sequence: Synthetic polynucleotide"
atgtcttttgttgatcaccctccagattggttggaagaagttggtgaaggtcttcgcgagtttttgggccttgaagcgggcccaccgaaaccaaaacccaatcagcagcatcaagatcaagcccgtggtcttgtgctgcctggttataactatctcggacccggaaacggtctcgatcgaggagagcctgtcaacagggcagacgaggtcgcgcgagagcacgacatctcgtacaacgagcagcttgaggcgggagacaacccctacctcaagtacaaccacgcggacgccgagtttcaggagaagctcgccgacgacacatccttcgggggaaacctcggaaaggcagtctttcaggccaagaaaagggttctcgaaccttttggcctggttgaagagggtgctaagacggcccctaccggaaagcggatagacgaccactttccaaaaagaaagaaggcccggaccgaagaggactccaagccttccacctcgtcagacgccgaagctggacccagcggatcccagcagctgcaaatcccagcccaaccagcctcaagtttgggagctgatacaatgtctgcgggaggtggcggcccattgggcgacaataaccaaggtgccgatggagtgggcaatgcctcgggagattggcattgcgattccacgtggatgggggacagagtcgtcaccaagtccacccgaacctgggtgctgcccagctacaacaaccaccagtaccgagagatcaaaagcggctccgtcgacggaggcaacgccaacgcctactttggatacagcaccccctgggggtactttgactttaaccgcttccacagccactggagcccccgggactggcaaagactcatcaacaactactggggcttcagaccccggtccctcagagtcaaaatcttcaacattcaagtcaaagaggtcacggtgcaggactccaccaccaccatcgccaacaacctcacctccaccgtccaagtgtttacggacgacgactaccagctgccctacgtcgtcggcaacgggaccgagggatgcctgccggccttccctccgcaggtctttacgctgccgcagtacggttacgcgacgctgaaccgcgacaacacagaaaatcccaccgagaggagcagcttcttctgcctagagtactttcccagcaagatgctgagaacgggcaacaactttgagtttacctacaactttgaggaggtgcccttccactccagcttcgctcccagtcagaacctcttcaagctggccaacccgctggtggaccagtacttgtaccgcttcgtgagcacaaataacactggcggagtccagttcaacaagaacctggccgggagatacgccaacacctacaaaaactggttcccggggcccatgggccgaacccagggctggaacctgggctccggggtcaaccgcgccagtgtcagcgccttcgccacgaccaataggatggagctcgagggcgcgagttaccaggtgcccccgcagccgaacggcatgaccaacaacctccagggcagcaacacctatgccctggagaacactatgatcttcaacagccagccggcgaacccgggcaccaccgccacgtacctcgagggcaacatgctcatcaccagcgagagcgagacgcagccggtgaaccgcgtggcgtacaacgtcggcgggcagatggccaccaacaaccagagctccaccactgcccccgcgaccggcacgtacaacctccaggaaatcgtgcccggcagcgtgtggatggagagggacgtgtacctccaaggacccatctgggccaagatcccagagacgggggcgcactttcacccctctccggccatgggcggattcggactcaaacacccaccgcccatgatgctcatcaagaacacgcctgcgcccggaaatatcaccagcttctcggacgtgcccgtcagcagcttcatcacccagtacagcaccgggcaggtcaccgtggagatggagtgggagctcaagaagggaaactccaagaggtggaacccagagatccagtacacaaacaactacaacgacccccagtttgtggactttgccccggacagcaccggggaatacagaaccaccagacctatcggaacccgataccttacccgacccctttaa

SEQ ID NO: 824 - DNA, 2175 bp, Artificial Sequence
  source: /note="Description of Artificial Sequence: Synthetic polynucleotide"
atgtcttttgttgatcaccctccagattggttggaagaagttggtgaaggtcttcgcgagtttttgggccttgaagcgggcccaccgaaaccaaaacccaatcagcagcatcaagatcaagcccgtggtcttgtgctgcctggttataactatctcggacccggaaacggtctcgatcgaggagagcctgtcaacagggcagacgaggtcgcgcgagagcacgacatctcgtacaacgagcagcttgaggcgggagacaacccctacctcaagtacaaccacgcggacgccgagtttcaggagaagctcgccgacgacacgtccttcgggggaaacctcggaaaggcagtctttcaggccaagaaaagggttctcgaaccttttggcctggttgaagagggtgctaagacggcccctaccggaaagcggatagacgaccactttccaaaaagaaagaaggcccggaccgaagaggactccaagccttccacctcgtcagacgccgaagctggacccagcggatcccagcagctgcaaatcccagcccaaccagcctcaagtttgggagctgatacaatgtctgcgggaggtggcggcccattgggcgacaataaccaaggtgccgatggagtgggcaatgcctcgggagattggcattgcgattccacgtggatgggggacagagtcgtcaccaagtccacccgaacctgggtgctgcccagctacaacaaccaccagtaccgagagatcaaaagcggctccgtcgacggaagcaacgccaacgcctactttggatacagcaccccctgggggtactttgactttaaccgcttccacagccactggagcccccgagactggcaaagactcatcaacaactactggggcttcagaccccggtccctcagagtcaaaatcttcaacattcaagtcaaagaggtcacggtgcaggactccaccaccaccatcgccaacaacctcacctccaccgtccaagtgtttacggacgacgactaccagctgccctacgtcgtcggcaacgggaccgagggatgcctgccggccttccctccgcaggtctttacgctgccgcagtacggttacgcgacgctgaaccgcgacaacacagaaaatcccaccgagaggagcagcttcttctgcctagagtactttcccagcaagatgctgagaacgggcaacaactttgagtttacctacaactttgaggaggtgcccttccactccagcttcgctcccagtcagaacctcttcaagctggccaacccgctggtggaccagtacttgtaccgcttcgtgagcacaaataacactggcggagtccagttcaacaagaacctggccgggagatacgccaacacctacaaaaactggttcccggggcccatgggccgaacccagggctggaacctgggctccggggtcaaccgcgccagtgtcagcgccttcgccacgaccaataggatggagctcgagggcgcgagttaccaggtgcccccgcagccgaacggcatgaccaacaacctccagggcagcaacacctatgccctggagaacactatgatcttcaacagccagccggcgaacccgggcaccaccgccacgtacctcgagggcaacatgctcatcaccagcgagagcgagacgcagccggtgaaccgcgtggcgtacaacgtcggcgggcagatggccaccaacaaccagagctccaccactgcccccgcgaccggcacgtacaacctccaggaaatcgtgcccggcagcgtgtggatggagagggacgtgtacctccaaggacccatctgggccaagatcccagagacgggggtgcactttcacccctctccggccatgggcggattcggactcaaacacccaccgcccatgatgctcatcaagaacacgcctgtgcccggaaatatcaccagcttctcggacgtgcccgtcagcagcttcatcacccagtacagcaccgggcaggtcaccgtggagatggagtgggagctcaagaaggaaaactccaagaggtggaacccagagatccagtacacaaacaactacaacgacccccagtttgtggactttgccccggacagcaccggggaatacagaaccaccagacctatcggaacccgataccttacccgacccctttaa

SEQ ID NO: 825 - DNA, 2175 bp, Artificial Sequence
  source: /note="Description of Artificial Sequence: Synthetic polynucleotide"
  modified_base (1652)..(1652): a, c, t, or g
atgtcttttgttgatcaccctccagattggttggaagaagttggtgaaggtcttcgcgagtttttgggccttgaagcgggcccaccgaaaccaaaacccaatcagcagcatcaagatcaagcccgtggtcttgtgctgcctggttataactatctcggacccggaaacggtctcgatcgaggagagcctgtcaacagggcagacgaggtcgcgcgagagcacgacatctcgtacaacgagcagcttgaggcgggagacaacccctacctcaagtacaaccacgcggacgccgagtttcaggagaagctcgccgacgacacatccttcgggggaaacctcggaaaggcagtctttcaggccaagaaaagggttctcgaaccttttggcctggttgaagagggtgctaagacggcccctaccggaaagcggatagacgaccactttccaaaaagaaagaaggcccggaccgaggaggactccaagccttccacctcgtcagacgccgaagctggacccagcggatcccagcagctgcaaatcccagcccaaccagcctcaagtttgggagctgatacaatgtctgcgggaggtggcggcccattgggcgacaataaccaaggtgccgatggagtgggcaatgcctcgggagattggcattgcgattccacgtggatgggggacagagtcgtcaccaagtccacccgaacctgggtgctgcccagctacaacaaccaccagtaccgagagatcaaaagcggctccgtcgacggaagcaacgccaacgcctactttggatacagcaccccctgggggtactttgactttaaccgcttccacagccactggagcccccgagactggcaaagactcatcaacaactactggggcttcagaccccggtccctcagagtcaaaatcttcaacattcaagtcaaagaggtcacggtgcaggactccaccaccaccatcgccaacaacctcacctccaccgtccaagtgtttacggacgacgactaccagctgccctacgtcgtcggcaacgggaccgagggatgcctgccggccttccctccgcaggtctttacgctgccgcagtacggttacgcgacgctgaaccgcgacaacacagaaaatcccaccgagaggagcagcttcttctgcctagagtactttcccagcaagatgctgagaacgggcaacaactttgagtttacctacaactttgaggaggtgcccttccactccagcttcgctcccagtcagaacctcttcaagctggccaacccgctggtggaccagtacttgtaccgcttcgtgagcacaaataacactggcggagtccagttcaacaagaacctggccgggagatacgccaacacctacaaaaactggttcccggggcccatgggccgaacccagggctggaacctgggctccggggtcaaccgcgccagtgtcagcgccttcgccacgaccaataggatggagctcgagggcgcgagttaccaggtgcccccgcagccgaacggcatgaccaacaacctccagggcagcaacacctatgccctggagaacactatgatcttcaacagccagccggcgaacccgggcaccaccgccacgtacctcgagggcagcatgctcatcaccancgagagcgagacgcagccggtgaaccgcgtggcgtacaacgtcggcgggcagatggccaccaacaaccagagctccaccactgcccccgcgaccggcacgtacaacctccaggaaatcgtgcccggcagcgtgtggatggagagggacgtgtacctccaaggacccatctgggccaagatcccagagacgggggcgcactttcacccctctccggccatgggcggattcggactcaaacacccaccgcccatgatgctcatcaagaacacgcctgtgcccggaaatatcaccagcttctcggacgtgcccgtcagcagcttcatcacccagtacagcaccgggcaggtcaccgtggagatggagtgggagctcaagaaggaaaactccaagaggtggaacccagagatccagtacacaaacaactacaacgacccccagtttgtggactttgccccggacagcaccggggaatacagaaccaccagacctatcggaacccgataccttacccgacccctttaa

SEQ ID NO: 826 - DNA, 2211 bp, Artificial Sequence
  source: /note="Description of Artificial Sequence: Synthetic polynucleotide"
atggctgctgacggttatcttccagattggctcgaggacaacctttctgaaggcattcgtgagtggtgggctctgaaacctggagtccctcaacccaaagcgaaccaacaacaccaggacaaccgtcggggtcttgtgcttccgggttacaaatacctcggacccggtaacggactcgacaaaggagagccggtcaacgaggcggacgcggcagccctcgaacacgacaaagcttacgaccagcagctcaaggccggtgacaacccgtacctcaagtacaaccacgccgacgccgagtttcaggagcgtcttcaagaagatacgtcttttgggggcaaccttggcagagcagtcttccaggccaaaaagaggatccttgagcctcttggtctggttgaggaagcagctaaaacggctcctggaaagaagaggcctgtagatcagtctcctcaggaaccggactcatcatctggtgttggcaaatcgggcaaacagcctgccagaaaaagactaaatttcggtcagactggcgactcagagtcagtcccagaccctcaacctctcggagaaccaccagcagcccccacaagtttgggatctaatacaatggcttcaggcggtggcgcaccaatggcagacaataacgagggtgccgatggagtgggtaattcctcaggaaattggcattgcgattcccaatggctgggcgacagagtcatcaccaccagcaccagaacctgggccctgcccacttacaacaaccatctctacaagcaaatctccagccaatcaggagcttcaaacgacaaccactactttggctacagcaccccttgggggtattttgactttaacagattccactgccacttctcaccacgtgactggcagcgactcattaacaacaactggggattccggcccaagaaactcagcttcaagctcttcaacatccaagttaaagaggtcacgcagaacgatggcacgacgactattgccaataaccttaccagcacggttcaagtgtttacggactcggagtatcagctcccgtacgtgctcgggtcggcgcaccaaggctgtctcccgccgtttccagcggacgtcttcatggtccctcagtatggatacctcaccctgaacaacggaagtcaagcggtgggacgctcatccttttactgcctggagtacttcccttcgcagatgctaaggactggaaataacttccaattcagctataccttcgaggatgtaccttttcacagcagctacgctcacagccagagtttggatcgcttgatgaatcctcttattgatcagtatctgtactacctgaacagaacgcaaggaacaacctctggaacaaccaaccaatcacggctgctttttagccaggctgggcctcagtctatgtctttgcaggccagaaattggctacctgggccctgctaccggcaacagagactttcaaagactgctaacgacaacaacaacagtaactttccttggacagcggccagcaaatatcatctcaatggccgcgactcgctggtgaatccaggaccagctatggccagtcacaaggacgatgaagaaaaatttttccctatgcacggcaatctaatatttggcaaagaagggacaacggcaagtaacgcagaattagataatgtaatgattacggatgaagaagagattcgtaccaccaatcctgtggcaacagagcagtatggaactgtggcaaataacttgcagagctcaaatacagctcccacgactagaactgtcaatgatcagggggccttacctggcatggtgtggcaagatcgtgacgtgtaccttcaaggacctatctgggcaaagattcctcacacggatggacactttcatccttctcctctgatgggaggctttggactgaaacatccgcctcctcaaatcatgatcaaaaatactccggtaccggcaaatcctccgacgactttcagcccggccaagtttgcttcatttatcactcagtactccactggacaggtcagcgtggaaattgagtgggagctacagaaagaaaacagcaaacgttggaatccagagattcagtacacttccaactacaacaagtctgttaatgtggactttactgtagacactaatggtgtttatagtgaacctcgccctattggaacccggtatctcacacgaaacttgtaa

SEQ ID NO: 827 - DNA, 2205 bp, Artificial Sequence; identical to SEQ ID NO: 95
  source: /note="Description of Artificial Sequence: Synthetic polynucleotide"

SEQ ID NO: 828 - DNA, 2234 bp, Artificial Sequence
  source: /note="Description of Artificial Sequence: Synthetic polynucleotide"
atgtcttttgttgatcaccctccagattggttggaagaagttggtgaaggtcttcgcgagtttttgggccttgaagcgggcccaccgaaaccaaaacccaatcagcagcatcaagatcaagcccgtggtcttgtgctgcctggttataactatctcggacccggaaacggtctcgatcgaggagagcctgtcaacagggcagacgaggtcgcgcgagagcacgacatctcgtacaacgagcagcttgaggcgggagacaacccctacctcaagtacaaccacgcggacgccgagtttcaggagaagctcgccgacgacacatccttcgggggaaacctcggaaaggcagtctttcaggccaagaaaagggttctcgaaccttttggcctggttgaagagggtgctaagacggcccctaccggaaagcggatagacgaccactttccaaaaagaaagaaggctcggaccgaagaggactccaagccttccacctcgtcagacgccgaagctggacccagcggatcccagcagctgcaaatcccagcccaaccagcctcaagtttgggagctgatacaatgtctgcgggaggtggcggcccattgggcgacaataaccaaggtgccgatggagtgggcaatgcctcgggagattggcattgcgattccacgtggatgggggacagagtcgtcaccaagtccacccgaacctgggtgctgcccagctacaacaaccaccagtaccgagagatcaaaagcggctccgtcgacggaagcaacgccaacgcctactttggatacagcaccccctgggggtactttgactttaaccgcttccacagccactggagcccccgagactggcaaagactcatcaacaactactggggcttcagaccccggtccctcagagtcaaaatcttcaacattcaagtcaaagaggtcacggtgcaggactccaccaccaccatcgccaacaacctcacctccaccgtccaagtgtttacggacgacgactaccagctgccctacgtcgtcggcaacgggaccgagggatgcctgccggccttccctccgcaggtctttacgctgccgcagtacggttacgcgacgctgaaccgcgacaacacagaaaatcccaccgagaggagcagcttcttctgcctagagtactttcccagcaagatgctgagaacgggcaacaactttgagtttacctacaactttgaggaggtgcccttccactccagcttcgctcccagtcagaacctgttcaagctggccaacccgctggtggaccagtacttgtaccgcttcgtgagcacaaataacactggcggagtccagttcaacaagaacctggccgggagatacgccaacacctacaaaaactggttcccggggcccatgggccgaacccagggctggaacctgggctccggggtcaaccgcgccagtgtcagcgccttcgccacgaccaataggatggagctcgagggcgcgagttaccaggtgcccccgcagccgaacggcatgaccaacaacctccagggcagcaacacctatgccctggagaacactatgatcttcaacagccagccggcgaacccgggcaccaccgccacgtacctcgagggcaacatgctcatcaccagcgagagcgagacgcagccggtgaaccgcgtggcgtacaacgtcggcgggcagatggccaccaacaaccagagctccaccactgcccccgcgaccggcacgtacaacctccaggaaatcgtgcccggcagcgtgtggatggagagggacgtgtacctccaaggacccatctgggccaagatcccagagacgggggcgcactttcacccctctccggccatgggcggattcggactcaaacacccaccgcccatgatgctcatcaagaacacgcctgtgcccggaaatatcaccagcttctcggacgtgcccgtcagcagcttcatcacccagtacagcaccgggcaggtcaccgtggagatggagtgggagctcaagaaggaaaactccaagaggtggaacccagagatccagtacacaaacaactacaacgacccccagtttgtggactttgccccggacagcaccggggaatacagaaccaccagacctatcggaacccgataccttacccgacccctttaacccattcatgtcgcataccctcaataaaccgtgtattcgtgtcagtaaaatactgcctc

SEQ ID NO: 829 - protein, 736 aa, Artificial Sequence
  source: /note="Description of Artificial Sequence: Synthetic polypeptide"
MAADGYLPDWLEDNLSEGIREWWALKPGVPQPKANQQHQDNRRGLVLPGYKYLGPGNGLDKGEPVNEADAAALEHDKAYDQQLKAGDNPYLKYNHADAEFQERLQEDTSFGGNLGRAVFQAKKRILEPLGLVEEAAKTAPGKKRPVDQSPQEPDSSSGVGKSGKQPARKRLNFGQTGDSESVPDPQPLGEPPAAPTSLGSNTMASGGGAPMADNNEGADGVGNSSGNWHCDSQWLGDRVITTSTRTWALPTYNNHLYKQISSQSGASNDNHYFGYSTPWGYFDFNRFHCHFSPRDWQRLINNNWGFRPKKLSFKLFNIQVKEVTQNDGTTTIANNLTSTVQVFTDSEYQLPYVLGSAHQGCLPPFPADVFMVPQYGYLTLNNGSQAVGRSSFYCPEYFPSQMLRTGNNFQFSYTFEDVPFHSSYAHSQSLDRLMNPLIDQYLYYLNRTQGTTSGTTNQSRLLFSQAGPQSMSLQARNWLPGPCYRQQRLSKTANDNNNSNFPWTAASKYHLNGRDSLVNPGPAMASHKDDEEKFFPMHGNLIFGKEGTTASNAELDNVMITDEEEIRTTNPVATEQYGTVANNLQSSNTAPTTRTVNDQGALPGMVWQDRDVYLQGPIWAKIPHTDGHFHPSPLMGGFGLKHPPPQIMIKNTPVPANPPTTFSPAKFASFITQYSTGQVSVEIEWELQKENSKRWNPEIQYTSNYNKSVNVDFTVDTNGVYSEPHPIGTRYLTRNL

SEQ ID NO: 830 - protein, 736 aa, Artificial Sequence
  source: /note="Description of Artificial Sequence: Synthetic polypeptide"
MAADGYLPDWLEDNLSEGIREWWALKPGVPQPKANQQHQDNRRGLVLPGYKYLGPGNGLDKGEPVNEADAAALEHDKAYDQQLKAGDNPYLKYNHADAEFQERLQEDTSFGGNLGRAVFQAKKRILEPLGLVEEAAKTAPGKKRPVDQSPQEPDSSSGVGKSGKQPARKRLNFGQTGDSESVPDPQPLGEPPAAPTSLGSNTMASGGGAPMADNNEGADGVGNSSGNWHCDSQWLGDRVITTSTRTWALPTYNNHLYKQISSQSGASNDNHYFGYSTPWGYFDFNRFHCHFSPRDWQRLINNNWGFRPKKLSFKLFNIQVKEVTQNDGTTTVANNLTSTVQVFTDSEYQLPYVLGSAHQGCLPPFPADVFMVPQYGYLTLNNGSQAVGRSSFYCLEYFPSQMLRTGNNFQFSYTFEDVPFHSSYAHSQSLDRLMNPLIDQYLYYLNRTQGTTSGTTNQSRLLFSQAGPQSMSLQARNWLPGPCYRQQRLSKTANDNNNSNFPWTAASKYHLNGRDSLVNPGPAMASHKDDEEKFFPMHGNLIFGKEGTTASNAELDNVMITDEEEIRTTNPVATEQYGTVANNLQSSNTAPTTRTVNDQGALPGMVWQDRDVYLQGPIWAKIPHTDGHFHPSPLMGGFGLKHPPPQIMIKNTPVPANPPTTFSPAKFASFITQYSTGQVSVEIEWELQKENSKRWNPEIQYTSNYNKSVNVDFTVDTNGVYSEPRPIGTRYLTRNL

SEQ ID NO: 831 - protein, 736 aa, Artificial Sequence
  source: /note="Description of Artificial Sequence: Synthetic polypeptide"
MAADGYLPDWLEDNLSEGIREWWALKPGVPQPKANQQHQDNRRGLVLPGYKYLGPGNGLDKGEPVNEADAAALEHDKAYDQQLKAGDNPYLKYNHADAEFQERLQEDTSFGGNLGRAVFQAKKRILEPLGLVEEAAKTAPGKKRPVDQSPQEPDSSSGVGKSGKQPARKRLNFGQTGDSESVPDPQPLGEPPAAPTSLGSNTMASGGGAPMADNNEGADGVGNSSGNWHCDSQWLGDRVITTSTRTWALPTYNNHLYKQISGQSGASNDNHYFGYSTPWGYFDFNRFHCHFSPRDWQRLINNNWGFRPKKLSFKLFNIQVKEVTQNDGTTTIANNLTSTVQVFTDSEYQLPYVLGSAHQGCLPPFPADVFMVPQYGYLTLNNGSQAVGRSSFYCLEYFPSQMLRTGNNFQFSYTFEDVPFHSSYAHSQSLDRLMNPLIDQYLYYLNRTQGTTSGTTNQSRLLFSQAGPQSMSLQARNWLPGPCYRQQRLSKTANGNNNSNFPWTAASKYHLNGRDSLVNPGPAMASHKDDEEKFFPMHGNLIFGKEGTTASNAELDNVMITDEEEIRTTNPVATEQCGTVANNLQSSNTAPTTRTVNDQGALPGMVWQDRDVYLQGPIWAKIPHTDGHFHPSPLMGGFGLKHPPPQIMIKNTPVPANPPTTFSPAKFASFITQYSTGQVSVEIEWELQKENSKRWNPEIQYTSNYNKSVNVDFTVDTNGVYSEPRPIGTRYLTRNL

SEQ ID NO: 832 - protein, 736 aa, Artificial Sequence
  source: /note="Description of Artificial Sequence: Synthetic polypeptide"
MAADGYLPDWLEDNLSEGIREWWALKPGVPQPKANQQHQDNRRGLVLPGYKYLGPGNGLDKGEPVNEADAAALEHDKAYDQQLKAGDNPYLKYNHADAEFQERLQEDTSFGGNLGRAVFQAKKRILEPLGLVEGAAKTAPGKKRPVDQSPQEPDSSSGVGKSGKQPARKRLNFGQTGDSESVPDPQPLGEPPAAPTSLGSNTMASGGGAPMADNNEGADGVGNSSGNWHCDSQWLGDRVITTSTRTWALPTYNSHLYKQISSQSGASNDNHYFGYSTPWGYFDFNRFHCHFSPRDWQRLINNNWGFRPKKLSFKLFNIQVKEVTQNDGTTTIANNLTSTVQVFTDSEYQLPYVLGSAHQGCLPPFPADAFMVPQYGYLTLNNGSQAVGRSSFYCLEYFPSQMLRTGNNFQFSYTFEDVPFHGSYAHSQSLDRLMNPLIDQYLYYLNRTQGTTSGTTNQSRLLFSQAGPQSMSLQARNWLPGPCYRQQRLSKTANDNNNSNFPWTAASKYHLNGRDSLVNPGPAMASHKDDEEKFFPMHGNLIFGKEGTTASNAELDNVMITDEEEIRTTNPVATEQYGTVANNLQSSNTAPTTRTVNDQGALPGMVWQDRDVYLQGPIWAKIPHTDGHFHPSPLMGGFGLKHPPPQIMIKNTPVPANPPTTFSPAKFASFITQYSTGQVSVEIEWELQKENSKRWNPEIQYTSNYNKSVNVDFTVDTNGVYSEPRPIGTRYLTRNS

SEQ ID NO: 833 - protein, 736 aa, Artificial Sequence
  source: /note="Description of Artificial Sequence: Synthetic polypeptide"
MAADGYLPDWLEDNLSEGIREWWALKPGVPQPKANQQHQDNRRGLVLPGYKYLGPGNGLDKGEPVNEADAAALEHDKAYDQQLKAGDNPYLKYNHADAEFQERLQEDTSFGGNLGRAVFQAKKRILEPLGLVEGAAKTAPGKKRPVDQSPQEPDSSSGVGKSGKQLARKRLNFGQTGDSESVPDPQPLGEPPAAPTSLGSNTMASGGGAPMADNNEGADGVGNSSGNWHCDSQWLGDRVITTSTRTWALPTYNSHLYKQISGQSGASNDNHYFGYSTPWGYFDFNRFHCHFSPRDWQRLINNNWGFRPKKLSFKLFNIQVKEVTQNDGTTTIANNLTSTVQVFTDSEYQLPYVLGSAHQGCLPPFPADVFMVPQYGYLTLNNGSQAVGRSSFYCLEYFPSQMLRTGNNFQFSYTFEDVPFHSSYAHSQSLDRLMNPLIDQYLYYLNRTQGTTSGTTNQSRLLFSQAGPQSMSLQARNWLPGPCYRQQRLSKTANDNNNSNFPWTAASKYHLNGRDSLVNPGPAMASHKDDEEKFFPMHGNLIFGKEGTTASNAELDNVMITDEEEIRTTNPVATEQYGTVANNLQSSNTAPTTRTVNDQGALPGMVWQDRDVYLQGPIWAKIPHTDGHFHPSPLMGGFGLKHPPPQIMIKNTPVPANPPTTFSPAKFASFITQYSTGQVSVEIEWELQKENSKRWNPEIQYTSNYNKSVNVDFTVDTNGVYSEPRPIGTRYLTRNL

SEQ ID NO: 834 - protein, 736 aa, Artificial Sequence
  source: /note="Description of Artificial Sequence: Synthetic polypeptide"
MAADGYLPDWLEDNLSEGIREWWALKPGVPQPKANQQHQDDRRGLVLPGYKYLGPGNGLDKGEPVNEADAAALEHDKAYDQQLKAGDNPCLKYNHADAEFQERLQEDTSFGGNLGRAVFQAKKRILEPLGLVEEAAKTAPGKKRPVDQSPQEPDSSSGVGKSGKQPARKRLNFGQTGDSESVPDPQPLGEPPAAPTSLGSNTMASGGSAPMADNNEGADGVGNSSGNWHCDSQWLGDRVITTSTRTWALPTYNNHLYKQISSQSGASNDNHYFGYSTPWGYFDFNRFHCHFSPRDWQRLINNNWGFRPKKLSFKLFNIQVKEVTQNDGTTTIANNLTSTVQVFTDSEYQLPYVLGSAHQGCLPPFPADVFMVPQYGYLTLNNGSQAVGRSSFYCLEYFPSQMLRTGNNFQFSYTFEDVPFHSSYAHSQSLDRLMDPLIDQYLYYLNRTQGTTSGTTNQSRLLFSQAGPQSMSLQARNWLPGPCYRQQRLSKTANDNNNSNFPWTAASKYHLNGRDSLVNPGPAMASHKDDEEKFFPMHGNLIFGKEGTTASNAELDNVMITDEEEIRTTNPVATEQYGTVANNLQSSNTAPTTRTVNDQGALPGMVWQDRDVYLQGPIWAKIPHTDGHFHPSPLMGGFGLKHPPPQIMIKNTPVPANPPTTFSPAKFASFITQYSTGQVSVEIEWELQKENSKRWNPEIQYTSNYNKSVNVDFTVDTNGVYSEPRPIGTRYLTRNL

SEQ ID NO: 835 - protein, 736 aa, Artificial Sequence
  source: /note="Description of Artificial Sequence: Synthetic polypeptide"
MAADGYLPDWLEDNLSEGIREWWALKPGVPQPKANQQHQDDRRGLVLPGYKYLGPGNGLDKGEPVNEADAAALEHDKAYDQQLKAGDNPYLKYNHADAEFQERLQEDTSFGGNLGRAVFQAKKRILEPLGLVEEAAKTAPGKKRPVDQSPQEPDSSSGVGKSGKQPARKRLNFGQTGDSESVPDPQPLGEPPAAPTSLGSNTMASGGGAPMADNNEGADGVGNSSGNWHCDSQWLGNRVITTSTRTWALPTYNNHLYKQISSQSGASNDNHYFGYSTPWGYFDFNRFHCHFSPRDWQRLINNNWGFRPKKLSFKLFNIQVKEVTQNDGTTTIANNLTSTVQVFTDSEYQLPYVLGSAHQGCLPPFPADVFMVPQYGYLTLNNGSQAVGRSSFYCLEYFPSQMLRTGNNFQFSYTFEDVPFHSSYAHSQSLDRLMNPLIDQYLYYLNRTQGTTSGTTNQSRLLFSQAGPQSMSLQARNWLPGPCYRQQRLSKTANDNNNSNFPWTAASKYHLNGRDSLVNPGPAMASHKDDEEKFFPMHGNLIFGKEGTTASNAELDNVMITDEEEIRTTNPVATEQYGTVANNLQSSNTAPTTRTVNDQGALPGMVWQDRDVYLQGPIWAKIPHTDGHFHPSPLMGGFGLKHPPPQIMIKNTPVPANPPTTFSPAKFASFITQYSTGQVSVEIEWELQKENSKRWNPEIQYTSNYNKSVNVDFTVDTNGVYSEPRPIGTRYLTRNL

SEQ ID NO: 836 - protein, 736 aa, Artificial Sequence
  source: /note="Description of Artificial Sequence: Synthetic polypeptide"
MAADGYLPDWLEDNLSEGIREWWALKPGVPQPKANQQHQDDRRGLVLPGYKYLGPGNGLDKGEPVNEADAAALEHDKAYDQQLKAGDNPYLKYNHADAEFQERLQEDTSFGGNLGRAVFQAKKRILEPLGLVEEAAKTAPGKKRPVDQSPQEPDSSSGVGKSGKQPARKRLNFGQTGDSESVPDPQPLGEPPAAPTSLGSNTMASGGGAPMADNNEGADGVGNSSGNWHCDSQWLGDRVITTSTRTWALPTYNNHLYKQISSQSGASNDNHYFGYSTPWGYFDFNRFHCHFSPRDWQRLINNNWGFRPKKLSFKLFNIQVKEVTQNDGTTTIANNLTSTVQVFTDSEYQLPYVLGSAHQGCLPPFPADVFMVPQYGYLTLNNGSQAVGRSSFYCLEYFPSQMLRTGNNFQFSYTFEDVPFHSSYAHSQSLDRLMNPLIDQYLYYLNRTQGTTSGTTNQSRLLFSQAGPQSMSLQARNWLPGPCYRQQRLSKTANDNNNSNFPWTAASKYHLNGRDSLVNPGPAMASHKDDEEKFFPMHGNLIFGKEGTTASNAELDNVMITDEEEIRTTNPVATVQYGTVANNLQSSNTAPTTRTVNDQGALPGMVWQDRDVYLQGPIWAKIPHTDGHFHPSPLMGGFGLKHPPPQIMIKNTPVPANPPTTFSPAKFASFITQYSTGQVSVEIEWELQKENSKRWNPEIQYTSNYNKSVNVDFTVDTNGVYSEPRPIGTRYLTRNL

SEQ ID NO: 837 - protein, 735 aa, Artificial Sequence
  source: /note="Description of Artificial Sequence: Synthetic polypeptide"
MAADGYLPDWLEDNLSEGIREWWALKPGVPQPKANQQHQDNRRGLVLPGYKYLGPGNGLDKGEPVNEADAAALEHDKAYDQQLKAGDNPYLKYNHADAEFQERLQEDTSFGGNLGRAVFQAKKGILEPLGLVEEAAKTAPGKKRPVDQSPQEPDSSSGVGKSGKQPARKRLNFGQTGDSESVPDPQPLGEPPAAPTSLGSNTMASGGGAPMADNNEGADGVGNSSGNWHCDSQWLGDRVITTSTRTWALPTYNNHLYKQISSQSGASNDNHYFGYSTPWGYFDFNRFHCHFSPRDWQRLINNNWGFRPKKLSFKLFNIQVKEVTQNDGTTTIANNLTSTVQVFTDSEYQLPYVFGSAHQGCLPPFPADVFMVPQYGYLTLNNGSQAVGRSSFYCLEYFPSQMLRTGNNFQFSYTFEDVPFHSSYAHSQSSDRLMNPLIDQYLYYLNRTQGTTSGTTNQSRLLFSQAGPQSMSLQARNWLPGPCYRQQRLSKTANDNNNSNFPTAASKYHLNGRDSLVNPGPAMASHKDDEEKFFPMHGNLIFGKEGTTASNAELDNVMITDEEEIRTTNPVATEQYGTVANNLQSSNTAPTTRTVNDQGALPGMVWQDRDVYLQGPIWAKIPHTDGHFHPSPLMGGFGLKHPPPQIMIKNTPVPANPPTTFSPAKFASFITQYSTGQVSVEIEWELQKENSKRWNPEIQYTSNYNKSVNVDFTVDTNGVYSEPRPIGTRYLTRNL

SEQ ID NO: 838 - protein, 736 aa, Artificial Sequence
  source: /note="Description of Artificial Sequence: Synthetic polypeptide"
MAADGYLPDWLEDNLSEGIREWWALKPGVPQPKANQQHQDNRRGLVLPGYKYLGPGNGLDEGEPVNEADAAALEHDKAYDQQLKAGDNPYLKYNHADAEFQERLQEDTSFGGNLGRAVFQAKKRILEPLGLVEGAAKTAPGKKRPVDQSPQEPDSSSGVGKSGKQPARKRLNFGQTGDSESVPDPQPLGEPPAAPTSLGSNTMASGGGAPMADNNEGADGVGNSSGNWHCDSQWLGDRVITTSTRTWALPTYNSHLYKQISSQSGASNDNHYFGYSTPWGYFDFNRFHCHFSPRDWQRLINNNWGFRPKKLSFKLFNIQVKEVTQNDGTTTIANNLTSTVQVFTDSEYQLPYVLGSAHQGCLPPFPADVFMVPQYGYLTLNNGSQAVGRSSFYCLEYFPSQMLRTGNNFQFSYTFEDVPFHSSYAHSQSLDRLMNPLIDQYLYYLNRTQGTTSGTTNQSRLLFSQAGPQSMSLQARNWLPGPCYRQQRLSKTANDNNNSNFPWTAASKYHLNGRDSLVNPGPAMASHKDDEEKFFPMHGNLIFGKEGTTASNAELDNVMITDEEEIRTTNPVATEQYGTVANNLQSSNTAPTTRTVNDQGALPGMVWQDRDVYLQGPIWAKIPHTDGHFHPSPLMGGFGLKHPPPQIMIKNTPVPANPPTTFSPAKFASFITQYSTGQVSVEIEWELQKENSKRWNPEIQYTSNYNKSVNVDFTVDTNGVYSEPRPIGTRYLTRNL

SEQ ID NO: 839 - protein, 668 aa, Artificial Sequence
  source: /note="Description of Artificial Sequence: Synthetic polypeptide"
MAADGYLPDWLEDNLSEGIREWWALKPGVPQPKANQQHQDNRRGLVLPGYKYLGPGNGLDKGEPVNEADAAALEHDKAYDQQLKAGDNPYLKYNHADAEFQERLQEDTSFGGNLGRAVFQAKKRILEPLGLVEGAAKTAPGKKRPVDQSPQEPDSSSGVGKSGKQPARKRLNFGQTGDSESVPDPQPLGEPPAAPTSLGSNTMASGGGAPMADNNEGADGVGNSSGNWHCDSQWLGDRVITTSTRTWALPTYNSHLYKQISSQSGASNDNHYFGYSTPWGILTLTDSTATSHHVTGSDSLTTTGDSGPRNSASSSSTSKLKRSRRTMARRLLPITLPARFKCLRTRSISSRTCSGRRTKAVSRRFQRTPSWSLSMDTSPTTEVKRWDAHPFTAWSTSLRRCGLEITSNSAIPSRMYLFTAATLTARVWIAILLLISICTTTERKEQPLEQPTNHGCFLARLGLSLCLCRPEIGYLGPATGNRDFQRLLTTTTTVTFLGQRPANIISMAATRWIQDQLWPVTRTMKKNFSLCTAIRGPYLAWCGKIVTCTFKDLSGQRFLTRMDTFILLLWEALDNIRLLKSSKILRYRQILRRLSARPSLLHLSLSTPLDRSAWKLSGSYRKKTANVGIQRFSTLPTTTSLLMWTLLTLMVFIVNLALLEPGISHETC

SEQ ID NO: 840 - protein, 734 aa, Artificial Sequence
  source: /note="Description of Artificial Sequence: Synthetic polypeptide"
MTDGYLPDWLEDNLSEGVREWWALQPGAPKPKANQQHQDNARGLVLPGYKYLGPGNGLDKGEPVNAADAAALEHDKAYDQQLKAGDNPYLKYNHADAEFQQRLQGDTSFGGNLGRAVFQAKKRVLEPLGLVEQAGETAPGKKRPLIESPQQPDSSTGIGKKGKQPAKKKLVFEDETGAGDGPPEGSTSGAMSDDSEMRAATGGAAVEGGQGADGVGNASGDWHCDSTWSEGHVTTTSTRTWVLPTYNNHLYKRLGESLQSNTYNGFSTPWGYFDFNRFHCHFSPRDWQRLINNNWGMRPKAMRVKIFNIQVKEVTTSNGETTVANNLTSTVQIFADSSYELPYVMDAGQEGSLPPFPNDVFMVPQYGYCGLVTGNTSQQQTDRNAFYCLEYFPSQMLRTGNNFEITYSFEKVPFHSMYAHSQSLDRLMNPLIDQYLWGLQSTTTGTTLNAGTATTNFTKLRPTNLSNFKKNWLPGPSIKQQGFSKTANQNYKIPATGSDSLIKYETHSTLDGRWSALTPGPPMATAGPADSKFSNSQLIFAGPKQNGNTATVPGTLIFTSEEELAATNATDTDMWGNLPGGDQSNSNLPTVDRLTALGAVPGMVWQNRDIYYQGPIWAKIPHTDGHFHPSPLIGGFGLKHPPPQIFIKNTPVPANPATTFSSTPVNSFITQYSTGQVSVQIDWEIQKERSKRWNPEVQFTSNYGQQNSLLWAPDAAGKYTEPRAIGTRYLTHHL

SEQ ID NO: 841 - protein, 734 aa, Artificial Sequence
  source: /note="Description of Artificial Sequence: Synthetic polypeptide"
MTDGYLPDWLEDNLSEGVREWWALQPGAPKPKANQQHQDNARGLVLPGYKYLGPGNGLDKGEPVNAADAAALEHDKAYDQQLKAGDNPYLKYNHADAEFQQRLQGDTSFGGNLGRAVFQAKKRVLEPLGLVEQAGETAPGKKRPLIESPQQPDSSTGIGKKGKQPAKKKLVFEDETGAGDGPPEGSTSGAMSDDSEMRAAAGGAAVEGGQGADGVGNASGDWHCDSTWSEGHVTTTSTRTWVLPTYNNHLYKRLGESLQSNTYNGFSTPWGYFDFNRFHCHFLPRDWQRLINNNWGVRPKAMRVKIFNIQVKEVTTSNGETTVANNLTSTVQIFADSSYELPYVMDAGQEGSLPPFPNDVFMVPQYGYCGLVTGDTSQQQTDRNAFYCLEYFPSQMLRTGNNFEITYSFEKVPFHSMYAHSQSLDRLMNPLIDQYLWGLQSTTTGTTLNAGTATTNFTKLRPTNFSNFKKNWLPGPSIKQQGFSKTANQNYKIPATGSDSLIKYETHSTLDGRWSALTPGPPMATAGPADSKFSNSQLIFAGPKQNGNTATVPGTLIFTSEEELAATNATDTDMWGNLPGGDQSNSNLPTVDRLTALGAVPGMVWQNRDIYYQGPIWAKIPHTDGHFHPSPLIGGFGLKHPPPQIFIKNTPVPANPATTFSSTPVNSFITQYSTGQVSVQIDWEIQKERSKRWNPEVQFTSNYGQQNSLLWAPDAAGKYTEPRAIGTRYLTHHL

SEQ ID NO: 842 - protein, 734 aa, Artificial Sequence
  source: /note="Description of Artificial Sequence: Synthetic polypeptide"
MTDGYLPDWLEDNLSEGVREWWALQPGAPKPKANQQHQDNARGLVLPGYKYLGPGNGLDEGEPVNAADAAALEHDKAYDQQLKAGDNPYLKYNHADAEFQQRLQGDTSFGGNLGRAVFQAKKRVLEPLGLVEQAGETAPGKKRPLIESPQQPDSSTGIGKKGKQPAKKKLVFEDETGAGDGPPEGSTSGAMSDDSEMRAAAGGAAVEGGQGADGVGNASGDWHCDSTWSEGHVTTTSTRTWVLPTYNNHLYKRLGESLQSNTYNGFSTPWGYFDFNRFHCHFSPRDWQRLINNNWGMRPKAMRVKIFNIQVKEVTTSNGETTVANNLTSTVQIFADSSYELPYVMDAGQEGSLPPFPNDVFMVPQYGYCGLVTGNTSQQQTDRNAFYCLEYFPSQMLRTGNNFEITYSFEKVPFHSMYAHSQSLDRLMNPLIDQYLWGLQSTTTGTTLNAGTATTNFTKLRPTNFSNFKKNWLPGPSIKQQGFSKTANQNYKIPATGSDSLIKYETHSTLDGRWSALTPGPPMATAGPADSKFSNSQLIFAGPKQNGNTATVPGTLIFTSEEELAATNATDTDMWGNLPGGDQSNSNLPTVDRLTALGAVPGMVWQNRDIYYQGPIWAKIPHTDGHFHPSPLIGGFGLKHPPPQIFIKNTPVPANPATTFSSTPVNSFITQYSTGQVSVQIDWEIQKERSKRWNPEVQFTSNYGQQNSLLWAPDAAGKYTEPRAIGTRYLTHHL

SEQ ID NO: 843 - protein, 734 aa, Artificial Sequence
  source: /note="Description of Artificial Sequence: Synthetic polypeptide"
MTDGYLPDWLEDNLSEGVREWWALQPGAPKPKANQQHQDNARGLVLPGYKYLGPGNGLDKGEPVNAADAAALEHDKAYDQQLKAGDNPYLKYNHADAEFQQRLQGDTSFGGNLGRAVFQAKKRVLEPLGLVEQAGETAPGKKRPLIESPQQPDSSTGIGKKGKQPAKKKLVFEDGTGAGDGPPEGSTSGAMSDDSEMRAAAGGAAVEGGQGADGVGNASGDWHCDSTWSEGHVTTTSTRTWVLPTYNNHLYKRLGESLQSNTYNGFPTPWGYFDFNRFHCHFSPRDWQRLINNNWGMRPKAMRVKIFNIQVKEVTTSNGETTAANNLTSTVQIFADSSYELPYVMDAGQEGSLPPFPNDVFMVPQYGYCGLVTGNTSQQQTDRNAFYCLEYFPSQMLRTGNNFEITYSFEKVPFHSMYAHSQSLDRLMNPLIDQYLWGLQSTTTGTTLNAGTATTNFTKLRPTNFSNFKKNWLPGPSIKQQGFSKTANQNYKIPATGSDSLIKYETHSTLDGRWSALTPGPPMATAGPADSKFSNSQLIFAGPKQNGNTATVPGTLIFTSEEELAATNATDTDMWGNLPGGDQSNSNLPTVDRLTALGAVPGMVWQNRDIYYQGPIWAKIPHTDGHFHPSPLIGGFGLKHPPPQIFIKNTPVPANPATTFSSTPVNSFITQYSTGQVSVQIDWEIQKERSKRWNPEVQFTSNYGQQNSLLWAPDAAGKYTEPRAIGTRYLTHHL

SEQ ID NO: 844 - protein, 734 aa, Artificial Sequence
  source: /note="Description of Artificial Sequence: Synthetic polypeptide"
MTDGYLPDWLEDNLSEGVREWWALQPGAPKPKANQQHQDNARGLVLPGYKYLGPGNGLDKGEPVNAADAAALEHDKAYDQQLKAGDNPYLKYNHADAEFQQRLQGDTSFGGNLGRAVFQAKKRVLEPLGLVEQAGETAPGKKRPLIESPQQPDSSTGIGKKGKQPAKKKLVFEDETGAGDGPPEGSTSGAMSDDSEMRAAAGGAAVEGGQGADGVGNASGDWHCDSTWSEGHVTTTSTRTWVLPTYNNHLYKRLGESLQSNTYNGFSTPWGYFDFNRFHCHFSPRDWQRLINNNWGMRPKAMRVKIFNIQVKEVTTSNGETTVANNLTSTVQIFADSSYELPYVMDAGQEGSLPPFPNDVFMVPQYGYRGLVTGNTSQQQTDRNAFYCLEYFPSQMLRTGNNFEITYSFEKVPFHSMYAHSQSLDRLMNPLIDQYLWGLQSTTTGTTLNAGTATTNFTKLRPTNFSNFKKNWLPGPSIKQQGFSKTANQNYKIPATGSDSLIKYETHSTLDGRWSALTPGPPMATAGPADSKFSNSQLIFAGPKQNGNTATVPGTLIFTSEEELAATNATDTDMWGNLPGGDQSNSNLPTVDRLTALGAVPGMVWQNRDIYYQGPIWAKIPHTDGHFHPSPLIGGFGLKHPPPQIFIKNTPVPANPATTFSSTPVNSFITQYSTGQVSVQIDWEIQKERSKRWNPEVQFTSNYGQQNSLLWAPDAAGKYTEPRAIGTRYLTHHL

SEQ ID NO: 845 - protein, 734 aa, Artificial Sequence
  source: /note="Description of Artificial Sequence: Synthetic polypeptide"
MTDGYLPDWLEDNLSEGVREWWALQPGAPKPKANQQHQDNARGLVLQGYKYLGPGNGLDKGEPVNAADAAALEHDKAYDQQLKAGDNPYLKYNHADAEFQQRLQGDTSFGGNLGRAVFQAKKRVLEPLGLVEQAGETAPGKKRPLIESPQQPDSSTGIGKKGKQPAKKKLVFEDETGAGDGPPEGSTSGAMSDDSEMRAAAGGAAVEGGQGADGVGNASGDWHCDSTRSEGHVTTTSTRTWVLPTYNNHLYKRLGESLQSNTYNGFSTPWGYFDFNRFHCHFSPRDWQRLINNNWGMRPKAMRVKIFNIQVKEVTTSNGETTVANNLTSTVQIFADSSYELPYVMDAGQEGSLPPFPNDVFMVPQYGYCGLVTGNTSQQQTDRNAFYCLEYFPSQMLRTGNNFEITYSFEKVPFHSMYAHSQSLDRLMNPLIDQYLWGLQSTTTGTTLNAGTATTNFTKLRPTNFSNFKKNWLPGPSIKQQGFSKTANQNYKIPATGSDSLIKYETHSTLDGRWSARTPGPPMATAGPADSKFSNSQLIFAGPKQNGNTATVPGTLIFTSEEELAATNATDTDMWGNLPGGDQSNSNLPTVDRLTALGAVPGMVWQNRDIYYQGPIWAKIPHTDGHFHPSPLIGGFGLKHPPPQIFIKNTPVPANPATTFSSTPVNSFITQYSTGQVSVQIDWEIQKERSKRWNPEVQFTSNYGQQNSLLWAPDAAGKYTEPRAIGTRYLTHHL

SEQ ID NO: 846 - protein, 724 aa, Artificial Sequence
  source: /note="Description of Artificial Sequence: Synthetic polypeptide"
MSFVDHPPDWLEEVGEGLREFLGLEAGPPKPKPNQQHQDQARGLVLPGYNYLGPGNGLDRGEPVNRADEVAREHDISYNEQLEAGDNPYLKYNHADAEFQERLADDTSFGGNLGKAVFQAKKRVLEPFGLVEEGAKTAPTGKRIDDHFPKRKKARTEEDSKPSTSSDAEAGPSGSQQLQIPAQPASSLGADTMSAGGGGPLGDNNQGADGVGNASGDWHCDSTWMGDRVVTKSTRTWVLPSYNNHQYREIKSGSVDGSNANAYFGYSTPWGYFDFNRFHSHWSPRDWQRLINNYWGFRPRSLRVKIFNIQVKEVTVQDSTTTIANNLTSTVQVFTDDDYQLPYVVGNGTEGCLPAFPPQVFTLPQYGYATLNRDNTENPTERSSFFCLEYFPSKMLRTGNNFEFTYNFEEVPFHSSFAPSQNLFKLANPLVDQYLYRFVSTNNTGGVQFNKNLAGRYANTYKNWFPGPMGRTQGWNLGSGVNRASVSAFATTNRMELEGASYQVPPQPNGMTNNLQGSNTYALENTMIFNSQPANPGTTATYLEGNMLITSESETQPVNRVAYNVGGQMATNNQSSTTAPATGTYNLQEIVPGSVWMERDVYLQGPIWAKIPETEAHFHPSPAMGGFGLKHPPPMMLIKNTPVPGNITSFSDVPVSSFITQYSTGQVTVEMEWELKKENSKRWNPEIQYTNNYNDPQFVDFAPDSTGEYRTTRPIGTRYLTRPL

SEQ ID NO: 847 - protein, 724 aa, Artificial Sequence
  source: /note="Description of Artificial Sequence: Synthetic polypeptide"
MSFVDHPPDWLEEVGEGLREFLGLEAGPPKPKPNQQHQDQARGLVLPGYNYLGPGNGLDRGEPVNRADEVAREHDISYNEQLEAGDNPYLKYNHADAEFQEKLADDTSSGGNLGKAVFQAKKRVLEPFGLVEEGAKTAPTGKRIDDHFPKRKKARTEEDSKPSTSSDAEAGPSGSQQLQIPAQPASSLGADTMSAGGGGPLGDNNQGADGVGNASGDWHCDSTWMGDRVVTKSTRTWVLPSYNNHQYREIKSGSVDGSNANAYFGYSTPWGYFDFNRFHSHWSPRDWQRLINNYWGFRPRSLRVKIFNIQVKEVTVQDSTTTIANNLTSTVQVFTDDDYQLPYVVGNGTEGCLPAFPPQVFTLPQYGYATLNRDNTENPTERSSFFCLEYFPSKMLRTGNNFEFTYNFEEVPFHSSFAPSQNLFKLANPLVDQYLYRFVSTNNTGGVQFNKNLAGRYANTYKNWFPGPMGRTQGWNLGSGVNRASVSAFATTNRMELEGASYQVPPQPNGMTNNLQGSNTYALENTMIFNSQPANPGTTATYLEGNMLITSESETQPVNRVAYNVGGQMATNNQSSTTAPATGTYNLQEIVPGSVWMERDVYLQGPIWAKIPETGAHFHPSPAMGGFGLKHPPPMMLIKNTPVPGNITSFSDVPVSSFITQYSTGQVTVEMEWELKKENSKRWNPEIQYTNNYNDPQFVDFAPDSTGEYRTTRPIGTRYLTRPL

SEQ ID NO: 848 - protein, 724 aa, Artificial Sequence
  source: /note="Description of Artificial Sequence: Synthetic polypeptide"
MSFVDHPPDWLEEVGEGLREFLGLEAGPPKPKPNQQHQDQARGLVLPGYNYLGPGNGLDRGEPVNRADEVAREHDISYNEQLEAGDNPYLKYNHADAEFQEKLADDTSFGGNLGKAVFQAKKRVLEPFGLVEEGAKTAPTGKRIDDHFPKRKKARTEEDSKPSTSSDAEAGPSGSQQLQIPAQPASSLGADTMSAGGGGPLGDNNQGADGVGNASGDWHCDSTWMGDRVVTKSTRTWVLPSYNNHQYREIKSGSVDGSNANAYFGYSTPWGYFDFNRFHSHWSPRDWQRLINNYWGFRPRSLRVKIFNIQVKEVTVQDSTTTIANNLTSTVQVFTDDDYQLPYVVGNGTEGCLPAFPPQVFTLPQYGYATLNRDNTENPTERSSFFCLEYFPSKMLRTGNNFEFTYNFEEVPFHSSFAPSQNLFKLANPLVDQYLYRFVSTNNTGGVQFNKNLAGRYANTYKNWFPGPMGRTQGWNLGSGVNRASVSAFATTNRMELEGASYQVPPQPNGMTNNLQGSNTYALENTMIFNSQPANPGTTATYLEGNMLITSESETQPVNRVAYNVGGQMATNNQSSTTAPATGTYNLQEIVPGSVWMERDVYLQGPIWAKIPETGAHFHPSPAMGGFGLKHPPPMMLIKSTPVPGNITSFSDVPVSSFITQYSTGQVTVEMEWELKKENSKRWNPEIQYTNNYNDPQFVDFAPDSTGEYRTTRPIGTRYLTRPL

SEQ ID NO: 849 - protein, 724 aa, Artificial Sequence
  source: /note="Description of Artificial Sequence: Synthetic polypeptide"
MSFVDHPPDWLEEVGEGLREFLGPEAGPPKPKPNQQHQDQARGLVLPGYNYLGPGNGLDRGEPVNRADEVAREHDISYNEQLEAGDNPYLKYNHADAEFQEKLADDTSFGGNLGKAVFQAKKRVLEPFGLVEEGAKTAPTGKRIDDHFPKRKKVRTEEDSKPSTSSDAEAGPSGSQQLQIPAQPASSLGADTMSAGGGGPLGDNNQGADGVGNASGDWHCDSTWMGDRVVTKSTRTWVPPSYNNHQYREIKSGSVDGSNANAYFGYSTPWGYFDFNRFHSHWSPRDWQRLINNYWGFRPRSLRVKIFNIQVKEVTVQDSTTTIANNLTSTVQVFTDDDYQLPYVVGNGTEGCLPAFPPQVFTLPQYGYATLNRDNTENPTERSSFFCLEYFPSKMLRTGNNFEFTYNFEEVPFHSSFAPSQNLFKLANPLVDQYLYRFVSTNNTGGVQFNKNLAGRYANTYKNWFPGPMGRTQGWNLGSGVNRASVSAFATTNRMELEGASYQVPPQPNGMTNNLQGSNTYALENTMIFNSQPANPGTTATYLEGNMLITSESETQPVNRVACNVGGQMATNNQSSTTAPATGTYNLQEIVPGSVWMERDVYLQGPIWAKIPETGAHFHPSPAMGGFGLKHPPPMMLIKNTPVPGNITSFSDVPVSSFITQYSTGQVTVEMEWELKKENSKRWNPEIQYTNNYNDPQFVDFAPDSTGEYRTTRPIGTRYLTRPL

SEQ ID NO: 850 - protein, 724 aa, Artificial Sequence
  source: /note="Description of Artificial Sequence: Synthetic polypeptide"
MSFVDHPPDWLEEVGEGLREFLGLEAGPPKPKPNQQHQDQARGLVLPGYNYLGPGNGLDRGEPVNRADEVAREHDISYNEQLEAGDNPYLKYNHADAEFQEKLADDTSFGGNLGKAVFQAKKRVLEPFGLVEEGAKTAPTGKRIDDHFPKRKKARTEEDSKPSTSSDAEAGPSGSQQLQIPAQPASSLGADTMSAGGGGPLGDNNQGADGVGNASGDWHCDSTWMGDRVVTKSTRTWVLPSYNNHQYREIKSGSVDGSNANAYFGYSTPWGYFDFNRFHSHWSPRDWQRLINNYWGFRPRSLRVKIFNIQVKEVTVQDSTTTIANNLTSTVQVFTDDDYQLPYVVGNGTEGCLPAFPPQVFTLPQYGYATLNRDNTENPTERSSFFCLEYFPSKMLRTGNNFEFTYNFEEVPFHSSFAPSQNLFKLANPLVDQYLYRFVSTNNTGGVQFNKNLAGRYANTYKNWFPGPMGRTQGWNLGSGVNRASVSAFATTNRMELEGASYQVPPQPNGMTNNLQGSNTYALENTMIFNSQPANPGTTATYLEGNMLITSESETQPVNRVAYNVGGQMATNNQSSTTAPATGAYNLQEIVPGSVWMERDVYLQGPIWAKIPETGAHFHPSPAMGGFGLKHPPPMMLIKNTPVPGNITSFSDVPVSSFITQYSTGQVTVEMEWELKKENSKRWNPEIQYTNNYNDPQFVDFAPDSTGEYRTTRPIGTRYLTRPL

SEQ ID NO: 851 - protein, 724 aa, Artificial Sequence
  source: /note="Description of Artificial Sequence: Synthetic polypeptide"
MSFVDHPPDWLEEVGEGLREFLGLEAGPPKPKPNQQHQDQARGLVLPGYNYLGPGNGLDRGEPVNRADGVAREHDISYNEQLEAGDNPYLKYNHADAEFQEKLADDTSFGGNLGKAVFQAKKRVLEPFGLVEEGAKTAPTGKRIDDHFPKRKKARTEEDSKPSTSSDAEAGPSGSQQLQIPAQPASSLGADTMSAGGGGPLGDNNQGADGVGNASGDWHCDSTWMGDRVVTKSTRTWVLPSYNNHQYREIKSGSVDGSNANAYFGYSTPWGYFDFNRFHSHWSPRDWQRLINNYWGFRPRSLRVKIFNIQVKEVTVQDSTTTIANNLTSTVQAFTDDDYQLPYVVGNGTEGCLPAFPPQVFTLPQYGYATLNRDNTENPTERSSFFCLEYFPSKMLRTGNNFEFTYNFEEVPFHSSFAPSQNLFKLANPLVDQYLYRFVSTNNTGGVQFNKNLAGRYANTYKNWFPGPMGRTQGWNLGSGVNRASVSAFATTNRMELEGASYQVPPQPNGMTNNLQGSNTYALENTMIFNSQPANPGTTATYLEGNMLITSESETQPVNRVAYNVGGQMATNNQSSTTAPATGTYNLQEIVPGSVWMERDVYLQGPIWAKIPETGAHFHPSPAMGGFGLKHPPPMMLIKNTPVPGNITSFSDVPVSSFITQYSTGQVTVEMEWELKKENSKRWNPEIQYTNNYNDPQFVDFAPDSTGEYRTTRPIGTRYLTRPL

SEQ ID NO: 852 - protein, 723 aa, Artificial Sequence
  source: /note="Description of Artificial Sequence: Synthetic polypeptide"
MSFVDHPPDWLEEVGEGLREFLGLEAGPPKPKPNQQHQDQARGLVLPGYNYLGPGNGLDRGEPVNRADEVAREHDISYNEQLEAGDNPYLKYNHADAEFQEKLADDTSFGGNLGKAVFQAKKRVLEPFGLVEEGAKTAPTGKRIDDHFPKRKKARTEEDSKPSTSSDAEAGPSGSQQLQIPAQPASSLGADTMSAGGGGPLGDNNQGADGVGNASGDWHCDSTWMGDRVVTKSTRTWVLPSYNNHQYREIKSGSVDGSNANAYFGYSTPWGYFDFNRFHSHWSPRDWQRLINNYWGFRPRSLRVKIFNIQVKEVTVQDSTTTIANNLTSTVQVFTDDDYQLPYVVGNGTEGCLPAFPPQVFTLPQYGYATLNRDNTENPTERSSFFCLEYFPSKMLRTGNNFEFTYNFEEVPFHSSFAPSQNLFKLANPLVDQYLYRFVSTNNTGGVQFNKNLAGRYANTYKNWFPGPMGRTQGWNLGSGVNRASVSAFATTNRMELEGASYVPPQPNGMTNNLQGSNTYALENTMIFNSQPANPGTTATYLEGNMLITSESETQPVNRVAYNVGGQMATNNQSSTTAPATGTYNLQEIVPGSVWMEGDVYLQGPIWAKIPETGAHFHPSPAMGGFGLKHPPPMMLIKNTPVPGNITSFSDVPVSSFITQYSTGQVTVEMEWELKKENSKRWNPEIQYTNNYNDPQFVDFAPDSTGEYRTTRPIGTRYLTRPL

SEQ ID NO: 853 - protein, 724 aa, Artificial Sequence
  source: /note="Description of Artificial Sequence: Synthetic polypeptide"
MSFVDHPPDWLEEVGEGLREFLGLEAGPPKPKPNQQHQDQARGLVLPGYNYLGPGNGLDRGEPVNRADEVAREHDISYNEQLEAGDNPYLKYNHADAEFQEKLADDTSFGGNLGKAVFQAKKRVLEPFGLVEEGAKTAPTGKRIDDHFPKRKKVRTEEDSKPSTSSDAEAGPSGSQQLQIPAQPASSLGADTMSAGGGGPLGDNNQGADGVGNASGDWHCDSTWMGDRVVTKSTRTWVLPSYNNHQYREIKSGSVDGSNANAYFGYSTPWGYFDFNRFHSHWSPRDWQRLINNYWGFRPRSLRVKIFNIQVKEVTVQDSTTTIANNLTSTVQVFTDDDYQLPYVVGNGTEGCLPAFPPQVFTLPQYGYATLNRDNTENPTERSSFFCLEYFPSKMLRTGNNFEFTYNFEEVPFHSSFAPSQNLFKLANPLVDQYLYRFVSTNNTGGVQFNKNLAGRYANTYKNWFPGPMGRTQGWNLGSGVNRASVSAFATTNRMELEGASYQVPPQPNGMTNNLQGSNTYALENTMIFNSQPANPGTTATYLEGNMLITSESETQPVNRVAYNVGGQMATNNQSSTTAPATGTYNLQEIVPGSVWMERDVYLQGPIWAKIPETGAHFHPSPAMGGFGLKHPPPMMLIKNTPVPGNITSFSDVPVSSFITQYSTGQVTVEMEWELKKENSERWNPEIQYTNNYNDPQFVDFAPDSTGEYRTTRPIGTRYLTRPL

SEQ ID NO: 854 - protein, 724 aa, Artificial Sequence
  source: /note="Description of Artificial Sequence: Synthetic polypeptide"
MSFVDHPPDWLEEVGEGLREFLGLEAGPPKPKPNQQHQDQARGLVLPGYNYLGPGNGLDRGEPVNRADEVAREHDISYSEQLEAGDNPYLKYNHADAEFQEKLADDTSFGGNLGKAVFQAKKRVLEPFGLVEEGAKTAPTGKRIDDHFPKRKKARTEEDSKPSTSSDAEAGPSGSQQLQIPAQPASSLGADTMSAGGGGPLGDNNQGADGVGNASGDWHCDSTWMGDRVVTKSTRTWVLPSYNNHQYREIKSGSVDGSNANAYFGYSTPWGYFDFNRFHSHWSPRDWQRLINNYWGFRPRSLRVKIFNIQVKEVTVQDSTTTIANNLTSTVQVFTDDDYQLPYVVGNGTEGCLPAFPPQVFTLPQYGYATLNRDNTENPTERSSFFCLEYFPSKMLRTGNNFEFTYNFEEVPFHSSFAPSQNLFKLANPLVDQYLYRFVSTNNTGGVQFNKNLAGRYANTYKNWFPGPMGRTQGWNLGSGVNRASVSAFATTNRMELEGASYQVPPQPNGMTNNLQGSNTYALENTMIFNSQPANPGTTATYLEGNMLITSESETQPVNRVAYNVGGQMATNNQSSTTAPATGTYNLQEIVPGSVWMERDVYLQGPIWAKIPETGAHFHPSPAMGGFGLKHPPPMMLIKNTPVPGNITSFSDVPVSSFITQYSTGQVTVEMEWELKKENSKRWNPEIQYTNNYNDPQFVDFAPDSTGEYRTARPIGTRYLTRPL

SEQ ID NO: 855 - protein, 724 aa, Artificial Sequence
  source: /note="Description of Artificial Sequence: Synthetic polypeptide"
MSFVDHPPDWLEEVGEGLREFLGPEAGPPKPKPNQQHQDQARGLVLPGYNYLGPGNGLDRGEPVNRADEVAREHDISYNEQLEAGDNPYLKYNHADAEFQEKLADDTSFGGNLGKAVFQAKKRVLEPFGLVEEGAKTAPTGKRIDDHFPKRKKARTEEDSKPSTSSDAEAGPSGSQQLQIPAQPASSLGADTMSAGGGGPLGDNNQGADGVGNASGDWHCDSTWMGDRVVTKSTRTWVLPSYNNHQYREIKSGSVDGSNANAYFGYSTPWGYFDFNRFHSHWSPRDWQRLINNYWGFRPRSLRVKIFNIQVKEVTVQDSTTTIANNLTSTVQVFTDDDYQLPYVVGNGTEGCLPAFPPQVFTLPQYGYATLNRDNTENPTERSSFFCLEYFPSKMLRTGNNFEFTYNFEEVPFHSSFAPSQNLFKLANPLVDQYLYRFVSTNNTGGVQFNKNLAGRYANTYKNWFPGPMGRTQGWNLGSGVNRASVSAFATTNRMELEGASYQVPPQPNGMTNNLQGSNTYALENTMIFNSQPANPGTTATYLEGNMLITSESETQPVNRVAYNVGGQMTTNNQSSTTAPATGTYNLQEIVPGSVWMERDVYPQGPIWAKIPETGAHFHPSPAMGGFGLKHPPPMMLIKNTPVPGNITSFSDVPVSSFITQYSTGQVTVEMEWELKKENSKRWNPEIQYTNNYNDPQFVDFAPDSTGEYRTTRPIGTRYLTRPL

SEQ ID NO: 856 - protein, 724 aa, Artificial Sequence
  source: /note="Description of Artificial Sequence: Synthetic polypeptide"
MSFVDHPPDWLEEVGEGLREFLGLEAGPPKPKPNQQHQDQARGLVLPGYNYLGPGNGLDRGEPVNRADEVAREHDISYNEQLEAGDNPYLKYNHADAEFQEKLADDTSFGGNLGKAVFQAKKRVLEPFGLVEEGAKTAPTGKRIDDHFPKRKKARTEEDSKPSTSSDAEAGPSGSQQLQIPAQPASSLGADTMSAGGGGPLGDNNQGADGVGNASGDWHCDSTWMGDRVVTKSTRTWVLPSYNNHQYREIKSGSVDGSNANAYFGYSTPWGYFDFNRFHSHWSPRDWQRLINNYWGFRPRSLRVKIFNIQVKEVTVQDSTTTIANNLTSTVQVFTDDDYQLPYVVGNGTEGCLPAFPPQVFTLPQYGYATLNRDNTENPTERSSFLCLEYFPSKMLRTGNNFEFTYNFEEVPFHSSFAPSQNLFKLANPLVDQYLYRFVSTNNTGGVQFNKNLAGRYANTYKNWFPGPMGRTQGWNLGSGVNRASVSAFATTNRMELEGASYQVPPQPNGMTNNLQGSNTYALENTMIFNSQPANPGTTATYLEGNMLITSESETQPVNRVAYNVGGQMATNNQSSTTAPATGTYNLQEIVPGSVWMKRDVYLQGPIWAKIPETGAHFHPSPAMGGFGLKHPPPMMLIKNTPVPGNITSFSDVPVSSFITQYSTGQVTVEMEWELKKENSKRWNPEIQYTNNYNDPQFVDFAPDSTGEYRTTRPIGTRYLTRPL

SEQ ID NO: 857 - protein, 724 aa, Artificial Sequence
  source: /note="Description of Artificial Sequence: Synthetic polypeptide"
MSFVDHPPDWLEEVGEGLREFLGLEAGPPKPKPNQQHQDQARGLVLPGYNYLGPGNGLDRGEPVNRADEVAREHDISYNEQLEAGDNPYLKYNHADAEFQEKLADDTSFGGNLGKAVFQAKKRVLEPFGLVEEGAKTAPTGKRIDDHFPKRKKARTEEDSKPSTPSDAEAGPSGSQQLQIPAQPASSLGADTMSAGGGGPLGDNNQGADGVGNASGDWHCDSTWMGDRVVTKSTRTWVLPSYNNHQYREIKSGSVDGSNANAYFGYSTPWGYFDFNRFHSHWSPRDWQRLINNYWGFRPRSLRVKIFNIQVKEVTVQDSTTTIANNLTSTVQVFTDDDYQLPYVVGNGTEGCLPAFPPQVFTLPQYGYATLNRDNTENPTERSSFFCLEYFPSKMLRTGNNFEFTYNFEEVPFHSSFAPSQNLFKLANPLVDQYLYRFVSTNNTGGVQFNKNLAGRYANTYKNWFPGPMGRTQGWNLGSGVNRASVSAFATTNRMELEGASYQVPPQPNGMTNNLQGSNTYALENTMIFNSQPANPGTTATYLEGNMLITSESETQPVNRVAYNVGGQMATNNQSSTTAPATGTYNLQEIVPGSVWMERDVYLQGPIWAKIPETGAHFHPSPAMGGFGLKHPPPMMLIKNTPVPGNITSFSDVPVSSFITQYSTGQVTVEMEWELKKENSKRWNPEIQYTNNYNDPQFVDFAPDSTGEYRTTRPIGTRYLTRPL

SEQ ID NO: 858 - protein, 724 aa, Artificial Sequence
  source: /note="Description of Artificial Sequence: Synthetic polypeptide"
MSFVDHPPDWLEEVGEGLREFLGLEAGPPKPKPNQQHQDQARGLVLPGYNYLGPGNGLDRGEPVNRADEVAREHDISYNEQLEAGDNPYLKYNHADAEFQEKLADDTSFGGNLGKAVFQAKKRVLEPFGLVEEGAKTAPTGKRIDDHFPKRKKARTEEDSKPSTSSDAEAGPSGSQQLQIPAQPASSLGADTMSAGGGGPLGDNNQGADGVGNASGDWHCDSTWMGDRVVTKSTRTWVLPSYNNHQYREIKSGSVDGSNANAYFGYSTPWGYFDFNRFHSHWSPRDWQRLINNYWGFRPRSLRVKIFNIQVKEVTVQDSTTTIANNLTSTVQVFTDDDYQLPYVVGNGTEGCLPAFPPQVFTLPQYGYATLNRDNTENPTERSSFFCLEYFPSKMLRTGNNFEFTYNFEEVPFHSSFAPSQNLFKLANPLVDQYLYRFVSTNNTGGVQFNKNLAGRYANTHKNWFPGPMGRTQGWNLGSGVNRASVSAFATTNRMELEGASYQVPPQSNGMTNNLRGSNTYALENTMIFNSQPANPGTTATYLEGNMLITSESETQPVNRVAYNVGGQMATNNQSSTTAPATGTYNLQEIVPGSVWMERDVYLQGPIWAKIPETGAHFHPSPAMGGFGLKHPPPMMLIKNTPVPGNITSFSDVPVSSFITQYSTGQVTVEMEWELKKENSKRWNPEIQYTNNYNDPQFVDFAPDSTGEYRTTRPIGTRYLTRPL

SEQ ID NO: 859 - protein, 724 aa, Artificial Sequence
  source: /note="Description of Artificial Sequence: Synthetic polypeptide"
MSFVDHPPDWLEEVGEGLREFLGLEAGPPKPKPNQQHQDQARGLVLPGYNYLGPGNGLDRGEPVNRADEVAREHDISYNEQLEAGDNPYLKYNHADAEFQEKLADDTSFGGNLGKAVFQAKKRVLEPFGLVEEGAKTAPTGKRIDDHFPKRKKARTEEDSKPSTSSDAEAGPSGSQQLQIPAQPASSLGADTMSAGGGGPLGDNNQGADGVGNASGDWHCDSTWMGDRVVTKSTRTWVLPSYNNHQYREIKSGSVDGSNANAYFGYSTPWGYFDFNRFHSHWSPRDWQRLINNYWGFRPRSLRVKIFNIQVKEVTVQDSTTTIANNLTSTVQVFTDDDYQLPYVVGNGTEGCLPAFPPQVFTLPQYGYATLNRDNTENPTERSSFFCLEYFPSKMLRTGNNFEFTYNFEEVPFHSSFAPSQNLFKLANPLVDQYLYRFVSTNNTGGVQFNKNLAGRYANTYKNWFPGPMGRTQGWNLGSGVNRASVSAFATTNRMELEGASYQVPPQPNGMTNNLQGSNTYALENTMIFNSQPANPGTTATYLEGNMLITSESETQPVNRVAYSVGGQMATNNQSSTTAPTTGTYNLQEIVPGSVWMERDVYLQGPIWAKIPETGAHFHPSPAMGGFRLKHPPPMMLIKNTPVPGNITSFSDVPVSSFITQYSTGQVTVEMEWELKKENSKRWNPEIQYTNNYNDPQFVDFAPDSTGEYRTTRPIGTRYLTRPL

SEQ ID NO: 860 - protein, 724 aa, Artificial Sequence
  source: /note="Description of Artificial Sequence: Synthetic polypeptide"
MSFVDHPPDWLEEVGEGLREFLGLEAGPPKPKPNQQHQDQARGLVLPGYNYLGPGNGLDRGEPVNRADEVAREHDISYNEQLEAGDNPYLKYNHADAEFQEKLADDTSFGGNLGKAVFQAKKRVLEPFGLVEEGAKTAPTGKRIDDHFPKRKKARTEEDSKPSTSSDAEAGPSGSQQLQIPAQPASSLGADTMSAGGGGPLGDNNQGADGVGNASGDWHCDSTWMGDRVVTKSTRTWVLPSYNNHQYREIKSGSVDGSNANAYFGYSTPWGYFDFNRFHSHWSPRDWQRLINNYWGFRPRSLRVKIFNIQVKEVTVQDSTTTIANNLTSTVQVFTDDDYQLPYVVGNGTEGCLPAFPPQVFTLPQYGYATLNRDNTENPTERSSFFCLEYFPSKMLRTGNNFEFTYNFEEVPFHSSFAPSQNLFKLANPLVDQYLYRFVSTNNTGGVQFNKNLAGRYANTYKNWFPGPMGRTQGWNLGSGVNRASVSAFAATNRMELEGASYQVPPQPNGMTNNLQGSNTYALENTMIFNSQPANPGTTATYLEGNMLITSESETQPVNRVAYNVGGQMATNNQSSTTAPATGTYNLQEIVPGGVWMERDVYLQGPIWAKIPETGAHFHPSPAMGGFGLKHPPPMMLIKNTPVPGNTTSFSDVPVSSFITQYSTGQVTVEMEWELKKENSKRWNPEIQYTNNYNDPQFVDFAPDSTGEYRTTRPIGTRYLTRPL

SEQ ID NO: 861 - protein, 724 aa, Artificial Sequence
  source: /note="Description of Artificial Sequence: Synthetic polypeptide"
MSFVDHPPDWLEEVGEGLREFLGLEAGPPKPKPNQQHQDQARGLVLPGYNYLGPGNGLDRGEPVNRADEVAREHDISYNEQLEAGDNPYLKYNHADAEFQEKLADDTSFGGNLGKVVFQAKKRVLEPFGLVEEGAKTAPTGKRIDDHFPKRKKARTEEDSKPSTSSDAEAGPSGSQQLQIPAQPASSLGADTMSAGGGGPLGGNNQGADGVGNASGDWHCDSTWMGDRVVTKSTRTWVLPSYNNHQYREIKSGSVDGSNANAYFGYSTPWGYFDFNRFHSHWGPRDWQRLINNYWGFRPRSLRVKIFNIQVKEVTVQDSTTTIANNLTSTVQVFTDDDYQLPYVVGNGTEGCLPAFPPQVFTLPQYGYATLNRDNTENPTERSSFFCLEYFPSKMLRTGNNFEFTYNFEEVPFHSSFAPSQNLFKLANPLVDQYLYRFVSTNNTGGVQFNKNLAGRYANTYKNWFPGPMGRTQGWNLGSGVNRASVSALATTNRMELEGASYQVPPQPNGMTNNLQGSNTYALENTMIFNSQPANPGTTATYLEGNMLITSESETQPVNRVAYNVGGQMATNNQSSTTAPATGTYNLQEIVPGSVWMERDVYLQGPIWAKIPETGAHFHPSPAMGGFGLKHPPPMMLIKNTPVPGNITSFSDVPVSSFITQYSTGQVTVEMEWELKKENSKRWNPEIQYTNNYNDPQFVDFAPDSTGEYRTTRPIGTRYLTRPL

SEQ ID NO: 862 - protein, 723 aa, Artificial Sequence
  source: /note="Description of Artificial Sequence: Synthetic polypeptide"
MSFVDHPPDWLEEVGEGLREFLGLEAGPPKPKPNQQHQDQARGLVLPGYNYLGPGNGLDRGEPVNRADEVAREHDISYNEQLEAGDNPYLKYNHADAEFQEKLADDTSFGGNLGKAVFQAKKRVLEPFGLVEEGAKTAPTGKRIDDHFPKRKKARTEEDSKPSTSSDAEAGPSGSQQLQIPAQPASSLGADTMSAGGGGPLGDNNQGADGVGNASGDWHCDSTWMGDRVVTKSTRTWVLPSYNNHQYREIKSGSVDGSNANAYFGYSTPWGYFDFNRFHSHWSPRDWQRLINNYWGFRPRSLRVKIFNIQVKEVTVQDSTTTIANNLTSTVQVFTDDDYQLPYVVGNGTEGCLPAFPPQVFTLPQYGYATLNRDNTENPTERSSFFCLEYFPSKMLRTGNNFEFTYNFEEVPFHSSFAPSQNLFKLANPLVDQYLYRFVSTNNTGGVQFNKNLAGRYANTYKNWFPGPMGRTQGWNLGSGVNRASVSAFATTNRMELEGASYQVPPQPNGMTNNLQGSNTYALENTMIFNSQPANPGTTATYLEGNMLITSESETQPVNRVAYNVGGQMATNNQSSTTAPATGTYNLQEIVPGSVWMERDVYLQGPIAKIPETGAHFHPSPAMGGFGLKHPPPMMLIKNTPVPGNITSFSDVPVSSFITQYSTGQVTVEMEWELKKENSKRWNPEIQYTNNYNDPQFVDFAPDSTGECRTTRPIGTRYLTRPL

SEQ ID NO: 863 - protein, 724 aa, Artificial Sequence
  source: /note="Description of Artificial Sequence: Synthetic polypeptide"
MSFVDHPPDWLEEVGEGLREFLGLEAGPPKPKPNQQHQDQARGLVLPGYNYLGPGNGLDRGEPVNRADEVAREHDISYNEQLEAGDNPYLKYNHADAEFQEKLADDTSFGGNLGKAVFQAKKRVLEPFGLVEEGAKTAPTGKRIDDHFPKRKKARTEEDSKPSTSSDAEAGPSGSQQLQIPAQPASSLGADTMSAGGGGPLGDNNQGADGVGNASGDWHCDSTWMGDRVVTKSTRTWVLPSYNNHQYREIKSGSVDGSNANAYFGYSTPWGYFDFNRFHSHWSPRDWQRLINNYWGFRPRSLRVKILNIQVKEVTVQDSTTTIANNLTSTVQVFTDDDYQLPYVVGNGTEGCLPAFPPQVFTLPQYGYATLNRDNTENPTERSSFFCLEYFPSKMLRTGNNFEFTYNFEEVPFHSSFAPSQNLFKLANPLVGQYLYRFVSTNNTGGVQFNENLAGRYANTYKNWFPGPMGRTQGWNLGSGVNRASVSAFATTNRMELEGASYQVPPQPNGMTNNLQGSNTYALENTMIFNSQPANPGTTATYLEGNMLITSESETQPVNRVAYNVGGQMATNNQSSTTAPATGTYNLQEIVPGSVWMERDVYLQGPIWAKIPETGAHFHPSPAMGGFGLKHPPPMMLIKNTPVPGNITSFSDVPVSSFITQYSTGQATVEMEWELKKENSKRWNPEIQYTNNYNDPQFVDFAPDSTGEYRTTRPIGTRYLTRPL

SEQ ID NO: 864 - protein, 724 aa, Artificial Sequence
  source: /note="Description of Artificial Sequence: Synthetic polypeptide"
MSFVDHPPDWLEEVGEGLREFLGLEAGPPKPKPNQQHQDQARGLVLPGYNYLGPGNGLDRGEPVNRADEVAREHDISYNEQLEAGDNPYLKYNHADAEFQEKLADDTSFGGNLGKAVFQAKKRVLEPFGLVEEGAKTAPTGKRIDDHFPKRKKARTEEDSKPSTSSDAEAGPSGSQQLQIPAQPASSLGADTMSAGGGGPLGDNNQGADGVGNASGDWHCDSTWMGDRVVTKSTRTWVLPSYNNHQYREIKSGSVDGSNANAYFGYSTPWGYFDFNRFHSHWSPRDWQRLINNYWGFRPRSLRVKIFNIQVKEVTVQDSTTIIANNLTSTVQVFTDDDYQLPYVVGNGTEGCLPAFPPQVFTLPQYGYATLNRDNTENPTERSSFFCLEYFPSKMLRTGNNFEFTYNFEEVPFHSSFAPSQNLFKLANPLVDQYLYRFVSTNNTGGVQFNKNLAGRYANTYKNWFPGPMGRTQGWNLGSGVNRASVSAFATTNRMELEGASYQVPPQPNGMTNNLQGSNTYALENTMIFNSQPANPGTTATYLEGNMLITSESETQPVNRVAYNVGGQMATNNQSSTTAPATGTYNLQEIVPGSVWMERDVYLQGPIWAKIPETGAHFHPSPAMGGFGLKHPPPMMLIKNTPVPGNITSFSDVPVSSFITQYSTGQVTVEMEWELKKENSKRWNPEIQYTNNYNDPQFVDFAPDSTGEYRTTRPIGTRYLTRPL

SEQ ID NO: 865 - protein, 724 aa, Artificial Sequence
  source: /note="Description of Artificial Sequence: Synthetic polypeptide"
MSFVDHPPDWLEEVGEGLREFLGLEAGPPKPKPNQQHQDQARGLVLPGYNYLGPGNGLDRGEPVNRADEVAREHDISYNEQLEAGDNPYLKYNHADAEFQEKLADDTSFGGNLGKAVFQAKKRVLEPFGLVEEGAKTAPTGKRIDDHFPKRKKARTEEDSKPSTSSDAEAGPSGSQQLQIPAQPASSLGADTMSAGGGGPLGDNNQGADGVGNASGDWHCDSTWMGDRVVTKSTRTWVLPSYNNHQYREIKSGSVDGSNANAYFGYSTPWGYFDFNRFHSHWSPRDWQRLINNYWGFRPRSLRVKIFNIQVKEVTVQDSTTTIANNLTSTVQVFTDDDYQLPYVVGNGTEGCLPAFPPQVFTLPQYGYATLNRDNTENPTERSSFFCLEYFPSKMLRTGNNFEFTYNFEEVPFHSSFAPSQNLFKLANPLVDQYLYRFVSTNNTGGVQFNKNLAGRYANTYKNWFPGPMGRTQGWNLGSGVNRASVSAFATTNRMELEGASYQVPPQPNGMTNNLQGSNTYALENTMIFNSQPANPGTTATYLEGNMLITSESETQPVNRVAYNVGGQMATNNQSSTTAPATGTYNLQEIVPGSVWMERDVYLQGPIWAKIPETGAHFHPSPAMGGFGLKHPPPMMLIKNTPVPGNITSLSDVPVSSFITQYSTGQVTVEMEWELKKENSKRWNPEIQYTNNYNDPQFVDFAPDSTGEYRTTRPIGTRYLTRPL

SEQ ID NO: 866 - protein, 724 aa, Artificial Sequence
  source: /note="Description of Artificial Sequence: Synthetic polypeptide"
MSFVDHPPDWLEEVGEGLREFLGLEAGPPKPKPNQQHQDQARGLVLPGYNYLGPGNGLDRGEPANRADEVAREHDISYNEQLEAGDNPYLKYNHAGAEFQEKLADDTSFGGNLGKAVFQAKKRVLEPFGLVEEGAKTAPTGKRIDDHFPKRKKARTEEDSKPSTSSDAEAGPSGSQQLQIPAQPASSLGADTMSAGGGGPLGDNNQGADGVGNASGDWHCDSTWMGDRVVTKSTRTWVLPGYNNHQYREIKSGSVDGSNANAYFGYSTPWGYFDFNRFHSHWSPRDWQRLINNYWGFRPRSLRVKIFNIQVKEVTVQDSTTTIANNLTSTVQVFTDDDYQLPYVVGNGTEGCLPAFPPQVFTLPQYGYATLNRDNTENPTERSSFFCLEYFPSKMLRTGNNFEFTYNFEEVPFHSSFAPSQNLFKLANPLVDQYLYRFVSTNNTGGVQFNKNLAGRYANTYKNWFPGPMGRTQGWNLGSGVNRASVSAFATTNRMELEGASYQVPPQPNGMTNNLQGSNTYALENTMIFNSQPANPGTTATYLEGNMLITSESETQPVNRVAYNVGGQMATNNQSSTTAPATGTYNLQEIVPGSVWMERDVYLQGPIWAKIPETGAHFHPSPAMGGFGLKHPPPMMLIKNTPVPGNITSFSDVPVSSFITQYSTGQVTVEMEWELKKENSKRWNPEIQYTNNYNDPQFVDFAPDSTGEYRTTRPIGTRYLTRPL

SEQ ID NO: 867 - protein, 724 aa, Artificial Sequence
  source: /note="Description of Artificial Sequence: Synthetic polypeptide"
MSFVDHPPDWLEEVGEGLREFLGLEAGPPKPKPNQQHQDQARGLVLPGYNYLGPGNGLDRGEPVNRADEVAREHDISYNEQLEAGDNPYLKYNHADAEFQEKLADDTSFGGNLGKAVFQAKKRVLEPFGLVEEGAKTAPTGKRIDDHFPKRKKARTEEDSKPPTSSDAEAGPSGSQQLQIPAQPASSLGADTMSAGGGGPLGDNNQGADGVGNASGDWHCDSTWMGDRVVTKSTRTWVLPSYNNHQYREIKSGSVDGSNANAYFGYSTPWGYFDFNRFHSHWSPRDWQRLINNYWGFRPRSLRVKIFNIQVKEVTVQDSATTIANNLTSTVQVFTDDDYQLPYVVGNGTEGCLPAFPPQVFTLPQYGYATLNRDNTENPTERSSFFCLEYFPSKMLRTGNNFEFTYNFEEVPFHSSFAPSQNLFKLANPLVDQYLYRFVSTNNTGGVQFNKNLAGRYANTYKNWFPGPMGRTQGWNLGSGVNRASVSAFATTNRMELEGASYQVPPQPNGMTNNLQGSNTYALENTMIFNSQPANPGTTATYLEGNMLITSESETQPVNRVAYNVGGQMATNNQSSTTAPATGTYNLQEIVPGSVWMERDVYLQGPIWAKIPETGAHFHPSPAMGGFGLKHPPPMMLIKNTPVPGNITSFSDVPVSSFITQYSTGQVTVEMEWELKKENSKRWNPEIQYTNNYNDPQFVDFAPDSTGEYRTTRPIGTRYLTRPL

SEQ ID NO: 868 - protein, 724 aa, Artificial Sequence
  source: /note="Description of Artificial Sequence: Synthetic polypeptide"
MSFVDHPPDWLEEVGEGLREFLGLEAGPPKPKPNQQHQDQARGLVLPGYNYLGPGNGLDRGEPVNRADEVAREHDISYNEQLEAGDNPYLKYNHADAEFQEKLADDTSFGGNLGKAVFQAKKRVLEPFGLVEEGAKTAPTGKRIDDHFPKRKKARTEEDSKPSTSSDAEAGPSGSQQPQIPAQPASSLGADTMSAGGGGPLGDNNQGADGVGNASGDWHCDSTWMGDRVVTKSTRTWVLPSYNNHQYREIKSGSVDGSNANAYFGYSTPWGYFDFNRFHSHWSPRDWQRLINNYWGFRPRSLRVKIFNIQVKEVTVQDSTTTIANNLTSTVQVFTDDDYQLPYVVGNGTEGCLPAFPPQVFTLPQYGYATLNRDNTENPTERSSFFCLEYFPSKMLRTGNNFEFTYNFEEVPFHSSFAPSQNLFKLANPLVDQYLYRFVSTNNTGGVQFNKNLAGRYANTYKNWFPGPMGRTQGWNLGSGVNRASVSAFATTNRMELEGASYQVPPQPNGMTNNLQGSNTYALENTMIFNSQPANPGTTATYLEGNMLITSESETQPVNRVAYNVGGQMATNNQSSTTAPATGTYNLQEIVPGSVWMERDVYLQGPIWAKIPETGAHFHPSPAMGGFGLKHPPPMMLIKNTPAPGNITSFSDVPVSSFITQYSTGQVTVEMEWELKKENSKRWNPEIQYTNNYNDPQFVDFAPDSTGEYRTTRPIGTRYLTRPL

SEQ ID NO: 869 - protein, 724 aa, Artificial Sequence
  source: /note="Description of Artificial Sequence: Synthetic polypeptide"
MSFVDHPPDWLEEVGEGLREFLGLEAGPPKPKPNQQHQDQARGLVLPGYNYLGPGNGLDRGEPVNRADEVAREHDISYNEQLEAGDNPYLKYNHADAEFQEKLADDTSFGGNLGKAVFQAKKRVLEPFGLVEEGAKTAPTGKRIDDHFPKRKKARTEEDSKPPTSSDAEAGPSGSQQLQIPAQPASSLGADTMSAGGGGPLGDNNQGADGVGNASGDWHCDSTWMGDRVVTKSTRTWVLPSYNNHQYREIKSGSVDGSNANAYFGYSTPWGYFDFNRFHSHWSPRDWQRLINNYWGFRPRSLRVKIFNIQVKEVTVQDSTTTIANNLTSTVQVFTDDDYQLPYVVGNGTEGCLPAFPPQVFTLPQYGYATLNRDNTENPTERSSFFCLEYFPSKMLRTGNNFEFTYNFEEVPFHSSFAPSQNLFKLANPLVDQYLYRFVSTNNTGGVQFNKNLAGRYANTYKNWFPGPMGRTQGWNLGSGVNRASVSAFATTNRMELEGASYQVPPQPNGMTNNLQGSNTYALENTMIFNSQPANPGTTATYLEGNMLITSESETQPVNRVAYNVGGQMATNNQSSTTAPATGTYNLQEIVPGSVWMERDVYLQGPIWAKIPETGAHFHPSPAMGGFGLKHPPPMMLIKNTPVPGNITSFSDVPVSSFITQYSTGQVTVEMEWELKKENSKRWNPEIQYTNNYNDPQFVDFAPDSTGEYRTTRPIGTRYLTRPL

SEQ ID NO: 870 - protein, 724 aa, Artificial Sequence
  source: /note="Description of Artificial Sequence: Synthetic polypeptide"
MSFVDHPPDWLEEVGEGLREFLGLEAGPPKPKPNQQHQDQARGLVLPGYNYLGPGNGLDRGEPVNRADEVAREHDISYNEQLEAGDNPYLKYNHADAEFQEKLADDTSFGGNLGKAVFQAKKRVLEPFGLVEEGAKTAPTGKRIDDHFPKRKKARTEEDSKPPTSSDAEAGPSGSQQLQIPAQPASSLGADTMSAGGGGPLGDNNQGADGVGNASGDWHCDSTWMGDRVVTKSTRTWVPPSYNNHQYREIKSGSVDGSNANAYFGYSTPWGYFDFNRFHSHWSPRDWQRLINNYWGFRPRSLRVKIFNIQVKEVTVQDSTTTIANNLTSTVQVFTDDDYQLPYVVGNGTEGCLPAFPPQVFTLPQYGYATLNRDNTENPTERSSFFCLEYFPSKMLRTGNNFEFTYNFEEVPFHSSFAPSQNLFKLANPLVDQYLYRFVSTNNTGGVQFNKNLAGRYANTYKNWFPGPMGRTQGWNLGSGVNRASVSAFATTNRMELEGASYQVPPQPNGMTNNLQGSNTYALENTMIFNSQPANPGTTATYLEGNMLITSESETQPVNRVAYNVGGQMATNNQSSTTAPATGTYNLQEIVPGSVWMERDVYLQGPIWAKIPETGAHFHPSPAMGGFGLKHPPPMMLIKNTPVPGNITSFSDVPVSSFITQYSTGQVAVEMEWELKKENSKRWNPEIQYTNNYNDPQFVDFAPDSTGEYRTTRPIGTRYLTRPL

SEQ ID NO: 871 - protein, 724 aa, Artificial Sequence
  source: /note="Description of Artificial Sequence: Synthetic polypeptide"
MSFVDHPPDWLEEVGEGLREFLGLEAGPPKPKPNQQHQDQARGLVLPGYNYLGPGNGLDRGEPVNRADEVAREHDISYNEQLEAGDNPYLKYNHADAEFQEKLADDTSFGGNLGKAVFQAKKRVLEPFGLVEEGAKTAPTGKRIDDHFPKRKKARTEEDSKPSTSSDAEAGPSGSQQLQIPAQPASSLGADTMSAGGGGPLGDNNQGADGVGNASGDWHCDSTWMGDRVVTKSTRTWVLPSYNNHQYREIKSGSVDGSNANAYFGYSTPWGYFDFNRFHSHWSPRDWQRLINNYWGFRPRSLRVKIFNIQVKEVTVQDSTTTIANNLTSTVQVFTDDDYQLPYVVGNGTEGCLPAFPPQVFTLPQYGYATLNRDNTENPTERSSFFCLEYFPSKMLRTGNNFEFTYNFEEVPFHSSFAPSQNLFKLANPLVDQYLYRFVSTNNTGGVQFNKNLAGRYANTYKNWFPGPMGRTQGWNLGSGVNRASVSAFATTNRMELEGASYQVPPQPNGMTNNLQGSNTYALENTMIFNSQPANPGTTATYLEGNMLITSESETQPVNRVAYNVGGQMATNNQSSTTAPATGTYNLQEIVPGSVWMERDVYLQGPIWAKIPETGAHFHPSPAMGGFGLKHPPPMMLIKNTPAPGNITSFSDVPVSSFITQYSTGQVTVEMEWELKKENSKRWNPEIQYTNNYNDPQFVDFAPDSTGEYRTTRPIGTRYLTRPL

SEQ ID NO: 872 - protein, 724 aa, Artificial Sequence
  source: /note="Description of Artificial Sequence: Synthetic polypeptide"
MSFVDHPPDWLEEVGEGLREFLGLEAGPPKPKPNQQHQDQARGLVLPGYNYLGPGNGLDRGEPVNRADEVAREHDISYNEQLEAGDNPYLKYNHADAEFQEKLADDTSFGGNLGKAVFQAKKRVLEPFGLAEEGAKTAPTGKRIDDHFPKRKKARTEEDSKPSTSSDAEAGPSGSQQLQIPAQPASSLGADTMSAGGGGPLGDNNQGADGVGNASGDWHCDSTWMGDRVVTKSTRTWVLPSYNNHQYREIKSGSVDGSNANAYFGYSTPWGYFDFNRFHSHWSPRDWQRLINNYWGFRPRSLRAKIFNIQVKEVTVQDSTTTIANNLTSTVQVFTDDDYQLPYVVGNGTEGCLPAFPPQVFTLPQYGYATLNRDNTENPTERSSFFCLEYFPSKMLRTGNNLEFTYNFEEVPFHSSFAPSQNLFKLANPLVDQYLYRFVSTNNTGGVQFNKNLAGRYANTYKNWFPGPMGRTQGWNLGSGVNRASVSAFATTNRMELEGASYQVPPQPNGMTNNLQGSNTYALENTMIFNSQPANPGTTATYLEGNMLITSESETQPVNRVVHNVGGQMATNNQSSTTAPATGTYNLQEIVPGSVWMERDVYLQGPIWAKIPETGAHFHPSPAMGGFGLKHPPPMMLIKNTPVPGNITSFSDVPVSSFITQYSTGQVTVEMEWELKKENSKRWNPEIQYTNNYNDPQFVDFAPDSTGEYRTTRPIGTRYLTRPL

SEQ ID NO: 873 - protein, 724 aa, Artificial Sequence
  source: /note="Description of Artificial Sequence: Synthetic polypeptide"
MSFVDHPPDWLEEVGEGLREFLGLEAGPPKPKPNQQHQDQARGLVLPGYNYLGPGNGLDRGEPVNRADEVAREHDISYNEQLEAGDNPYLKYNHADAEFQEKLADDTSFGGNLGKAVFQAKKRVLEPFGLVEEGAKTAPTGKRIDDHFPKRKKARTEEDSKPSTSSDAEAGPSGSQQLQIPAQPASSLGADTMSAGGGGPLGDNNQGADGVGNASGDWHCDSTWMGDRVVTKSTRTWVLPSYNNHQYREIKSGSVDGGNANAYFGYSTPWGYFDFNRFHSHWSPRDWQRLINNYWGFRPRSLRVKIFNIQVKEVTVQDSTTTIANNLTSTVQVFTDDDYQLPYVVGNGTEGCLPAFPPQVFTLPQYGYATLNRDNTENPTERSSFFCLEYFPSKMLRTGNNFEFTYNFEEVPFHSSFAPSQNLFKLANPLVDQYLYRFVSTNNTGGVQFNKNLAGRYANTYKNWFPGPMGRTQGWNLGSGVNRASVSAFATTNRMELEGASYQVPPQPNGMTNNLQGSNTYALENTMIFNSQPANPGTTATYLEGNMLITSESETQPVNRVAYNVGGQMATNNQSSTTAPATGTYNLQEIVPGSVWMERDVYLQGPIWAKIPETGAHFHPSPAMGGFGLKHPPPMMLIKNTPAPGNITSFSDVPVSSFITQYSTGQVTVEMEWELKKGNSKRWNPEIQYTNNYNDPQFVDFAPDSTGEYRTTRPIGTRYLTRPL

SEQ ID NO: 874 - protein, 724 aa, Artificial Sequence
  source: /note="Description of Artificial Sequence: Synthetic polypeptide"
MSFVDHPPDWLEEVGEGLREFLGLEAGPPKPKPNQQHQDQARGLVLPGYNYLGPGNGLDRGEPVNRADEVAREHDISYNEQLEAGDNPYLKYNHADAEFQEKLADDTSFGGNLGKAVFQAKKRVLEPFGLVEEGAKTAPTGKRIDDHFPKRKKARTEEDSKPSTSSDAEAGPSGSQQLQIPAQPASSLGADTMSAGGGGPLGDNNQGADGVGNASGDWHCDSTWMGDRVVTKSTRTWVLPSYNNHQYREIKSGSVDGSNANAYFGYSTPWGYFDFNRFHSHWSPRDWQRLINNYWGFRPRSLRVKIFNIQVKEVTVQDSTTTIANNLTSTVQVFTDDDYQLPYVVGNGTEGCLPAFPPQVFTLPQYGYATLNRDNTENPTERSSFFCLEYFPSKMLRTGNNFEFTYNFEEVPFHSSFAPSQNLFKLANPLVDQYLYRFVSTNNTGGVQFNKNLAGRYANTYKNWFPGPMGRTQGWNLGSGVNRASVSAFATTNRMELEGASYQVPPQPNGMTNNLQGSNTYALENTMIFNSQPANPGTTATYLEGNMLITSESETQPVNRVAYNVGGQMATNNQSSTTAPATGTYNLQEIVPGSVWMERDVYLQGPIWAKIPETGVHFHPSPAMGGFGLKHPPPMMLIKNTPVPGNITSFSDVPVSSFITQYSTGQVTVEMEWELKKENSKRWNPEIQYTNNYNDPQFVDFAPDSTGEYRTTRPIGTRYLTRPL

SEQ ID NO: 875 - protein, 724 aa, Artificial Sequence
  source: /note="Description of Artificial Sequence: Synthetic polypeptide"
  MOD_RES (551)..(551): Any naturally occurring amino acid
MSFVDHPPDWLEEVGEGLREFLGLEAGPPKPKPNQQHQDQARGLVLPGYNYLGPGNGLDRGEPVNRADEVAREHDISYNEQLEAGDNPYLKYNHADAEFQEKLADDTSFGGNLGKAVFQAKKRVLEPFGLVEEGAKTAPTGKRIDDHFPKRKKARTEEDSKPSTSSDAEAGPSGSQQLQIPAQPASSLGADTMSAGGGGPLGDNNQGADGVGNASGDWHCDSTWMGDRVVTKSTRTWVLPSYNNHQYREIKSGSVDGSNANAYFGYSTPWGYFDFNRFHSHWSPRDWQRLINNYWGFRPRSLRVKIFNIQVKEVTVQDSTTTIANNLTSTVQVFTDDDYQLPYVVGNGTEGCLPAFPPQVFTLPQYGYATLNRDNTENPTERSSFFCLEYFPSKMLRTGNNFEFTYNFEEVPFHSSFAPSQNLFKLANPLVDQYLYRFVSTNNTGGVQFNKNLAGRYANTYKNWFPGPMGRTQGWNLGSGVNRASVSAFATTNRMELEGASYQVPPQPNGMTNNLQGSNTYALENTMIFNSQPANPGTTATYLEGSMLITXESETQPVNRVAYNVGGQMATNNQSSTTAPATGTYNLQEIVPGSVWMERDVYLQGPIWAKIPETGAHFHPSPAMGGFGLKHPPPMMLIKNTPVPGNITSFSDVPVSSFITQYSTGQVTVEMEWELKKENSKRWNPEIQYTNNYNDPQFVDFAPDSTGEYRTTRPIGTRYLTRPL

SEQ ID NO: 876 - protein, 736 aa, Artificial Sequence; identical to SEQ ID NO: 50
  source: /note="Description of Artificial Sequence: Synthetic polypeptide"

SEQ ID NO: 877 - protein, 734 aa, Artificial Sequence; identical to SEQ ID NO: 68
  source: /note="Description of Artificial Sequence: Synthetic polypeptide"

SEQ ID NO: 878 - protein, 723 aa, Artificial Sequence
  source: /note="Description of Artificial Sequence: Synthetic polypeptide"
MSFVDHPPDWLEEVGEGLREFLGLEAGPPKPKPNQQHQDQARGLVLPGYNYLGPGNGLDRGEPVNRADEVAREHDISYNEQLEAGDNPYLKYNHADAEFQEKLADDTSFGGNLGKAVFQAKKRVLEPFGLVEEGAKTAPTGKRIDDHFPKRKKARTEEDSKPSTSSDAEAGPSGSQQLQIPAQPASSLGADTMSAGGGPLGDNNQGADGVGNASGDWHCDSTWMGDRVVTKSTRTWVLPSYNNHQYREIKSGSVDGSNANAYFGYSTPWGYFDFNRFHSHWSPRDWQRLINNYWGFRPRSLRVKIFNIQVKEVTVQDSTTTIANNLTSTVQVFTDDDYQLPYVVGNGTEGCLPAFPPQVFTLPQYGYATLNRDNTENPTERSSFFCLEYFPSKMLRTGNNFEFTYNFEEVPFHSSFAPSQNLFKLANPLVDQYLYRFVSTNNTGGVQFNKNLAGRYANTYKNWFPGPMGRTQGWNLGSGVNRASVSAFATTNRMELEGASYQVPPQPNGMTNNLQGSNTYALENTMIFNSQPANPGTTATYLEGNMLITSESETQPVNRVAYNVGGQMATNNQSSTTAPATGTYNLQEIVPGSVWMERDVYLQGPIWAKIPETGAHFHPSPAMGGFGLKHPPPMMLIKNTPVPGNITSFSDVPVSSFITQYSTGQVTVEMEWELKKENSKRWNPEIQYTNNYNDPQFVDFAPDSTGEYRTTRPIGTRYLTRPL

SEQ ID NO: 879 - protein, 534 aa, Artificial Sequence
  source: /note="Description of Artificial Sequence: Synthetic polypeptide"
MAEGGGGAMGDSSGGADGVGNASGNWHCDSQWMGNTVITKTTRTWVLPSYNNHIYKAITSGTSQDANVQYAGYSTPWGYFDFNRFHCHFSPRDWQRLINNHWGIRPKSLKFKIFNVQVKEVTTQDQTKTIANNLTSTIQVFTDDEHQLPYVLGSATEGTMPPFPSDVYALPQYGYCTMHTNQNGARFNDRSAFYCLEYFPSQMLRTGNNFEFTFDFEEVPFHSMFAHSQDLDRLMNPLVDQYLWNFNEVDSSRNAQFKKAVKGAYGTMGRNWLPGPKFLDQRVRAYTGGTDNYANWNIWSNGNKVNLKDRQYLLQPGPVSATYTEGEASSLPAQNILGIAKDPYRSGSTTAGISDIMVTEEQEVAPTNGVGWKPYGRTVTNEQNTTTAPTSSDLDVLGALPGMVWQNRDIYLQGPIGAKIPKTDGKFHPSPNLGGFGLHNPPPQVFIKNTPVPADPPVEYVHQKWNSYITQYSTGQCTVEMVWELRKENSKRWNPEIQFTSNFSNRTSIMFAPNETGGYVEDRLIGTRYLTQNL

SEQ ID NO: 880 - protein, 554 aa, Artificial Sequence
  source: /note="Description of Artificial Sequence: Synthetic polypeptide"
MTSVNSAEASTGAGGGGSNPVKSMWSEGATFSANSVTCTFSRQFLIPYDPEHHYKVFSPAASSCHNASGKEAKVCTISPIMGYSTPWRYLDFNALNLFFSPLEFQHLIENYGSIAPDALTVTISEIAVKDVTDKTGGGVQVTDSTTGRLCMLVDHEYKYPYVLGQGQDTLAPELPIWVYFPPQYAYLTVGDVNTQGISGDSKKLASEESAFYVLEHSSFQLLGTGGTATMSYKFPPVPPENLEGCSQHFYEMYNPLYGSRLGVPDTLGGDPKFRSLTHEDHAIQPQNFMPGPLVNSVSTKEGDSFNTGAGKALTGLSTGTSQNTRISLRPGPVSQPYHHWDTDKYVTGINAISHGQTTYGNAEDKEYQQGVGRFPNEKEQLKQLQGLNMHTYFPNKGTQQYTDQIERPLMVGSVWNRRALHYESQLWSKIPNLDDSFKTQFAALGGWGLHQPPPQIFLKILPQSGPIGGIKSMGITTLVQYAVGIMTVTMTFKLGPRKATGRWNPQPGVYPPHAAGHLPYVLYDPTATDAKQHHRHGYEKPEELWTAKSRVHPL

SEQ ID NO: 881 - protein, 587 aa, Artificial Sequence
  source: /note="Description of Artificial Sequence: Synthetic polypeptide"
MSDGTSQPDGGNAVHSAARVERAADGPGGSGGGGSGGGGVGVSTGSYDNQTHYRFLGDGWVEITALATRLVHLNMPKSENYCRIRVHNTTDTSVKGNMAKDDAHEQIWTPWSLVDANAWGVWLQPSDWQYICNTMSQLNLVSLDQEIFNVVLKTVTEQDSGGQAIKIYNNDLTACMMVAVDSNNILPYTPAANSMETLGFYPWKPTIASPYRYYFCVDRDLSVTYENQEGTIEHNVMGTPKGMNSQFFTIENTQQITLLRTGDEFATGTYYFDTNPVKLTHTWQTNRQLGQPPLLSTFPEADTDAGTLTAQGSRHGATQMEVNWVSEAIRTRPAQVGFCQPHNDFEASRAGPFAAPKVPADVTQGMDREANGSVRYSYGKQHGENWAAHGPAPERYTWDETNFGSGRDTRDGFIQSAPLVVPPPLNGILTNANPIGTKNDIHFSNVFNSYGPLTTFSHPSPVYPQGQIWDKELDLEHKPRLHITAPFVCKNNAPGQMLVRLGPNLTDQYDPNGATLSRIVTYGTFFWKGKLTMRAKLRANTTWNPVYQVSVEDNGNSYMSVTKWLPTATGNMQSVPLITRPVARNTY

SEQ ID NO: 882 - protein, 584 aa, Artificial Sequence
  source: /note="Description of Artificial Sequence: Synthetic polypeptide"
MSDGAVQPDGGQPAVRNERATGSGNGSGGGGGGGSGGVGISTGTFNNQTEFKFLENGWVEITANSSRLVHLNMPESENYKRVVVNNMDKTAVKGNMALDDIHVEIVTPWSLVDANAWGVWFNPGDWQLIVNTMSELHLVSFEQEIFNVVLKTVSESATQPPTKVYNNDLTASLMVALDSNNTMPFTPAAMRSETLGFYPWKPTIPTPWRYYFQWDRTLIPSHTGTSGTPTNVYHGTDPDDVQFYTIENSVPVHLLRTGDEFATGTFFFDCKPCRLTHTWQTNRALGLPPFLNSLPQSEGATNFGDIGVQQDKRRGVTQMGNTDYITEATIMRPAEVGYSAPYYSFEASTQGPFKTPIAAGRGGAQTDENQAADGDPRYAFGRQHGQKTTTTGETPERFTYIAHQDTGRYPEGDWIQNINFNLPVTNDNVLLPTDPIGGKTGINYTNIFNTYGPLTALNNVPPVYPNGQIWDKEFDTDLKPRLHINAPFVCQNNCPGQLFVKVAPNLTNQYDPDASANMSRIVTYSDFWWKGKLVFKAKLRASHTWNPIQQMSINVDNQFNYVPNNIGAMKIVYEKSQLAPRKLY

SEQ ID NO: 883 - protein, 548 aa, Artificial Sequence
  source: /note="Description of Artificial Sequence: Synthetic polypeptide"
GVGISTGTFNNQTEFKFLENGWVEITANSSRLVHLNMPESENYRRVVVNNMDKTAVNGNMALDDIHAQIVTPWSLVDANAWGVWFNPGDWQLIVNTMSELHLVSFEQEIFNVVLKTVSESATQPPTKVYNNDLTASLMVALDSNNTMPFTPAAMRSETLGFYPWKPTIPTPWRYYFQWDRTLIPSHTGTSGTPTNIYHGTDPDDVQFYTIENSVPVHLLRTGDEFATGTFFFDCKPCRLTHTWQTNRALGLPPFLNSLPQSEGATNFGDIGVQQDKRRGVTQMGNTNYITEATIMRPAEVGYSAPYYSFEASTQGPFKTPIAAGRGGAQTDENQAADGNPRYAFGRQHGQKTTTTGETPERFTYIAHQDTGRYPEGDWIQNINFNLPVTNDNVLLPTDPIGGKTGINYTNIFNTYGPLTALNNVPPVYPNGQIWDKEFDTDLKPRLHVNAPFVCQNNCPGQLFVKVAPNLTNEYDPDASANMSRIVTYSDFWWKGKLVFKAKLRASHTWNPIQQMSINVDNQFNYVPSNIGGMKIVYEKSQLAPRKLY

SEQ ID NO: 884 - protein, 736 aa, Artificial Sequence; identical to SEQ ID NO: 112
  source: /note="Description of Artificial Sequence: Synthetic polypeptide"

SEQ ID NO: 885 - protein, 736 aa, Artificial Sequence; identical to SEQ ID NO: 107
  source: /note="Description of Artificial Sequence: Synthetic polypeptide"

SEQ ID NO: 886 - protein, 736 aa, Artificial Sequence
  source: /note="Description of Artificial Sequence: Synthetic polypeptide"
MAADGYLPDWLEDTLSEGIRQWWKLKPGPPPPKPAERHKDDSRGLVLPGYKYLGPFNGLDKGEPVNEADAAALEHDKAYDRQLDSGDNPYLKYNHADAEFQERLKEDTSFGGNLGRAVFQAKKRVLEPLGLVEEPVKTAPGKKRPVEHSPVEEPDSSSGTGKAGQQPARKRLNFGQTGDADSVPDPQPLGQPPAAPSGLGTNTMATGSGAPMADNNEGADGVGNSSGNWHCDSTWMGDRVITTSTRTWALPTYNNHLYKQISSQSGASNDNHYFGYSTPWGYFDFNRFHCHFSPRDWQRLINNNWGFRPKRLNFKLFNIQVKEVTQNDGTTTIANNLTSTVQVFTDSEYQLPYVLGSAHQGCLPPFPADVFMVPQYGYLTLNNGSQAVGRSSFYCLEYFPSQMLRTGNNFTFSYTFEDVPFHSSYAHSQSLDRLMNPLIDQYLYYLSRTNTPSGTTTQSRLQFSQAGASDIRDQSRNWLPGPCYRQQRVSKTSADNNNSEYSWTGATKYHLNGRDSLVNPGPAMASHKDDEEKFFPQSGVLIFGKQGSEKTNVDIEKVMITDEEEIRTTNPVATEQYGSVSTNLQRGNRQAATADVNTQGVLPGMVWQDRDVYLQGPIWAKIPHTDGHFHPSPLMGGFGLKHPPPQILIKNTPVPANPSTTFSAAKFASFITQYSTGQVSVEIEWELQKENSKRWNPEIQYTSNYNKSVNVDFTVDTNGVYSEPRPIGTRYLTRNL

SEQ ID NO: 887 - protein, 736 aa, Artificial Sequence
  source: /note="Description of Artificial Sequence: Synthetic polypeptide"
MAADGYLPDWLEDNLSEGIREWWDLKPGAPKPKANQQKQDDGRGLVLPGYKYLGPFNGLDKGEPVNAADAAALEHDKAYDQQLKAGDNPYLRYNHADAEFQERLQEDTSFGGNLGRAVFQAKKRVLEPFGLVEEGAKTAPGKKRPVEQSPQEPDSSSGIGKTGQQPAKKRLNFGQTGDSESVPDPQPLGEPPATPAAVGPTTMASGGGAPMADNNEGADGVGNASGNWHCDSTWLGDRVITTSTRTWALPTYNNHLYKQISSASTGASNDNHYFGYSTPWGYFDFNRFHCHFSPRDWQRLINNNWGFRPKRLNFKLFNVQVKEVTTNDGVTTIANNLTSTVQVFSDSEYQLPYVLGSAHQGCLPPFPADVFMIPQYGYLTLNNGSQAVGRSSFYCLEYFPSQMLRTGNNFTFSYTFEDVPFHSSYAHSQSLDRLMNPLIDQYLYYLNRTQDQSGSAQNKDLLFSRGSPAGMSVQPKNWLPGPCYRQQRVSKTKTDNNNSNFTWTGASKYNLNGRESIINPGTAMASHKDDKNKFFPMSGVMIFGKESAGASNTALDNVMITDEEEIKATNPVATERFGTVAVNLQSSSTDPATGDVHVMGALPGMVWQDRDVYLQGPIWAKIPHTDGHFHPSPLMGGFGLKNPPPQILIKNTPVPANPPAEFSATKFASFITQYSTGQVSVEIEWELQKENSKRWNPEVQYTSNYAKSANVDFTVDNNGLYTEPRPIGTRYLTRPL

SEQ ID NO: 888 - protein, 737 aa, Artificial Sequence
  source: /note="Description of Artificial Sequence: Synthetic polypeptide"
MAADGYLPDWLEDTLSEGIRQWWKLKPGPPPPKPAERHKDDSRGLVLPGYKYLGPGNGLDKGEPVNAADAAALEHDKAYDQQLKAGDNPYLKYNHADAEFQERLKEDTSFGGNLGRAVFQAKKRVLEPLGLVEEGAKTAPGKKRPVEPSPQRSPDSSTGIGKKGQQPARKRLNFGQTGDSESVPDPQPLGEPPATPAAVGPTTMASGGGAPMADNNEGADGVGNASGNWHCDSTWLGDRVITTSTRTWALPTYNNHLYKQISSASTGASNDNHYFGYSTPWGYFDFNRFHCHFSPRDWQRLINNNWGFRPKRLNFKLFNIQVKEVTTNDGVTTIANNLTSTVQVFSDSEYQLPYVLGSAHQGCLPPFPADVFMIPQYGYLTLNNGSQAVGRSSFYCLEYFPSQMLRTGNNFTFSYTFEDVPFHSSYAHSQSLDRLMNPLIDQYLYYLNRTQNQSGSAQNKDLLFSRGSPAGMSVQPKNWLPGPCYRQQRVSKTKTDNNNSNFTWTGASKYNLNGRESIINPGTAMASHKDDKDKFFPMSGVMIFGKESAGASNTALDNVMITDEEEIKATNPVATERFGTVAVNLQSSSTDPATEDVHVMGALPGMVWQDRDVYLQGPIWAKIPHTDGHFHPSPLMGGFGLKNPPPQILIKNTPVPANPPAEFSATKFASFITQYSTGQVSVEIEWELQKENSKRWNPEVQYTSNYAKSANVDFTVDNNGLYTEPRPIGTRYLTRNL

SEQ ID NO: 889 - protein, 736 aa, Artificial Sequence
  source: /note="Description of Artificial Sequence: Synthetic polypeptide"
MAADGYLPDWLEDNLSEGIREWWDLKPGAPKPKANQQKQDDGRGLVLPGYKYLGPFNGLDKGEPVNAADAAALEHDKAYDQQLKAGDNPYLRYNHADAEFQERLQEDTSFGGNLGRAVFQAKKRVLEPFGLVEEGAKTAPGKKRPVEQSPQEPDSSSGIGKTGQQPAKKRLNFGQTGDSESVPDPQPLGEPPATPAAVGPTTMASGGGAPMADNNEGADGVGNASGNWHCDSTWLGDRVITTSTRTWALPTYNNHLYKQISSASTGASNDNHYFGYSTPWGYFDFNRFHCHFSPRDWQRLINNNWGFRPKRLNFKLFNVQVKEVTTNDGVTTIANNLTSTVQVFSDSEYQLPYVLGSAHQGCLPPFPADVFMIPQYGYLTLNNGSQAVGRSSFYCLEYFPSQMLRTGNNFTFSYTFEDVPFHSSYAHSQSLDRLMNPLIDQYLYYLNRTQDQSGSAQNKDLLFSRGSPAGMSVQPKNWLPGPCYRQQRVSKTKTDNNNSNFTWTGASKYNLNGRESIINPGTAMASHKDDKNKFFPMSGVMIFGKESAGASNTALDNVMITDEEEIKATNPVATERFGTVAVNLQSSSTDPATGDVHVMGALPGMVWQDRDVYLQGPIWAKIPHTDGHFHPSPLMGGFGLKHPPPQILIKNTPVPANPPAEFSATKFASFITQYSTGQVSVEIEWELQKENSKRWNPEVQYTSNYAKSANVDFTVDNNGLYTEPRPIGTRYLTRPL

SEQ ID NO: 890 - protein, 736 aa, Artificial Sequence
  source: /note="Description of Artificial Sequence: Synthetic polypeptide"
MAADGYLPDWLEDNLSEGIREWWDLKPGAPKPKANQQKQDDGRGLVLPGYKYLGPFNGLDKGEPVNAADAAALEHDKAYDQQLKAGDNPYLRYNHADAEFQERLQEDTSFGGNLGRAVFQAKKRVLEPFGLVEEGAKTAPGKKRPVEQSPQEPDSSSGIGKTGQQPAKKRLNFGQTGDSESVPDPQPLGEPPATPAAVGPTTMASGGGAPMADNNEGADGVGNASGNWHCDSTWLGDRVITTSTRTWALPTYNNHLYKQISSASTGASNDNHYFGYSTPWGYFDFNRFHCHFSPRDWQRLINNNWGFRPKRLNFKLFNVQVKEVTTNDGVTTIANNLTSTVQVFSDSEYQLPYVLGSAHQGCLPPFPADVFMIPQYGYLTLNNGSQAVGRSSFYCLEYFPSQMLRTGNNFTFSYTFEDVPFHSSYAHSQSLDRLMNPLIDQYLYYLNRTQDQSGSAQNKDLLFSRGSPAGMSVQPKNWLPGPCYRQQRVSKTKTDNNNSNFTWTGASKYNLNGRESIINPGTAMASHKDDKDKFFPMSGVMIFGKESAGASNTALDNVMITDEEEIKATNPVATERFGTVAVNLQSSSTDPATGDVHVMGALPGMVWQDRDVYLQGPIWAKIPHTDGHFHPSPLMGGFGLKHPPPQILIKNTPVPANPPAEFSATKFASFITQYSTGQVSVEIEWELQKENSKRWNPEVQYTSNYAKSANVDFTVDNNGLYTEPRPIGTRYLTRPL

SEQ ID NO: 891 - protein, 736 aa, Artificial Sequence
  source: /note="Description of Artificial Sequence: Synthetic polypeptide"
MAADGYLPDWLEDNLSEGIREWWDLKPGAPKPKANQQKQDDGRGLVLPGYKYLGPFNGLDKGEPVNAADAAALEHDKAYDQQLKAGDNPYLRYNHADAEFQERLQEDTSFGGNLGRAVFQAKKRVLEPFGLVEEGAKTAPGKKRPVEQSPQEPDSSSGIGKTGQQPAKKRLNFGQTGDSESVPDPQPLGEPPATPAAVGPTTMASGGGAPMADNNEGADGVGNASGNWHCDSTWLGDRVITTSTRTWALPTYNNHLYKQISSASTGASNDNHYFGYSTPWGYFDFNRFHCHFSPRDWQRLINNNWGFRPKRLNFKLFNIQVKEVTTNDGVTTIANNLTSTVQVFSDSEYQLPYVLGSAHQGCLPPFPADVFMIPQYGYLTLNNGSQAVGRSSFYCLEYFPSQMLRTGNNFTFSYTFEDVPFHSSYAHSQSLDRLMNPLIDQYLYYLNRTQDQSGSAQNKDLLFSRGSPAGMSVQPKNWLPGPCYRQQRVSKTKTDNNNSNFTWTGASKYNLNGRESIINPGTAMASHKDDKNKFFPMSGVMIFGKESAGASNTALDNVMITDEEEIKATNPVATERFGTVAVNLQSSSTDPATGDVHVMGALPGMVWQDRDVYLQGPIWAKIPHTDGHFHPSPLMGGFGLKHPPPQILIKNTPVPANPPAEFSATKFASFITQYSTGQVSVEIEWELQKENSKRWNPEVQYTSNYAKSANVDFTVDNNGLYTEPRPIGTRYLTRPL

SEQ ID NO: 892 - protein, 736 aa, Artificial Sequence
  source: /note="Description of Artificial Sequence: Synthetic polypeptide"
MAADGYLPDWLEDNLSEGIREWWDLKPGAPKPKANQQKQDDGRGLVLPGYKYLGPFNGLDKGEPVNAADAAALEHDKAYDQQLKAGDNPYLRYNHADAEFQERLQEDTSFGGNLGRAVFQAKKRVLEPFGLVEEGAKTAPGKKRPVEQSPQEPDSSSGIGKTGQQPAKKRLNFGQTGDSESVPDPQPLGEPPATPAAVGPTTMASGGGAPMADNNEGADGVGNASGNWHCDSTWLGDRVITTSTRTWALPTYNNHLYKQISSASTGASNDNHYFGYSTPWGYFDFNRFHCHFSPRDWQRLINNNWGFRPKRLNFKLFNVQVKEVTTNDGVTTIANNLTSTVQVFSDSEYQLPYVLGSAHQGCLPPFPADVFMIPQYGYLTLNNGSQAVGRSSFYCLEYFPSQMLRTGNNFTFSYTFEDVPFHSSYAHSQSLDRLMNPLIDQYLYYLNRTQNQSGSAQNKDLLFSRGSPAGMSVQPKNWLPGPCYRQQRVSKTKTDNNNSNFTWTGASKYNLNGRESIINPGTAMASHKDDKDKFFPMSGVMIFGKESAGASNTALDNVMITDEEEIKATNPVATERFGTVAVNLQSSSTDPATGDVHVMGALPGMVWQDRDVYLQGPIWAKIPHTDGHFHPSPLMGGFGLKHPPPQILIKNTPVPANPPAEFSATKFASFITQYSTGQVSVEIEWELQKENSKRWNPEVQYTSNYAKSANVDFTVDNNGLYTEPRPIGTRYLTRPL

SEQ ID NO: 893 - protein, 736 aa, Artificial Sequence
  source: /note="Description of Artificial Sequence: Synthetic polypeptide"
MAADGYLPDWLEDNLSEGIREWWDLKPGAPKPKANQQKQDDGRGLVLPGYKYLGPFNGLDKGEPVNAADAAALEHDKAYDQQLKAGDNPYLRYNHADAEFQERLQEDTSFGGNLGRAVFQAKKRVLEPFGLVEEGAKTAPGKKRPVEQSPQEPDSSSGIGKTGQQPAKKRLNFGQTGDSESVPDPQPLGEPPATPAAVGPTTMASGGGAPMADNNEGADGVGNASGNWHCDSTWLGDRVITTSTRTWALPTYNNHLYKQISSASTGASNDNHYFGYSTPWGYFDFNRFHCHFSPRDWQRLINNNWGFRPKRLNFKLFNVQVKEVTTNDGVTTIANNLTSTVQVFSDSEYQLPYVLGSAHQGCLPPFPADVFMIPQYGYLTLNNGSQAVGRSSFYCLEYFPSQMLRTGNNFTFSYTFEDVPFHSSYAHSQSLDRLMNPLIDQYLYYLNRTQNQSGSAQNKDLLFSRGSPAGMSVQPKNWLPGPCYRQQRVSKTKTDNNNSNFTWTGASKYNLNGRESIINPGTAMASHKDDKNKFFPMSGVMIFGKESAGASNTALDNVMITDEEEIKATNPVATERFGTVAVNLQSSSTDPATGDVHVMGALPGMVWQDRDVYLQGPIWAKIPHTDGHFHPSPLMGGFGLKHPPPQILIKNTPVPANPPAEFSATKFASFITQYSTGQVSVEIEWELQKENSKRWNPEVQYTSNYAKSANVDFTVDNNGLYTEPRPIGTRYLTRPL

SEQ ID NO: 894 - DNA, 2217 bp, Artificial Sequence
  source: /note="Description of Artificial Sequence: Synthetic polynucleotide"
atggctgccgatggttatcttccagattggctcgaggacaacctctctgagggcattcgcgagtggtgggacctgaaacctggagccccgaaacccaaagccaaccagcaaaagcaggacaacggccggggtctggtgcttcctggctacaagtacctcggacccttcaacggactcgacaagggggagcccgtcaacgcggcggacgcagcggccctcgagcacgacaaggcctacgaccagcagctccaagcgggtgacaatccgtacctgcggtataatcacgccgacgccgagtttcaggagcgtctgcaagaagatacgtcttttgggggcaacctcgggcgcgcagtcttccaggccaaaaagcgggttctcgaacctctgggcctggttgaatcgccggttaagacggctcctggaaagaagagaccggtagagccatcaccccagcgctctccagactcctctacgggcatcggcaagaaaggccagcagcccgcaaaaaagagactcaattttgggcagactggcgactcagagtcagtccccgaccctcaaccaatcggagaaccaccagcaggcccctctggtctgggatctggtacaatggctgcaggcggtggcgctccaatggcagacaataacgaaggcgccgacggagtgggtagttcctcaggaaattggcattgcgattccacatggctgggcgacagagtcatcaccaccagcacccgcacctgggccctgcccacctacaacaaccacctctacaagcaaatctccaacgggacctcgggaggaagcaccaacgacaacacctacttcggctacagcaccccctgggggtattttgacttcaacagattccactgccacttttcaccacgtgactggcagcgactcatcaacaacaactggggattccggcccaagaggctcaacttcaagctcttcaacatccaagtcaaggaggtcacgcagaatgaaggcaccaagaccatcgccaataaccttaccagcacgattcaggtctttacggactcggaataccagctcccgtacgtgctcggctcggcgcaccagggctgcctgcctccgttcccggcggacgtcttcatgattcctcagtacgggtacctgactctgaacaatggcagtcaggctgtgggccggtcgtccttctactgcctggagtactttccttctcaaatgctgagaacgggcaacaactttgaattcagctacaacttcgaggacgtgcccttccacagcagctacgcgcacagccagagcctggaccggctgatgaaccctctcatcgaccagtacttgtactacctgtcccggactcaaagcacgggcggtactgcaggaactcagcagttgctattttctcaggccgggcctaacaacatgtcggctcaggccaagaactggctacccggtccctgctaccggcagcaacgcgtctccacgacactgtcgcagaacaacaacagcaactttgcctggacgggtgccaccaagtatcatctgaatggcagagactctctggtgaatcctggcgttgccatggctacccacaaggacgacgaagagcgattttttccatccagcggagtcttaatgtttgggaaacagggagctggaaaagacaacgtggactatagcagcgtgatgctaaccagcgaggaagaaataaagaccaccaacccagtggccacagaacagtacggcgtggtggccgataacctgcaacagcaaaacgccgctcctattgtaggggccgtcaatagtcaaggagccttacctggcatggtgtggcagaaccgggacgtgtacctgcagggtcccatctgggccaagattcctcatacggacggcaactttcatccctcgccgctgatgggaggctttggactgaagcatccgcctcctcagatcctgattaaaaacacacctgttcccgcggatcctccgaccaccttcaatcaggccaagctggcttctttcatcacgcagtacagtaccggccaggtcagcgtggagatcgagtgggagctgcagaaggagaacagcaaacgctggaacccagagattcagtacacttccaactactacaaatctacaaatgtggactttgctgtcaatactgagggtacttattccgagcctcgccccattggcacccgttacctcacccgtaatctgtaa

SEQ ID NO: 895 - protein, 738 aa, Artificial Sequence
  source: /note="Description of Artificial Sequence: Synthetic polypeptide"
MAADGYLPDWLEDNLSEGIREWWDLKPGAPKPKANQQKQDNGRGLVLPGYKYLGPFNGLDKGEPVNAADAAALEHDKAYDQQLQAGDNPYLRYNHADAEFQERLQEDTSFGGNLGRAVFQAKKRVLEPLGLVESPVKTAPGKKRPVEPSPQRSPDSSTGIGKKGQQPAKKRLNFGQTGDSESVPDPQPIGEPPAGPSGLGSGTMAAGGGAPMADNNEGADGVGSSSGNWHCDSTWLGDRVITTSTRTWALPTYNNHLYKQISNGTSGGSTNDNTYFGYSTPWGYFDFNRFHCHFSPRDWQRLINNNWGFRPKRLNFKLFNIQVKEVTQNEGTKTIANNLTSTIQVFTDSEYQLPYVLGSAHQGCLPPFPADVFMIPQYGYLTLNNGSQAVGRSSFYCLEYFPSQMLRTGNNFEFSYNFEDVPFHSSYAHSQSLDRLMNPLIDQYLYYLSRTQSTGGTAGTQQLLFSQAGPNNMSAQAKNWLPGPCYRQQRVSTTLSQNNNSNFAWTGATKYHLNGRDSLVNPGVAMATHKDDEERFFPSSGVLMFGKQGAGKDNVDYSSVMLTSEEEIKTTNPVATEQYGVVADNLQQQNAAPIVGAVNSQGALPGMVWQNRDVYLQGPIWAKIPHTDGNFHPSPLMGGFGLKHPPPQILIKNTPVPADPPTTFNQAKLASFITQYSTGQVSVEIEWELQKENSKRWNPEIQYTSNYYKSTNVDFAVNTEGTYSEPRPIGTRYLTRNL

SEQ ID NO: 896 - protein, 738 aa, Artificial Sequence; identical to SEQ ID NO: 895
  source: /note="Description of Artificial Sequence: Synthetic polypeptide"

SEQ ID NO: 897 - DNA, 4472 bp, Artificial Sequence
  source: /note="Description of Artificial Sequence: Synthetic polynucleotide"
ctccatcactaggggtaaccgcgaagcgcctcccacgctgccgcgtcagcgctgacgtaaattacgtcataggggagtggtcctgtattagctgtcacgtgagtgcttttgcgacattttgcgacaccacgtggccattcatggtatatatggccgagtgagcgagcaggatctccattttgaccgcgaaatttgaacgagcagcagccatgccgggcttctacgagatcgtgcttaaggtgccgagcgacctggacgagcacctgccgggcatttctgactcgtttgtgaactgggtggcagagaaggaatgggagctgcccccggattctgacatggatcggaatctgattgagcaggcacccctgaccgtggccgagaagctacagcgcgacttcctggtccaatggcgccgcgtgagtaaggccccggaggccctcttctttgttcagttcgagaagggcgagtcctacttccacctccatattctggtagagaccacgggggtcaaatccatggtgctgggccgcttcctgagtcagattcgggacaagctggtgcagaccatctaccgcgggatcgagccgaccctgcccaactggttcgcggtgacaaagacgcgtaatggcgccggaggggggaacaaggtggtggacgagtgctacatccccaactacctgctgcccaagactcagcccgagctgcagtgggcgtggactaacatggaggagtatataagcgcgtgcttgaacctggccgagcgcaaacggctcgtggcgcagcacctgacccacgtcagccagacccaggagcagaacaaggagaatctgaacccgaattctgacgcgcctgtcatccggtcaaaaacctccgcgcgctacatggagctggtcgggtggctggtggaccggggcatcacctccgagaagcagtggatccaggaggaccaggcctcgtacatctccttcaacgccgcctccaactcgcggtctcagatcaaggccgcgctggacaatgccggcaagatcatggcgctgaccaaatccgcgcccgactacctggtaggccccgctctgcccgcggacattaaatccaaccgcatctaccgcatcctggagctgaatggctacgaccctgcctacgccggttccgtctttctcggctgggcccagaaaaagtttggcaaaaggaacaccatctggctgtttgggccggccaccacgggcaagaccaacatcgcggaagccatcgcccacgccgtgcccttctacggctgcgtcaactggaccaatgagaactttcccttcaacgattgcgtcgacaagatggtgatctggtgggaggagggcaagatgacggccaaggtcgtggagtccgccaaggccattctcggcggcagcaaggtgcgcgtggaccaaaagtgcaagtcgtccgcccagatcgatcccacccccgtgatcgtcacctccaacaccaacatgtgcgccgtgattgacgggaacagcaccaccttcgagcaccagcagccgttgcaggaccggatgttcaaatttgaacttacccgccgtctggagcacgactttggcaaggtgacaaagcaggaagtcaaagagttcttccgctgggcgcaggatcacgtgaccgaggtggcgcatgagttctacgtcagaaagggtggagctaacaaaagacccgcccccgatgacgcggatataagcgagcccaagcgggcctgcccctcagtcgcggatccatcgacgtcagacgcggaaggagctccggtggactttgccgacaggtaccaaaacaaatgttctcgtcacgcgggcatgcttcagatgctgtttccctgcaaaacatgcgagagaatgaatcagaatttcaacatttgcttcacgcacgggaccagagactgttcagaatgtttccctggcgtgtcagaatctcaaccggtcgtcagaaaaaagacgtatcggaaactctgtgcgattcatcatctgctggggcgggcacccgagattgcttgctcggcctgcgacctggtcaacgtggacctggatgactgtgtttctgagcaataaatgacttaaaccaggtatggctgccgatggttatcttccagattggctcgaggacaacctctctgagggcattcgcgagtggtgggacctgaaacctggagccccgaaacccaaagccaaccagcaaaagcaggacaacggccggggtctggtgcttcctggctacaagtacctcggacccttcaacggactcgacaagggggagcccgtcaacgcggcggacgcagcggccctcgagcacgacaaggcctacgaccagcagctccaagcgggtgacaatccgtacctgcggtataatcacgccgacgccgagtttcaggagcgtctgcaagaagatacgtcttttgggggcaacctcgggcgcgcagtcttccaggccaaaaagcgggttctcgaacctctgggcctggttgaatcgccggttaagacggctcctggaaagaagagaccggtagagccatcaccccagcgctctccagactcctctacgggcatcggcaagaaaggccagcagcccgcaaaaaagagactcaattttgggcagactggcgactcagagtcagtccccgaccctcaaccaatcggagaaccaccagcaggcccctctggtctgggatctggtacaatggctgcaggcggtggcgctccaatggcagacaataacgaaggcgccgacggagtgggtagttcctcaggaaattggcattgcgattccacatggctgggcgacagagtcatcaccaccagcacccgcacctgggccctgcccacctacaacaaccacctctacaagcaaatctccaacgggacctcgggaggaagcaccaacgacaacacctacttcggctacagcaccccctgggggtattttgacttcaacagattccactgccacttttcaccacgtgactggcagcgactcatcaacaacaactggggattccggcccaagaggctcaacttcaagctcttcaacatccaagtcaaggaggtcacgcagaatgaaggcaccaagaccatcgccaataaccttaccagcacgattcaggtctttacggactcggaataccagctcccgtacgtgctcggctcggcgcaccagggctgcctgcctccgttcccggcggacgtcttcatgattcctcagtacgggtacctgactctgaacaatggcagtcaggctgtgggccggtcgtccttctactgcctggagtactttccttctcaaatgctgagaacgggcaacaactttgaattcagctacaacttcgaggacgtgcccttccacagcagctacgcgcacagccagagcctggaccggctgatgaaccctctcatcgaccagtacttgtactacctgtcccggactcaaagcacgggcggtactgcaggaactcagcagttgctattttctcaggccgggcctaacaacatgtcggctcaggccaagaactggctacccggtccctgctaccggcagcaacgcgtctccacgacactgtcgcagaacaacaacagcaactttgcctggacgggtgccaccaagtatcatctgaatggcagagactctctggtgaatcctggcgttgccatggctacccacaaggacgacgaagagcgattttttccatccagcggagtcttaatgtttgggaaacagggagctggaaaagacaacgtggactatagcagcgtgatgctaaccagcgaggaagaaataaagaccaccaacccagtggccacagaacagtacggcgtggtggccgataacctgcaacagcaaaacgccgctcctattgtaggggccgtcaatagtcaaggagccttacctggcatggtgtggcagaaccgggacgtgtacctgcagggtcccatctgggccaagattcctcatacggacggcaactttcatccctcgccgctgatgggaggctttggactgaagcatccgcctcctcagatcctgattaaaaacacacctgttcccgcggatcctccgaccaccttcaatcaggccaagctggcttctttcatcacgcagtacagtaccggccaggtcagcgtggagatcgagtgggagctgcagaaggagaacagcaaacgctggaacccagagattcagtacacttccaactactacaaatctacaaatgtggactttgctgtcaatactgagggtacttattccgagcctcgccccattggcacccgttacctcacccgtaatctgtaattacatgttaatcaataaaccggttaattcgtttcagttgaactttggtctcctgtccttcttatcttatcggttaccatagaaactggttacttattaactgcttggtgcgcttcgcgataaaagacttacgtcatcgggttacccctagtgatgga

SEQ ID NO: 898 - protein, 738 aa, Artificial Sequence
  source: /note="Description of Artificial Sequence: Synthetic polypeptide"
MAADGYLPDWLEDNLSEGIREWWDLKPGAPKPKANQQKQDNGRGLVLPGYKYLGPFNGLDKGEPVNAADAAALEHDKAYDQQLQAGDNPYLRYNHADAEFQERLQEDTSFGGNLGRAVFQAKKRVLEPLGLVESPVKTAPGKKRPVEPSPQRSPDSSTGIGKKGQQPAKKRLNFGQTGDSESVPDPQPIGEPPAAPSGVGPNTMAAGGGAPMADNNEGADGVGSSSGNWHCDSTWLGDRVITTSTRTWALPTYNNHLYKQISNGTSGGSTNDNTYFGYSTPWGYFDFNRFHCHFSPRDWQRLINNNWGFRPKRLNFKLFNIQVKEVTQNEGTKTIANNLTSTIQVFTDSEYQLPYVLGSAHQGCLPPFPADVFMIPQYGYLTLNNGSQAVGRSSFYCLEYFPSQMLRTGNNFEFSYNFEDVPFHSSYAHSQSLDRLMNPLIDQYLYYLSRTQSTGGTAGTQQLLFSQAGPNNMSAQAKNWLPGPCYRQQRVSTTLSQNNNSNFAWTGATKYHLNGRDSLVNPGVAMATHKDDEERFFPSSGVLMFGKQGAGKDNVDYSSVMLTSEEEIKTTNPVATEQYGVVADNLQQQNAAPIVGAVNSQGALPGMVWQNRDVYLQGPIWAKIPHTDGNFHPSPLMGGFGLKHPPPQILIKNTPVPADPPTTFNQAKLASFITQYSTGQVSVEIEWELQKENSKRWNPEIQYTSNYYKSTNVDFAVNTEGTYSEPRPIGTRYLTRNL

SEQ ID NO: 899 - protein, 738 aa, Artificial Sequence
  source: /note="Description of Artificial Sequence: Synthetic polypeptide"
MAADGYLPDWLEDNLSEGIREWWDLKPGAPKPKANQQRQDNGRGLVLPGYRYLGPFNGLDKGEPVNAADAAALEHDRAYDQQLQAGDNPYLRYNHADAEFQERLQEDTSFGGNLGRAVFQAKKRVLEPLGLVESPVRTAPGKKRPVEPSPQRSPDSSTGIGKKGQQPARKRLNFGQTGDSESVPDPQPIGEPPAAPSGVGPNTMAAGGGAPMADNNEGADGVGSSSGNWHCDSTWLGDRVITTSTRTWALPTYNNHLYRQISNGTSGGSTNDNTYFGYSTPWGYFDFNRFHCHFSPRDWQRLINNNWGFRPKRLNFKLFNIQVKEVTQNEGTRTIANNLTSTIQVFTDSEYQLPYVLGSAHQGCLPPFPADVFMIPQYGYLTLNNGSQAVGRSSFYCLEYFPSQMLRTGNNFEFSYNFEDVPFHSSYAHSQSLDRLMNPLIDQYLYYLSRTQSTGGTAGTQQLLFSQAGPNNMSAQAKNWLPGPCYRQQRVSTTLSQNNNSNFAWTGATKYHLNGRDSLVNPGVAMATHRDDEERFFPSSGVLMFGRQGAGRDNVDYSSVMLTSEEEIRTTNPVATEQYGVVADNLQQQNAAPIVGAVNSQGALPGMVWQNRDVYLQGPIWAKIPHTDGNFHPSPLMGGFGLKHPPPQILIKNTPVPADPPTTFNQAKLASFITQYSTGQVSVEIEWELQKENSKRWNPEIQYTSNYYKSTNVDFAVNTEGTYSEPRPIGTRYLTRNL

SEQ ID NO: 900 - protein, 738 aa, Artificial Sequence
  source: /note="Description of Artificial Sequence: Synthetic polypeptide"
MAADGYLPDWLEDNLSEGIREWWDLKPGAPKPKANQQRQDNGRGLVLPGYRYLGPFNGLDKGEPVNAADAAALEHDRAYDQQLQAGDNPYLRYNHADAEFQERLQEDTSFGGNLGRAVFQAKKRVLEPLGLVESPVRTAPGKKRPVEPSPQRSPDSSTGIGKRGQQPARKRLNFGQTGDSESVPDPQPIGEPPAAPSGVGPNTMAAGGGAPMADNNEGADGVGSSSGNWHCDSTWLGDRVITTSTRTWALPTYNNHLYRQISNGTSGGSTNDNTYFGYSTPWGYFDFNRFHCHFSPRDWQRLINNNWGFRPKRLNFKLFNIQVKEVTQNEGTRTIANNLTSTIQVFTDSEYQLPYVLGSAHQGCLPPFPADVFMIPQYGYLTLNNGSQAVGRSSFYCLEYFPSQMLRTGNNFEFSYNFEDVPFHSSYAHSQSLDRLMNPLIDQYLYYLSRTQSTGGTAGTQQLLFSQAGPNNMSAQAKNWLPGPCYRQQRVSTTLSQNNNSNFAWTGATKYHLNGRDSLVNPGVAMATHRDDEERFFPSSGVLMFGKQGAGRDNVDYSSVMLTSEEEIRTTNPVATEQYGVVADNLQQQNAAPIVGAVNSQGALPGMVWQNRDVYLQGPIWAKIPHTDGNFHPSPLMGGFGLKHPPPQILIKNTPVPADPPTTFNQAKLASFITQYSTGQVSVEIEWELQKENSKRWNPEIQYTSNYYKSTNVDFAVNTEGTYSEPRPIGTRYLTRNL

SEQ ID NO: 901 - protein, 738 aa, Artificial Sequence
  source: /note="Description of Artificial Sequence: Synthetic polypeptide"
MAADGYLPDWLEDNLSEGIREWWDLKPGAPKPKANQQRQDNGRGLVLPGYRYLGPFNGLDKGEPVNAADAAALEHDRAYDQQLQAGDNPYLRYNHADAEFQERLQEDTSFGGNLGRAVFQAKKRVLEPLGLVESPVRTAPGKKRPVEPSPQRSPDSSTGIGKRGQQPAKKRLNFGQTGDSESVPDPQPIGEPPAAPSGVGPNTMAAGGGAPMADNNEGADGVGSSSGNWHCDSTWLGDRVITTSTRTWALPTYNNHLYRQISNGTSGGSTNDNTYFGYSTPWGYFDFNRFHCHFSPRDWQRLINNNWGFRPKRLNFKLFNIQVKEVTQNEGTRTIANNLTSTIQVFTDSEYQLPYVLGSAHQGCLPPFPADVFMIPQYGYLTLNNGSQAVGRSSFYCLEYFPSQMLRTGNNFEFSYNFEDVPFHSSYAHSQSLDRLMNPLIDQYLYYLSRTQSTGGTAGTQQLLFSQAGPNNMSAQAKNWLPGPCYRQQRVSTTLSQNNNSNFAWTGATKYHLNGRDSLVNPGVAMATHRDDEERFFPSSGVLMFGRQGAGRDNVDYSSVMLTSEEEIRTTNPVATEQYGVVADNLQQQNAAPIVGAVNSQGALPGMVWQNRDVYLQGPIWAKIPHTDGNFHPSPLMGGFGLKHPPPQILIKNTPVPADPPTTFNQAKLASFITQYSTGQVSVEIEWELQKENSKRWNPEIQYTSNYYKSTNVDFAVNTEGTYSEPRPIGTRYLTRNL

SEQ ID NO: 902 - protein, 738 aa, Artificial Sequence
  source: /note="Description of Artificial Sequence: Synthetic polypeptide"
MAADGYLPDWLEDNLSEGIREWWDLKPGAPKPKANQQRQDNGRGLVLPGYRYLGPFNGLDKGEPVNAADAAALEHDRAYDQQLQAGDNPYLRYNHADAEFQERLQEDTSFGGNLGRAVFQAKKRVLEPLGLVESPVRTAPGKKRPVEPSPQRSPDSSTGIGKRGQQPAKKRLNFGQTGDSESVPDPQPIGEPPAAPSGVGPNTMAAGGGAPMADNNEGADGVGSSSGNWHCDSTWLGDRVITTSTRTWALPTYNNHLYRQISNGTSGGSTNDNTYFGYSTPWGYFDFNRFHCHFSPRDWQRLINNNWGFRPKRLNFKLFNIQVKEVTQNEGTRTIANNLTSTIQVFTDSEYQLPYVLGSAHQGCLPPFPADVFMIPQYGYLTLNNGSQAVGRSSFYCLEYFPSQMLRTGNNFEFSYNFEDVPFHSSYAHSQSLDRLMNPLIDQYLYYLSRTQSTGGTAGTQQLLFSQAGPNNMSAQAKNWLPGPCYRQQRVSTTLSQNNNSNFAWTGATKYHLNGRDSLVNPGVAMATHRDDEERFFPSSGVLMFGKQGAGRDNVDYSSVMLTSEEEIRTTNPVATEQYGVVADNLQQQNAAPIVGAVNSQGALPGMVWQNRDVYLQGPIWAKIPHTDGNFHPSPLMGGFGLKHPPPQILIKNTPVPADPPTTFNQARLASFITQYSTGQVSVEIEWELQKENSKRWNPEIQYTSNYYKSTNVDFAVNTEGTYSEPRPIGTRYLTRNL

SEQ ID NO: 903 - protein, 738 aa, Artificial Sequence
  source: /note="Description of Artificial Sequence: Synthetic polypeptide"
MAADGYLPDWLEDNLSEGIREWWDLKPGAPKPKANQQRQDNGRGLVLPGYRYLGPFNGLDKGEPVNAADAAALEHDRAYDQQLQAGDNPYLRYNHADAEFQERLQEDTSFGGNLGRAVFQAKKRVLEPLGLVESPVRTAPGKKRPVEPSPQRSPDSSTGIGKKGQQPAKKRLNFGQTGDSESVPDPQPIGEPPAAPSGVGPNTMAAGGGAPMADNNEGADGVGSSSGNWHCDSTWLGDRVITTSTRTWALPTYNNHLYRQISNGTSGGSTNDNTYFGYSTPWGYFDFNRFHCHFSPRDWQRLINNNWGFRPKRLNFKLFNIQVKEVTQNEGTRTIANNLTSTIQVFTDSEYQLPYVLGSAHQGCLPPFPADVFMIPQYGYLTLNNGSQAVGRSSFYCLEYFPSQMLRTGNNFEFSYNFEDVPFHSSYAHSQSLDRLMNPLIDQYLYYLSRTQSTGGTAGTQQLLFSQAGPNNMSAQAKNWLPGPCYRQQRVSTTLSQNNNSNFAWTGATKYHLNGRDSLVNPGVAMATHRDDEERFFPSSGVLMFGRQGAGRDNVDYSSVMLTSEEEIRTTNPVATEQYGVVADNLQQQNAAPIVGAVNSQGALPGMVWQNRDVYLQGPIWAKIPHTDGNFHPSPLMGGFGLKHPPPQILIKNTPVPADPPTTFNQARLASFITQYSTGQVSVEIEWELQKENSKRWNPEIQYTSNYYKSTNVDFAVNTEGTYSEPRPIGTRYLTRNL

SEQ ID NO: 904 - DNA, 2214 bp, Artificial Sequence
  source: /note="Description of Artificial Sequence: Synthetic polynucleotide"
atggctgccgatggttatcttccagattggctcgaggacaacctctctgagggcattcgcgagtggtgggacctgaaacctggagccccgaaacccaaagccaaccagcaaaagcaggacaacggccggggtctggtgcttcctggctacaagtacctcggacccttcaacggactcgacaagggggagcccgtcaacgcggcggacgcagcggccctcgagcacgacaaggcctacgaccagcagctccaagcgggtgacaatccgtacctgcggtataatcacgccgacgccgagtttcaggagcgtctgcaagaagatacgtcttttgggggcaacctcgggcgcgcagtcttccaggccaaaaagcgggttctcgaacctctgggcctggttgaatcgccggttaagacggctcctggaaagaagagaccggtagagccatcaccccagcgctctccagactcctctacgggcatcggcaagaaaggccagcagcccgcaaaaaagagactcaattttgggcagactggcgactcagagtcagtccccgaccctcaaccaatcggagaaccaccagcagccccctctggtgtgggacctaatacaatggctgcaggcggtggcgctccaatggcagacaataacgaaggcgccgacggagtgggtagttcctcaggaaattggcattgcgattccacatggctgggcgacagagtcatcaccaccagcacccgcacctgggccctgcccacctacaacaaccacctctacaagcaaatctccaacgggacctcgggaggaagcaccaacgacaacacctacttcggctacagcaccccctgggggtattttgacttcaacagattccactgccacttttcaccacgtgactggcagcgactcatcaacaacaactggggattccggcccaagaggctcaacttcaagctcttcaacatccaagtcaaggaggtcacgcagaatgaaggcaccaagaccatcgccaataaccttaccagcacgattcaggtctttacggactcggaataccagctcccgtacgtgctcggctcggcgcaccagggctgcctgcctccgttcccggcggacgtcttcatgattcctcagtacgggtacctgactctgaacaatggcagtcaggctgtgggccggtcgtccttctactgcctggagtactttccttctcaaatgctgagaacgggcaacaactttgaattcagctacaacttcgaggacgtgcccttccacagcagctacgcgcacagccagagcctggaccggctgatgaaccctctcatcgaccagtacttgtactacctgtcccggactcaaagcacgggcggtactgcaggaactcagcagttgctattttctcaggccgggcctaacaacatgtcggctcaggccaagaactggctacccggtccctgctaccggcagcaacgcgtctccacgacactgtcgcagaacaacaacagcaactttgcctggacgggtgccaccaagtatcatctgaatggcagagactctctggtgaatcctggcgttgccatggctacccacaaggacgacgaagagcgattttttccatccagcggagtcttaatgtttgggaaacagggagctggaaaagacaacgtggactatagcagcgtgatgctaaccagcgaggaagaaataaagaccaccaacccagtggccacagaacagtacggcgtggtggccgataacctgcaacagcaaaacgccgctcctattgtaggggccgtcaatagtcaaggagccttacctggcatggtgtggcagaaccgggacgtgtacctgcagggtcccatctgggccaagattcctcatacggacggcaactttcatccctcgccgctgatgggaggctttggactgaagcatccgcctcctcagatcctgattaaaaacacacctgttcccgcggatcctccgaccaccttcaatcaggccaagctggcttctttcatcacgcagtacagtaccggccaggtcagcgtggagatcgagtgggagctgcagaaggagaacagcaaacgctggaacccagagattcagtacacttccaactactacaaatctacaaatgtggactttgctgtcaatactgagggtacttattccgagcctcgccccattggcacccgttacctcacccgtaatctg

SEQ ID NO: 905 - DNA, 2217 bp, Artificial Sequence
  source: /note="Description of Artificial Sequence: Synthetic polynucleotide"
atggctgccgatggttatcttccagattggctcgaggacaacctctctgagggcattcgcgagtggtgggacctgaaacctggagccccgaaacccaaagccaaccagcaaaggcaggacaacggccggggtctggtgcttcctggctacaggtacctcggacccttcaacggactcgacaagggggagcccgtcaacgcggcggacgcagcggccctcgagcacgacagggcctacgaccagcagctccaagcgggtgacaatccgtacctgcggtataatcacgccgacgccgagtttcaggagcgtctgcaagaagatacgtcttttgggggcaacctcgggcgcgcagtcttccaggccaaaaagcgggttctcgaacctctgggcctggttgaatcgccggttaggacggctcctggaaagaagagaccggtagagccatcaccccagcgctctccagactcctctacgggcatcggcaagaaaggccagcagcccgcaagaaagagactcaattttgggcagactggcgactcagagtcagtccccgaccctcaaccaatcggagaaccaccagcagccccctctggtgtgggacctaatacaatggctgcaggcggtggcgctccaatggcagacaataacgaaggcgccgacggagtgggtagttcctcaggaaattggcattgcgattccacatggctgggcgacagagtcatcaccaccagcacccgcacctgggccctgcccacctacaacaaccacctctacaggcaaatctccaacgggacctcgggaggaagcaccaacgacaacacctacttcggctacagcaccccctgggggtattttgacttcaacagattccactgccacttttcaccacgtgactggcagcgactcatcaacaacaactggggattccggcccaagaggctcaacttcaagctcttcaacatccaagtcaaggaggtcacgcagaatgaaggcaccaggaccatcgccaataaccttaccagcacgattcaggtctttacggactcggaataccagctcccgtacgtgctcggctcggcgcaccagggctgcctgcctccgttcccggcggacgtcttcatgattcctcagtacgggtacctgactctgaacaatggcagtcaggctgtgggccggtcgtccttctactgcctggagtactttccttctcaaatgctgagaacgggcaacaactttgaattcagctacaacttcgaggacgtgcccttccacagcagctacgcgcacagccagagcctggaccggctgatgaaccctctcatcgaccagtacttgtactacctgtcccggactcaaagcacgggcggtactgcaggaactcagcagttgctattttctcaggccgggcctaacaacatgtcggctcaggccaagaactggctacccggtccctgctaccggcagcaacgcgtctccacgacactgtcgcagaacaacaacagcaactttgcctggacgggtgccaccaagtatcatctgaatggcagagactctctggtgaatcctggcgttgccatggctacccacagggacgacgaagagcgattttttccatccagcggagtcttaatgtttgggagacagggagctggaagagacaacgtggactatagcagcgtgatgctaaccagcgaggaagaaataaggaccaccaacccagtggccacagaacagtacggcgtggtggccgataacctgcaacagcaaaacgccgctcctattgtaggggccgtcaatagtcaaggagccttacctggcatggtgtggcagaaccgggacgtgtacctgcagggtcccatctgggccaagattcctcatacggacggcaactttcatccctcgccgctgatgggaggctttggactgaagcatccgcctcctcagatcctgattaaaaacacacctgttcccgcggatcctccgaccaccttcaatcaggccaagctggcttctttcatcacgcagtacagtaccggccaggtcagcgtggagatcgagtgggagctgcagaaggagaacagcaaacgctggaacccagagattcagtacacttccaactactacaaatctacaaatgtggactttgctgtcaatactgagggtacttattccgagcctcgccccattggcacccgttacctcacccgtaatctgtaa

SEQ ID NO: 906 - DNA, 2217 bp, Artificial Sequence
  source: /note="Description of Artificial Sequence: Synthetic polynucleotide"
atggctgccgatggttatcttccagattggctcgaggacaacctctctgagggcattcgcgagtggtgggacctgaaacctggagccccgaaacccaaagccaaccagcaaaggcaggacaacggccggggtctggtgcttcctggctacaggtacctcggacccttcaacggactcgacaagggggagcccgtcaacgcggcggacgcagcggccctcgagcacgacagggcctacgaccagcagctccaagcgggtgacaatccgtacctgcggtataatcacgccgacgccgagtttcaggagcgtctgcaagaagatacgtcttttgggggcaacctcgggcgcgcagtcttccaggccaaaaagcgggttctcgaacctctgggcctggttgaatcgccggttaggacggctcctggaaagaagagaccggtagagccatcaccccagcgctctccagactcctctacgggcatcggcaagagaggccagcagcccgcaagaaagagactcaattttgggcagactggcgactcagagtcagtccccgaccctcaaccaatcggagaaccaccagcagccccctctggtgtgggacctaatacaatggctgcaggcggtggcgctccaatggcagacaataacgaaggcgccgacggagtgggtagttcctcaggaaattggcattgcgattccacatggctgggcgacagagtcatcaccaccagcacccgcacctgggccctgcccacctacaacaaccacctctacaggcaaatctccaacgggacctcgggaggaagcaccaacgacaacacctacttcggctacagcaccccctgggggtattttgacttcaacagattccactgccacttttcaccacgtgactggcagcgactcatcaacaacaactggggattccggcccaagaggctcaacttcaagctcttcaacatccaagtcaaggaggtcacgcagaatgaaggcaccaggaccatcgccaataaccttaccagcacgattcaggtctttacggactcggaataccagctcccgtacgtgctcggctcggcgcaccagggctgcctgcctccgttcccggcggacgtcttcatgattcctcagtacgggtacctgactctgaacaatggcagtcaggctgtgggccggtcgtccttctactgcctggagtactttccttctcaaatgctgagaacgggcaacaactttgaattcagctacaacttcgaggacgtgcccttccacagcagctacgcgcacagccagagcctggaccggctgatgaaccctctcatcgaccagtacttgtactacctgtcccggactcaaagcacgggcggtactgcaggaactcagcagttgctattttctcaggccgggcctaacaacatgtcggctcaggccaagaactggctacccggtccctgctaccggcagcaacgcgtctccacgacactgtcgcagaacaacaacagcaactttgcctggacgggtgccaccaagtatcatctgaatggcagagactctctggtgaatcctggcgttgccatggctacccacagggacgacgaagagcgattttttccatccagcggagtcttaatgtttgggaaacagggagctggaagagacaacgtggactatagcagcgtgatgctaaccagcgaggaagaaataaggaccaccaacccagtggccacagaacagtacggcgtggtggccgataacctgcaacagcaaaacgccgctcctattgtaggggccgtcaatagtcaaggagccttacctggcatggtgtggcagaaccgggacgtgtacctgcagggtcccatctgggccaagattcctcatacggacggcaactttcatccctcgccgctgatgggaggctttggactgaagcatccgcctcctcagatcctgattaaaaacacacctgttcccgcggatcctccgaccaccttcaatcaggccaagctggcttctttcatcacgcagtacagtaccggccaggtcagcgtggagatcgagtgggagctgcagaaggagaacagcaaacgctggaacccagagattcagtacacttccaactactacaaatctacaaatgtggactttgctgtcaatactgagggtacttattccgagcctcgccccattggcacccgttacctcacccgtaatctgtaa

SEQ ID NO: 907 - DNA, 2217 bp, Artificial Sequence
  source: /note="Description of Artificial Sequence: Synthetic polynucleotide"
atggctgccgatggttatcttccagattggctcgaggacaacctctctgagggcattcgcgagtggtgggacctgaaacctggagccccgaaacccaaagccaaccagcaaaggcaggacaacggccggggtctggtgcttcctggctacaggtacctcggacccttcaacggactcgacaagggggagcccgtcaacgcggcggacgcagcggccctcgagcacgacagggcctacgaccagcagctccaagcgggtgacaatccgtacctgcggtataatcacgccgacgccgagtttcaggagcgtctgcaagaagatacgtcttttgggggcaacctcgggcgcgcagtcttccaggccaaaaagcgggttctcgaacctctgggcctggttgaatcgccggttaggacggctcctggaaagaagagaccggtagagccatcaccccagcgctctccagactcctctacgggcatcggcaagagaggccagcagcccgcaaaaaagagactcaattttgggcagactggcgactcagagtcagtccccgaccctcaaccaatcggagaaccaccagcagccccctctggtgtgggacctaatacaatggctgcaggcggtggcgctccaatggcagacaataacgaaggcgccgacggagtgggtagttcctcaggaaattggcattgcgattccacatggctgggcgacagagtcatcaccaccagcacccgcacctgggccctgcccacctacaacaaccacctctacaggcaaatctccaacgggacctcgggaggaagcaccaacgacaacacctacttcggctacagcaccccctgggggtattttgacttcaacagattccactgccacttttcaccacgtgactggcagcgactcatcaacaacaactggggattccggcccaagaggctcaacttcaagctcttcaacatccaagtcaaggaggtcacgcagaatgaaggcaccaggaccatcgccaataaccttaccagcacgattcaggtctttacggactcggaataccagctcccgtacgtgctcggctcggcgcaccagggctgcctgcctccgttcccggcggacgtcttcatgattcctcagtacgggtacctgactctgaacaatggcagtcaggctgtgggccggtcgtccttctactgcctggagtactttccttctcaaatgctgagaacgggcaacaactttgaattcagctacaacttcgaggacgtgcccttccacagcagctacgcgcacagccagagcctggaccggctgatgaaccctctcatcgaccagtacttgtactacctgtcccggactcaaagcacgggcggtactgcaggaactcagcagttgctattttctcaggccgggcctaacaacatgtcggctcaggccaagaactggctacccggtccctgctaccggcagcaacgcgtctccacgacactgtcgcagaacaacaacagcaactttgcctggacgggtgccaccaagtatcatctgaatggcagagactctctggtgaatcctggcgttgccatggctacccacagggacgacgaagagcgattttttccatccagcggagtcttaatgtttgggagacagggagctggaagagacaacgtggactatagcagcgtgatgctaaccagcgaggaagaaataaggaccaccaacccagtggccacagaacagtacggcgtggtggccgataacctgcaacagcaaaacgccgctcctattgtaggggccgtcaatagtcaaggagccttacctggcatggtgtggcagaaccgggacgtgtacctgcagggtcccatctgggccaagattcctcatacggacggcaactttcatccctcgccgctgatgggaggctttggactgaagcatccgcctcctcagatcctgattaaaaacacacctgttcccgcggatcctccgaccaccttcaatcaggccaagctggcttctttcatcacgcagtacagtaccggccaggtcagcgtggagatcgagtgggagctgcagaaggagaacagcaaacgctggaacccagagattcagtacacttccaactactacaaatctacaaatgtggactttgctgtcaatactgagggtacttattccgagcctcgccccattggcacccgttacctcacccgtaatctgtaa

SEQ ID NO: 908 - DNA, 2217 bp, Artificial Sequence
  source: /note="Description of Artificial Sequence: Synthetic polynucleotide"
atggctgccgatggttatcttccagattggctcgaggacaacctctctgagggcattcgcgagtggtgggacctgaaacctggagccccgaaacccaaagccaaccagcaaaggcaggacaacggccggggtctggtgcttcctggctacaggtacctcggacccttcaacggactcgacaagggggagcccgtcaacgcggcggacgcagcggccctcgagcacgacagggcctacgaccagcagctccaagcgggtgacaatccgtacctgcggtataatcacgccgacgccgagtttcaggagcgtctgcaagaagatacgtcttttgggggcaacctcgggcgcgcagtcttccaggccaaaaagcgggttctcgaacctctgggcctggttgaatcgccggttaggacggctcctggaaagaagagaccggtagagccatcaccccagcgctctccagactcctctacgggcatcggcaagagaggccagcagcccgcaaaaaagagactcaattttgggcagactggcgactcagagtcagtccccgaccctcaaccaatcggagaaccaccagcagccccctctggtgtgggacctaatacaatggctgcaggcggtggcgctccaatggcagacaataacgaaggcgccgacggagtgggtagttcctcaggaaattggcattgcgattccacatggctgggcgacagagtcatcaccaccagcacccgcacctgggccctgcccacctacaacaaccacctctacaggcaaatctccaacgggacctcgggaggaagcaccaacgacaacacctacttcggctacagcaccccctgggggtattttgacttcaacagattccactgccacttttcaccacgtgactggcagcgactcatcaacaacaactggggattccggcccaagaggctcaacttcaagctcttcaacatccaagtcaaggaggtcacgcagaatgaaggcaccaggaccatcgccaataaccttaccagcacgattcaggtctttacggactcggaataccagctcccgtacgtgctcggctcggcgcaccagggctgcctgcctccgttcccggcggacgtcttcatgattcctcagtacgggtacctgactctgaacaatggcagtcaggctgtgggccggtcgtccttctactgcctggagtactttccttctcaaatgctgagaacgggcaacaactttgaattcagctacaacttcgaggacgtgcccttccacagcagctacgcgcacagccagagcctggaccggctgatgaaccctctcatcgaccagtacttgtactacctgtcccggactcaaagcacgggcggtactgcaggaactcagcagttgctattttctcaggccgggcctaacaacatgtcggctcaggccaagaactggctacccggtccctgctaccggcagcaacgcgtctccacgacactgtcgcagaacaacaacagcaactttgcctggacgggtgccaccaagtatcatctgaatggcagagactctctggtgaatcctggcgttgccatggctacccacagggacgacgaagagcgattttttccatccagcggagtcttaatgtttgggaaacagggagctggaagagacaacgtggactatagcagcgtgatgctaaccagcgaggaagaaataaggaccaccaacccagtggccacagaacagtacggcgtggtggccgataacctgcaacagcaaaacgccgctcctattgtaggggccgtcaatagtcaaggagccttacctggcatggtgtggcagaaccgggacgtgtacctgcagggtcccatctgggccaagattcctcatacggacggcaactttcatccctcgccgctgatgggaggctttggactgaagcatccgcctcctcagatcctgattaaaaacacacctgttcccgcggatcctccgaccaccttcaatcaggccaggctggcttctttcatcacgcagtacagtaccggccaggtcagcgtggagatcgagtgggagctgcagaaggagaacagcaaacgctggaacccagagattcagtacacttccaactactacaaatctacaaatgtggactttgctgtcaatactgagggtacttattccgagcctcgccccattggcacccgttacctcacccgtaatctgtaa

SEQ ID NO: 909 - DNA, 2217 bp, Artificial Sequence
  source: /note="Description of Artificial Sequence: Synthetic polynucleotide"
atggctgccgatggttatcttccagattggctcgaggacaacctctctgagggcattcgcgagtggtgggacctgaaacctggagccccgaaacccaaagccaaccagcaaaggcaggacaacggccggggtctggtgcttcctggctacaggtacctcggacccttcaacggactcgacaagggggagcccgtcaacgcggcggacgcagcggccctcgagcacgacagggcctacgaccagcagctccaagcgggtgacaatccgtacctgcggtataatcacgccgacgccgagtttcaggagcgtctgcaagaagatacgtcttttgggggcaacctcgggcgcgcagtcttccaggccaaaaagcgggttctcgaacctctgggcctggttgaatcgccggttaggacggctcctggaaagaagagaccggtagagccatcaccccagcgctctccagactcctctacgggcatcggcaagaaaggccagcagcccgcaaaaaagagactcaattttgggcagactggcgactcagagtcagtccccgaccctcaaccaatcggagaaccaccagcagccccctctggtgtgggacctaatacaatggctgcaggcggtggcgctccaatggcagacaataacgaaggcgccgacggagtgggtagttcctcaggaaattggcattgcgattccacatggctgggcgacagagtcatcaccaccagcacccgcacctgggccctgcccacctacaacaaccacctctacaggcaaatctccaacgggacctcgggaggaagcaccaacgacaacacctacttcggctacagcaccccctgggggtattttgacttcaacagattccactgccacttttcaccacgtgactggcagcgactcatcaacaacaactggggattccggcccaagaggctcaacttcaagctcttcaacatccaagtcaaggaggtcacgcagaatgaaggcaccaggaccatcgccaataaccttaccagcacgattcaggtctttacggactcggaataccagctcccgtacgtgctcggctcggcgcaccagggctgcctgcctccgttcccggcggacgtcttcatgattcctcagtacgggtacctgactctgaacaatggcagtcaggctgtgggccggtcgtccttctactgcctggagtactttccttctcaaatgctgagaacgggcaacaactttgaattcagctacaacttcgaggacgtgcccttccacagcagctacgcgcacagccagagcctggaccggctgatgaaccctctcatcgaccagtacttgtactacctgtcccggactcaaagcacgggcggtactgcaggaactcagcagttgctattttctcaggccgggcctaacaacatgtcggctcaggccaagaactggctacccggtccctgctaccggcagcaacgcgtctccacgacactgtcgcagaacaacaacagcaactttgcctggacgggtgccaccaagtatcatctgaatggcagagactctctggtgaatcctggcgttgccatggctacccacagggacgacgaagagcgattttttccatccagcggagtcttaatgtttgggagacagggagctggaagagacaacgtggactatagcagcgtgatgctaaccagcgaggaagaaataaggaccaccaacccagtggccacagaacagtacggcgtggtggccgataacctgcaacagcaaaacgccgctcctattgtaggggccgtcaatagtcaaggagccttacctggcatggtgtggcagaaccgggacgtgtacctgcagggtcccatctgggccaagattcctcatacggacggcaactttcatccctcgccgctgatgggaggctttggactgaagcatccgcctcctcagatcctgattaaaaacacacctgttcccgcggatcctccgaccaccttcaatcaggccaggctggcttctttcatcacgcagtacagtaccggccaggtcagcgtggagatcgagtgggagctgcagaaggagaacagcaaacgctggaacccagagattcagtacacttccaactactacaaatctacaaatgtggactttgctgtcaatactgagggtacttattccgagcctcgccccattggcacccgttacctcacccgtaatctgtaa

SEQ ID NO: 910 - protein, 744 aa, Artificial Sequence
  source: /note="Description of Artificial Sequence: Synthetic polypeptide"
MAADGYLPDWLEDTLSEGIRQWWKLKPGPPPPKPAERHKDDSRGLVLPGYKYLGPFNGLDKGEPVNEADAAALEHDKAYDRQLDSGDNPYLKYNHADAEFQERLKEDTSFGGNLGRAVFQAKKRVLEPLGLVEEPVKTAPGKKRPVEHSPVEPDSSSGTGKAGQQPARKRLNFGQTGDADSVPDPQPLGQPPAAPSGLGTNTMATGSGAPMADNNEGADGVGNSSGNWHCDSTWMGDRVITTSTRTWALPTYNNHLYKQISSQSGASNDNHYFGYSTPWGYFDFNRFHCHFSPRDWQRLINNNWGFRPKRLNFKLFNIQVKEVTQNDGTTTIANNLTSTVQVFTDSEYQLPYVLGSAHQGCLPPFPADVFMVPQYGYLTLNNGSQAVGRSSFYCLEYFPSQMLRTGNNFTFSYTFEDVPFHSSYAHSQSLDRLMNPLIDQYLYYLSRTNTPSGTTTQSRLQFSQAGASDIRDQSRNWLPGPCYRQQRVSKTSADNNNSEYSWTGATKYHLNGRDSLVNPGPAMASHKDDEEKFFPQSGVLIFGKQGSEKTNVDIEKVMITDEEEIRTTNPVATEQYGSVSTNLQRGQRGESGHGYFAQAATADVNTQGVLPGMVWQDRDVYLQGPIWAKIPHTDGHFHPSPLMGGFGLKHPPPQILIKNTPVPANPSTTFSAAKFASFITQYSTGQVSVEIEWELQKENSKRWNPEIQYTSNYNKSVNVDFTVDTNGVYSEPRPIGTRYLTRNL

SEQ ID NO: 911 - DNA, 8359 bp, Artificial Sequence
  source: /note="Description of Artificial Sequence: Synthetic polynucleotide"
catcatcaataatataccttattttggattgaagccaatatgataatgagggggtggagtttgtgacgtggcgcggggcgtgggaacggggcgggtgacgtagtagctctagaggtcctgtattagaggtcacgtgagtgttttgcgacattttgcgacaccatgtggtcacgctgggtatttaagcccgagtgagcacgcagggtctccattttgaagcgggaggtttgaacgcgcagccgccatgccggggttttacgagattgtgattaaggtccccagcgaccttgacgagcatctgcccggcatttctgacagctttgtgaactgggtggccgagaaggaatgggagttgccgccagattctgacatggatctgaatctgattgagcaggcacccctgaccgtggccgagaagctgcagcgcgactttctgacggaatggcgccgtgtgagtaaggcaccggaggcccttttctttgtgcaatttgagaagggagagagctacttccacatgcacgtgctcgtggaaaccaccggggtgaaatccatggttttgggacgtttcctgagtcagattcgcgaaaaactgattcagagaatttaccgcgggatcgagccgactttgccaaactggttcgcggtcacaaagaccagaaatggcgccggaggcgggaacaaggtggtggatgagtgctacatccccaattacttgctccccaaaacccagcctgagctccagtgggcgtggactaatatggaacagtatttaagcgcctgtttgaatctcacggagcgtaaacggttggtggcgcagcatctgacgcacgtgtcgcagacgcaggagcagaacaaagagaatcagaatcccaattctgatgcgccggtgatcagatcaaaaacttcagccaggtacatggagctggtcgggtggctcgtggacaaggggattacctcggagaagcagtggatccaggaggaccaggcctcatacatctccttcaatgcggcctccaactcgcggtcccaaatcaaggctgccttggacaatgcgggaaagattatgagcctgactaaaaccgcccccgactacctggtgggccagcagcccgtggaggacatttccagcaatcggatttataaaattttggaactaaacgggtacgatccccaatatgcggcttccgtctttctgggatgggccacgaaaaagttcggcaagaggaacaccatctggctgtttgggcctgcaactaccgggaagaccaacatcgcggaggccatagcccacactgtgcccttctacgggtgcgtaaactggaccaatgagaactttcccttcaacgactgtgtcgacaagatggtgatctggtgggaggaggggaagatgaccgccaaggtcgtggagtcggccaaagccattctcggaggaagcaaggtgcgcgtggaccagaaatgcaagtcctcggcccagatagacccgactcccgtgatcgtcacctccaacaccaacatgtgcgccgtgattgacgggaactcaacgaccttcgaacaccagcagccgttgcaagaccggatgttcaaatttgaactcacccgccgtctggatcatgactttgggaaggtcaccaagcaggaagtcaaagactttttccggtgggcaaaggatcacgtggttgaggtggagcatgaattctacgtcaaaaagggtggagccaagaaaagacccgcccccagtgacgcagatataagtgagcccaaacgggtgcgcgagtcagttgcgcagccatcgacgtcagacgcggaagcttcgatcaactacgcagacaggtaccaaaacaaatgttctcgtcacgtgggcatgaatctgatgctgtttccctgcagacaatgcgagagaatgaatcagaattcaaatatctgcttcactcacggacagaaagactgtttagagtgctttcccgtgtcagaatctcaacccgtttctgtcgtcaaaaaggcgtatcagaaactgtgctacattcatcatatcatgggaaaggtgccagacgcttgcactgcctgcgatctggtcaatgtggatttggatgactgcatctttgaacaataaatgatttaaatcaggtatggctgccgatggttatcttccagattggctcgaggacactctctctgaaggaataagacagtggtggaagctcaaacctggcccaccaccaccaaagcccgcagagcggcataaggacgacagcaggggtcttgtgcttcctgggtacaagtacctcggacccttcaacggactcgacaagggagagccggtcaacgaggcagacgccgcggccctcgagcacgacaaagcctacgaccggcagctcgacagcggagacaacccgtacctcaagtacaaccacgccgacgcggagtttcaggagcgccttaaagaagatacgtcttttgggggcaacctcggacgagcagtcttccaggcgaaaaagagggttcttgaacctctgggcctggttgaggaacctgttaagacggctccgggaaaaaagaggccggtagagcactctcctgtggagccagactcctcctcgggaaccggaaaggcgggccagcagcctgcaagaaaaagattgaattttggtcagactggagacgcagactcagtacctgacccccagcctctcggacagccaccagcagccccctctggtctgggaactaatacgatggctacaggcagtggcgcaccaatggcagacaataacgagggcgccgacggagtgggtaattcctcgggaaattggcattgcgattccacatggatgggcgacagagtcatcaccaccagcacccgaacctgggccctgcccacctacaacaaccacctctacaaacaaatttccagccaatcaggagcctcgaacgacaatcactactttggctacagcaccccttgggggtattttgacttcaacagattccactgccacttttcaccacgtgactggcaaagactcatcaacaacaactggggattccgacccaagagactcaacttcaagctctttaacattcaagtcaaagaggtcacgcagaatgacggtacgacgacgattgccaataaccttaccagcacggttcaggtgtttactgactcggagtaccagctcccgtacgtcctcggctcggcgcatcaaggatgcctcccgccgttcccagcagacgtcttcatggtgccacagtatggatacctcaccctgaacaacgggagtcaggcagtaggacgctcttcattttactgcctggagtactttccttctcagatgctgcgtaccggaaacaactttaccttcagctacacttttgaggacgttcctttccacagcagctacgctcacagccagagtctggaccgtctcatgaatcctctcatcgaccagtacctgtattacttgagcagaacaaacactccaagtggaaccaccacgcagtcaaggcttcagttttctcaggccggagcgagtgacattcgggaccagtctaggaactggcttcctggaccctgttaccgccagcagcgagtatcaaagacatctgcggataacaacaacagtgaatactcgtggactggagctaccaagtaccacctcaatggcagagactctctggtgaatccgggcccggccatggcaagccacaaggacgatgaagaaaagttttttcctcagagcggggttctcatctttgggaagcaaggctcagagaaaacaaatgtggacattgaaaaggtcatgattacagacgaagaggaaatcaggacaaccaatcccgtggctacggagcagtatggttctgtatctaccaacctccagagaggccagagaggcgagtctggtcatggttattttgcccaggcggccaccgcagatgtcaacacacaaggcgttcttccaggcatggtctggcaggacagagatgtgtaccttcaggggcccatctgggcaaagattccacacacggacggacattttcacccctctcccctcatgggtggattcggacttaaacaccctcctccacagattctcatcaagaacaccccggtacctgcgaatccttcgaccaccttcagtgcggcaaagtttgcttccttcatcacacagtactccacgggacaggtcagcgtggagatcgagtgggagctgcagaaggaaaacagcaaacgctggaatcccgaaattcagtacacttccaactacaacaagtctgttaatgtggactttactgtggacactaatggcgtgtattcagagcctcgccccattggcaccagatacctgactcgtaatctgtaattgcttgttaatcaataaaccgtttaattcgtttcagttgaactttggtctctgcgtatttctttcttatctagtttccatgctctagaggtcctgtattagaggtcacgtgagtgttttgcgacattttgcgacaccatgtggtcacgctgggtatttaagcccgagtgagcacgcagggtctccattttgaagcgggaggtttgaacgcgcagccaccacggcggggttttacgagattgtgattaaggtccccagcgaccttgacgagcatctgcccggcatttctgacagctttgtgaactgggtggccgagaaggaatgggagttgccgccagattctgacatggatctgaatctgattgagcaggcacccctgaccgtggccgagaagctgcatcgctggcgtaatagcgaagaggcccgcaccgatcgcccttcccaacagttgcgcagcctgaatggcgaatggcgattccgttgcaatggctggcggtaatattgttctggatattaccagcaaggccgatagtttgagttcttctactcaggcaagtgatgttattactaatcaaagaagtattgcgacaacggttaatttgcgtgatggacagactcttttactcggtggcctcactgattataaaaacacttctcaggattctggcgtaccgttcctgtctaaaatccctttaatcggcctcctgtttagctcccgctctgattctaacgaggaaagcacgttatacgtgctcgtcaaagcaaccatagtacgcgccctgtagcggcgcattaagcgcggcgggtgtggtggttacgcgcagcgtgaccgctacacttgccagcgccctagcgcccgctcctttcgctttcttcccttcctttctcgccacgttcgccggctttccccgtcaagctctaaatcgggggctccctttagggttccgatttagtgctttacggcacctcgaccccaaaaaacttgattagggtgatggttcacgtagtgggccatcgccctgatagacggtttttcgccctttgacgttggagtccacgttctttaatagtggactcttgttccaaactggaacaacactcaaccctatctcggtctattcttttgatttataagggattttgccgatttcggcctattggttaaaaaatgagctgatttaacaaaaatttaacgcgaattttaacaaaatattaacgtttacaatttaaatatttgcttatacaatcttcctgtttttggggcttttctgattatcaaccggggtacatatgattgacatgctagttttacgattaccgttcatcgattctcttgtttgctccagactctcaggcaatgacctgatagcctttgtagagacctctcaaaaatagctaccctctccggcatgaatttatcagctagaacggttgaatatcatattgatggtgatttgactgtctccggcctttctcacccgtttgaatctttacctacacattactcaggcattgcatttaaaatatatgagggttctaaaaatttttatccttgcgttgaaataaaggcttctcccgcaaaagtattacagggtcataatgtttttggtacaaccgatttagctttatgctctgaggctttattgcttaattttgctaattctttgccttgcctgtatgatttattggatgttggaattcctgatgcggtattttctccttacgcatctgtgcggtatttcacaccgcatatggtgcactctcagtacaatctgctctgatgccgcatagttaagccagccccgacacccgccaacacccgctgacgcgccctgacgggcttgtctgctcccggcatccgcttacagacaagctgtgaccgtctccgggagctgcatgtgtcagaggttttcaccgtcatcaccgaaacgcgcgagacgaaagggcctcgtgatacgcctatttttataggttaatgtcatgataataatggtttcttagacgtcaggtggcacttttcggggaaatgtgcgcggaacccctatttgtttatttttctaaatacattcaaatatgtatccgctcatgagacaataaccctgataaatgcttcaataatattgaaaaaggaagagtatgagtattcaacatttccgtgtcgcccttattcccttttttgcggcattttgccttcctgtttttgctcacccagaaacgctggtgaaagtaaaagatgctgaagatcagttgggtgcacgagtgggttacatcgaactggatctcaacagcggtaagatccttgagagttttcgccccgaagaacgttttccaatgatgagcacttttaaagttctgctatgtggcgcggtattatcccgtattgacgccgggcaagagcaactcggtcgccgcatacactattctcagaatgacttggttgagtactcaccagtcacagaaaagcatcttacggatggcatgacagtaagagaattatgcagtgctgccataaccatgagtgataacactgcggccaacttacttctgacaacgatcggaggaccgaaggagctaaccgcttttttgcacaacatgggggatcatgtaactcgccttgatcgttgggaaccggagctgaatgaagccataccaaacgacgagcgtgacaccacgatgcctgtagcaatggcaacaacgttgcgcaaactattaactggcgaactacttactctagcttcccggcaacaattaatagactggatggaggcggataaagttgcaggaccacttctgcgctcggcccttccggctggctggtttattgctgataaatctggagccggtgagcgtgggtctcgcggtatcattgcagcactggggccagatggtaagccctcccgtatcgtagttatctacacgacggggagtcaggcaactatggatgaacgaaatagacagatcgctgagataggtgcctcactgattaagcattggtaactgtcagaccaagtttactcatatatactttagattgatttaaaacttcatttttaatttaaaaggatctaggtgaagatcctttttgataatctcatgaccaaaatcccttaacgtgagttttcgttccactgagcgtcagaccccgtagaaaagatcaaaggatcttcttgagatcctttttttctgcgcgtaatctgctgcttgcaaacaaaaaaaccaccgctaccagcggtggtttgtttgccggatcaagagctaccaactctttttccgaaggtaactggcttcagcagagcgcagataccaaatactgtccttctagtgtagccgtagttaggccaccacttcaagaactctgtagcaccgcctacatacctcgctctgctaatcctgttaccagtggctgctgccagtggcgataagtcgtgtcttaccgggttggactcaagacgatagttaccggataaggcgcagcggtcgggctgaacggggggttcgtgcacacagcccagcttggagcgaacgacctacaccgaactgagatacctacagcgtgagctatgagaaagcgccacgcttcccgaagggagaaaggcggacaggtatccggtaagcggcagggtcggaacaggagagcgcacgagggagcttccagggggaaacgcctggtatctttatagtcctgtcgggtttcgccacctctgacttgagcgtcgatttttgtgatgctcgtcaggggggcggagcctatggaaaaacgccagcaacgcggcctttttacggttcctggccttttgctggccttttgctcacatgttctttcctgcgttatcccctgattctgtggataaccgtattaccgcctttgagtgagctgataccgctcgccgcagccgaacgaccgagcgcagcgagtcagtgagcgaggaagcggaagagcgcccaatacgcaaaccgcctctccccgcgcgttggccgattcattaatgcagaattcc

SEQ ID NO: 912 - protein, 736 aa, Artificial Sequence
  source: /note="Description of Artificial Sequence: Synthetic polypeptide"
  VARIANT (168)..(168): /replace="Arg"
  VARIANT (204)..(204): /replace="Ser"
  VARIANT (266)..(266): /replace="Gly"
  VARIANT (311)..(311): /replace="Lys"
  VARIANT (411)..(411): /replace="Gln"
  VARIANT (460)..(460): /replace="Glu"
  VARIANT (493)..(493): /replace="Thr"
  VARIANT (562)..(562): /replace="Asn"
  VARIANT (576)..(576): /replace="Glu"
  VARIANT (587)..(587): /replace="Ala"
  VARIANT (609)..(609): /replace="Asp"
  SITE (1)..(736): /note="Variant residues given in the sequence have no preference with respect to those in the annotations for variant positions"
MAADGYLPDWLEDNLSEGIREWWDLKPGAPKPKANQQKQDDGRGLVLPGYKYLGPFNGLDKGEPVNAADAAALEHDKAYDQQLKAGDNPYLRYNHADAEFQERLQEDTSFGGNLGRAVFQAKKRVLEPLGLVEEGAKTAPGKKRPVEQSPQEPDSSSGIGKKGQQPAKKRLNFGQTGDSESVPDPQPLGEPPAAPSGVGSNTMAAGGGAPMADNNEGADGVGNASGNWHCDSTWLGDRVITTSTRTWALPTYNNHLYKQISSQSGASTNDNTYFGYSTPWGYFDFNRFHCHFSPRDWQRLINNNWGFRPKRLNFKLFNIQVKEVTTNDGTTTIANNLTSTVQVFTDSEYQLPYVLGSAHQGCLPPFPADVFMIPQYGYLTLNNGSQAVGRSSFYCLEYFPSQMLRTGNNFEFSYTFEDVPFHSSYAHSQSLDRLMNPLIDQYLYYLSRTQTTSGTAGNRTLQFSQAGPSSMANQAKNWLPGPCYRQQRVSKTANQNNNSNFAWTGATKYHLNGRDSLVNPGPAMATHKDDEDKFFPMSGVLIFGKQGAGNSNVDLDNVMITSEEEIKTTNPVATEQYGTVATNLQSSNTAPATGTVNSQGALPGMVWQNRDVYLQGPIWAKIPHTDGHFHPSPLMGGFGLKHPPPQILIKNTPVPANPPTTFSPAKFASFITQYSTGQVSVEIEWELQKENSKRWNPEIQYTSNYNKSTNVDFAVDTNGVYSEPRPIGTRYLTRNL

SEQ ID NO: 913 - DNA, 2208 bp, Artificial Sequence
  source: /note="Description of Artificial Sequence: Synthetic polynucleotide"
  variation (502)..(504): /replace="agg"
  variation (610)..(612): /replace="agc"
  variation (796)..(798): /replace="ggc"
  variation (931)..(933): /replace="aag"
  variation (1231)..(1233): /replace="cag"
  variation (1378)..(1380): /replace="gag"
  variation (1477)..(1479): /replace="acc"
  variation (1684)..(1686): /replace="aac"
  variation (1726)..(1728): /replace="gag"
  variation (1759)..(1761): /replace="gcc"
  variation (1825)..(1827): /replace="gac"
  misc_feature (1)..(2208): /note="Variant nucleotides given in the sequence have no preference with respect to those in the annotations for variant positions"
atggctgccgatggttatcttccagattggctcgaggacaacctctctgagggcattcgcgagtggtgggacttgaaacctggagccccgaaacccaaagccaaccagcaaaagcaggacgacggccggggtctggtgcttcctggctacaagtacctcggacccttcaacggactcgacaagggggagcccgtcaacgcggcggacgcagcggccctcgagcacgacaaggcctacgaccagcagctcaaagcgggtgacaatccgtacctgcggtataaccacgccgacgccgagtttcaggagcgtctgcaagaagatacgtcttttgggggcaacctcgggcgagcagtcttccaggccaagaagcgggttctcgaacctctcggtctggttgaggaaggcgctaagacggctcctggaaagaagagaccggtagagcaatcaccccaggaaccagactcctcttcgggcatcggcaagaaaggccagcagcccgcgaagaagagactcaactttgggcagacaggcgactcagagtcagtgcccgaccctcaaccactcggagaaccccccgcagccccctctggtgtgggatctaatacaatggcagcaggcggtggcgctccaatggcagacaataacgaaggcgccgacggagtgggtaacgcctcaggaaattggcattgcgattccacatggctgggcgacagagtcatcaccaccagcacccgaacctgggccctccccacctacaacaaccacctctacaagcaaatctccagccaatcgggagcaagcaccaacgacaacacctacttcggctacagcaccccctgggggtattttgactttaacagattccactgccacttctcaccacgtgactggcagcgactcatcaacaacaactggggattccggcccaagagactcaacttcaagctcttcaacatccaggtcaaggaggtcacgacgaatgatggcaccacgaccatcgccaataaccttaccagcacggttcaggtctttacggactcggaataccagctcccgtacgtcctcggctctgcgcaccagggctgcctgcctccgttcccggcggacgtcttcatgattcctcagtacgggtacctgactctgaacaatggcagtcaggccgtgggccgttcctccttctactgcctggagtactttccttctcaaatgctgagaacgggcaacaactttgagttcagctacacgtttgaggacgtgccttttcacagcagctacgcgcacagccaaagcctggaccggctgatgaaccccctcatcgaccagtacctgtactacctgtctcggactcagaccacgagtggtaccgcaggaaatcggacgttgcaattttctcaggccgggcctagtagcatggcgaatcaggccaaaaactggctacccgggccctgctaccggcagcaacgcgtctccaagacagcgaatcaaaataacaacagcaactttgcctggaccggtgccaccaagtatcatctgaatggcagagactctctggtaaatcccggtcccgctatggcaacccacaaggacgacgaagacaaattttttccgatgagcggagtcttaatatttgggaaacagggagctggaaatagcaacgtggaccttgacaacgttatgataaccagtgaggaagaaattaaaaccaccaacccagtggccacagaacagtacggcacggtggccactaacctgcaatcgtcaaacaccgctcctgctacagggaccgtcaacagtcaaggagccttacctggcatggtctggcagaaccgggacgtgtacctgcagggtcctatctgggccaagattcctcacacggacggacactttcatccctcgccgctgatgggaggctttggactgaaacacccgcctcctcagatcctgattaagaatacacctgttcccgcgaatcctccaactaccttcagtccagctaagtttgcgtcgttcatcacgcagtacagcaccggacaggtcagcgtggaaattgaatgggagctgcagaaagaaaacagcaaacgctggaacccagagattcaatacacttccaactacaacaaatctacaaatgtggactttgctgttgacacaaatggcgtttattctgagcctcgccccatcggcacccgttacctcacccgtaatctg

SEQ ID NO: 914 - protein, 737 aa, Artificial Sequence
  source: /note="Description of Artificial Sequence: Synthetic polypeptide"
  VARIANT (157)..(157): /replace="Ser"
  VARIANT (168)..(168): /replace="Arg"
  VARIANT (262)..(262): /replace="Ser"
  VARIANT (263)..(263): /replace="His"
  VARIANT (312)..(312): /replace="Lys"
  VARIANT (412)..(412): /replace="Gln"
  VARIANT (460)..(460): /replace="Gln"
  VARIANT (461)..(461): /replace="Glu"
  VARIANT (552)..(552): /replace="Ser"
  VARIANT (556)..(556): /replace="Tyr"
  VARIANT (557)..(557): /replace="Ser"
  VARIANT (563)..(563): /replace="Asn"
  VARIANT (580)..(580): /replace="Ile"
  VARIANT (588)..(588): /replace="Ser"
  VARIANT (664)..(664): /replace="Thr"
  SITE (1)..(737): /note="Variant residues given in the sequence have no preference with respect to those in the annotations for variant positions"
MAADGYLPDWLEDNLSEGIREWWDLKPGAPKPKANQQKQDDGRGLVLPGYKYLGPFNGLDKGEPVNAADAAALEHDKAYDQQLKAGDNPYLRYNHADAEFQERLQEDTSFGGNLGRAVFQAKKRVLEPLGLVEEGAKTAPGKKRPVEQSPQEPDSSTGIGKKGQQPAKKRLNFGQTGDSESVPDPQPLGEPPAAPSGVGSNTMAAGGGAPMADNNEGADGVGNASGNWHCDSTWLGDRVITTSTRTWALPTYNNHLYKQISNSQSGGSTNDNTYFGYSTPWGYFDFNRFHCHFSPRDWQRLINNNWGFRPKRLNFKLFNIQVKEVTTNDGTTTIANNLTSTVQVFTDSEYQLPYVLGSAHQGCLPPFPADVFMIPQYGYLTLNNGSQAVGRSSFYCLEYFPSQMLRTGNNFEFSYTFEDVPFHSSYAHSQSLDRLMNPLIDQYLYYLSRTQTTGGTAGNRTLQFSQAGPSSMANQAKNWLPGPCYRQQRVSKTTNQNNNSNFAWTGATKYHLNGRDSLVNPGVAMATHKDDEDRFFPSSGVLIFGKQGAGNDNVDLDNVMITSEEEIKTTNPVATEEYGVVATNLQSANTAPQTGTVNSQGALPGMVWQNRDVYLQGPIWAKIPHTDGNFHPSPLMGGFGLKHPPPQILIKNTPVPANPPTTFSPAKFASFITQYSTGQVSVEIEWELQKENSKRWNPEIQYTSNYNKSTNVDFAVDTEGVYSEPRPIGTRYLTRNL

SEQ ID NO: 915 - DNA, 2211 bp, Artificial Sequence
  source: /note="Description of Artificial Sequence: Synthetic polynucleotide"
  variation (469)..(471): /replace="agc"
  variation (502)..(504): /replace="aga"
  variation (784)..(786): /replace="agt"
  variation (787)..(789): /replace="cac"
  variation (934)..(936): /replace="aag"
  variation (1234)..(1236): /replace="cag"
  variation (1378)..(1380): /replace="cag"
  variation (1381)..(1383): /replace="gag"
  variation (1654)..(1656): /replace="agc"
  variation (1666)..(1668): /replace="tac"
  variation (1669)..(1671): /replace="agc"
  variation (1687)..(1689): /replace="aac"
  variation (1738)..(1740): /replace="atc"
  variation (1762)..(1764): /replace="agc"
  variation (1990)..(1992): /replace="acc"
  misc_feature (1)..(2211): /note="Variant nucleotides given in the sequence have no preference with respect to those in the annotations for variant positions"
atggctgccgatggttatcttccagattggctcgaggacaacctctctgagggcattcgcgagtggtgggacttgaaacctggagccccgaaacccaaagccaaccagcaaaagcaggacgacggccggggtctggtgcttcctggctacaagtacctcggacccttcaacggactcgacaagggggagcccgtcaacgcggcggacgcagcggccctcgagcacgacaaggcctacgaccagcagctcaaagcgggtgacaatccgtacctgcggtataaccacgccgacgccgagtttcaggagcgtctgcaagaagatacgtcttttgggggcaacctcgggcgagcagtcttccaggccaagaagcgggttctcgaacctctcggtctggttgaggaaggcgctaagacggctcctggaaagaagagaccggtagagcaatcaccccaggaaccagactcctctacgggcatcggcaagaaaggccagcagcccgcgaaaaagagactcaactttgggcagactggcgactcagagtcagtgcccgaccctcaaccactcggagaaccccccgcagccccctctggtgtgggatctaatacaatggctgcaggcggtggcgctccaatggcagacaataacgaaggcgccgacggagtgggtaatgcctcaggaaattggcattgcgattccacatggctgggcgacagagtcatcaccaccagcacccgaacctgggccctccccacctacaacaaccacctctacaagcaaatctccaacagccaatcgggaggaagcaccaacgacaacacctacttcggctacagcaccccctgggggtattttgactttaacagattccactgccacttctcaccacgtgactggcagcgactcatcaacaacaactggggattccggcccaagagactcaacttcaagctcttcaacatccaggtcaaggaggtcacgacgaatgatggcaccacgaccatcgccaataaccttaccagcacggttcaggtctttacggactcggaataccagctcccgtacgtcctcggctctgcgcaccagggctgcctgcctccgttcccggcggacgtcttcatgattcctcagtacgggtacctgactctgaacaatggcagtcaggccgtgggccgttcctccttctactgcctggagtactttccttctcaaatgctgagaacgggcaacaactttgagttcagctacacgtttgaggacgtgccttttcacagcagctacgcgcacagccaaagcctggaccggctgatgaaccccctcatcgaccagtacctgtactacctgtctcggactcagaccacgggaggtaccgcaggaaatcggacgttgcaattttctcaggccgggcctagtagcatggcgaatcaggccaaaaactggctacccgggccctgctaccggcagcaacgcgtctccaagacaacgaatcaaaataacaacagcaactttgcctggaccggtgccaccaagtatcatctgaatggcagagactctctggtaaatcccggtgtcgctatggcaacccacaaggacgacgaagaccgattttttccgtccagcggagtcttaatatttgggaaacagggagctggaaatgacaacgtggaccttgacaacgttatgataaccagtgaggaagaaattaaaaccaccaacccagtggccacagaagagtacggcgtggtggccactaacctgcaatcggcaaacaccgctcctcaaacagggaccgtcaacagtcaaggagccttacctggcatggtctggcagaaccgggacgtgtacctgcagggtcctatctgggccaagattcctcacacggacggaaactttcatccctcgccgctgatgggaggctttggactgaaacacccgcctcctcagatcctgattaagaatacacctgttcccgcgaatcctccaactaccttcagtccagctaagtttgcgtcgttcatcacgcagtacagcaccggacaggtcagcgtggaaattgaatgggagctgcagaaagaaaacagcaaacgctggaacccagagattcaatacacttccaactacaacaaatctacaaatgtggactttgctgttgacacagaaggcgtttattctgagcctcgccccatcggcacccgttacctcacccgtaatctg

SEQ ID NO: 916 - protein, 738 aa, Artificial Sequence
  source: /note="Description of Artificial Sequence: Synthetic polypeptide"
  VARIANT (158)..(158): /replace="Ser"
  VARIANT (169)..(169): /replace="Arg"
  VARIANT (564)..(564): /replace="Asn"
  SITE (1)..(738): /note="Variant residues given in the sequence have no preference with respect to those in the annotations for variant positions"
MAADGYLPDWLEDNLSEGIREWWDLKPGAPKPKANQQKQDDGRGLVLPGYKYLGPFNGLDKGEPVNAADAAALEHDKAYDQQLKAGDNPYLRYNHADAEFQERLQEDTSFGGNLGRAVFQAKKRVLEPLGLVEEGAKTAPGKKRPVEQSPQREPDSSTGIGKKGQQPAKKRLNFGQTGDSESVPDPQPLGEPPAAPSGVGSNTMAAGGGAPMADNNEGADGVGNSSGNWHCDSTWLGDRVITTSTRTWALPTYNNHLYKQISNGTSGGSTNDNTYFGYSTPWGYFDFNRFHCHFSPRDWQRLINNNWGFRPKRLNFKLFNIQVKEVTTNEGTKTIANNLTSTVQVFTDSEYQLPYVLGSAHQGCLPPFPADVFMIPQYGYLTLNNGSQAVGRSSFYCLEYFPSQMLRTGNNFQFSYTFEDVPFHSSYAHSQSLDRLMNPLIDQYLYYLSRTQTTGGTAGTQTLQFSQAGPSSMANQAKNWLPGPCYRQQRVSTTTNQNNNSNFAWTGATKYHLNGRDSLVNPGVAMATHKDDEDRFFPSSGVLIFGKQGAGNDNVDYSNVMITSEEEIKTTNPVATEEYGVVATNLQSANTAPQTGTVNSQGALPGMVWQNRDVYLQGPIWAKIPHTDGNFHPSPLMGGFGLKHPPPQILIKNTPVPADPPTTFNQAKLNSFITQYSTGQVSVEIEWELQKENSKRWNPEIQYTSNYYKSTNVDFAVNTEGVYSEPRPIGTRYLTRNL

SEQ ID NO: 917 - DNA, 2214 bp, Artificial Sequence
  source: /note="Description of Artificial Sequence: Synthetic polynucleotide"
  variation (472)..(474): /replace="agc"
  variation (505)..(507): /replace="aga"
  variation (1690)..(1692): /replace="aac"
  misc_feature (1)..(2214): /note="Variant nucleotides given in the sequence have no preference with respect to those in the annotations for variant positions"
atggctgccgatggttatcttccagattggctcgaggacaacctctctgagggcattcgcgagtggtgggacctgaaacctggagccccgaaacccaaagccaaccagcaaaagcaggacgacggccggggtctggtgcttcctggctacaagtacctcggacccttcaacggactcgacaagggggagcccgtcaacgcggcggacgcagcggccctcgagcacgacaaggcctacgaccagcagctcaaagcgggtgacaatccgtacctgcggtataatcacgccgacgccgagtttcaggagcgtctgcaagaagatacgtcttttgggggcaacctcgggcgagcagtcttccaggccaagaagcgggttctcgaacctctcggtctggttgaggaaggcgctaagacggctcctggaaagaagagaccggtagagcagtcaccacagcgtgagcccgactcctccacgggcatcggcaagaaaggccagcagcccgccaaaaagagactcaatttcggtcagactggcgactcagagtcagtccccgaccctcaacctctcggagaacctccagcagcgccctctggtgtgggatctaatacaatggctgcaggcggtggcgcaccaatggcagacaataacgaaggtgccgacggagtgggtaattcctcgggaaattggcattgcgattccacatggctgggcgacagagtcatcaccaccagcacccgaacctgggccctgcccacctacaacaaccacctctacaagcaaatctccaacgggacctcgggaggcagcaccaacgacaacacctactttggctacagcaccccctgggggtattttgactttaacagattccactgccacttctcaccacgtgactggcagcgactcatcaacaacaactggggattccggcccaagagactcaacttcaagctcttcaacatccaggtcaaagaggtcacgacgaatgaaggcaccaagaccatcgccaataacctcaccagcaccgtccaggtgtttacggactcggaataccagctgccgtacgtcctcggctctgcccaccagggctgcctgcctccgttcccggcggacgtcttcatgattcctcagtacggctacctgactctcaacaacggtagtcaggccgtgggacgttcctccttctactgcctggagtacttcccctctcagatgctgagaacgggcaacaactttcaattcagctacactttcgaggacgtgcctttccacagcagctacgcgcacagccagagtttggacaggctgatgaatcctctcatcgaccagtacctgtactacctgtcaagaacccagactacgggaggcacagcgggaacccagacgttgcagttttctcaggccgggcctagcagcatggcgaatcaggccaaaaactggctgcctggaccctgctacagacagcagcgcgtctccacgacaacgaatcaaaacaacaacagcaactttgcctggactggtgccaccaagtatcatctgaacggcagagactctctggtgaatccgggcgtcgccatggcaacccacaaggacgacgaggaccgcttcttcccatccagcggcgtcctcatatttggcaagcagggagctggaaatgacaacgtggactatagcaacgtgatgataaccagcgaggaagaaatcaagaccaccaaccccgtggccacagaagagtatggcgtggtggctactaacctacagtcggcaaacaccgctcctcaaacggggaccgtcaacagccagggagccttacctggcatggtctggcagaaccgggacgtgtacctgcagggtcctatttgggccaagattcctcacacagatggcaactttcacccgtctcctttaatgggcggctttggacttaaacatccgcctcctcagatcctcatcaaaaacactcctgttcctgcggatcctccaacaacgttcaaccaggccaagctgaattctttcatcacgcagtacagcaccggacaagtcagcgtggagatcgagtgggagctgcagaaggagaacagcaagcgctggaacccagagattcagtatacttccaactactacaaatctacaaatgtggactttgctgttaatactgagggtgtttactctgagcctcgccccattggcactcgttacctcacccgtaatctg

SEQ ID NO: 918 - protein, 738 aa, Artificial Sequence
  source: /note="Description of Artificial Sequence: Synthetic polypeptide"
  VARIANT (158)..(158): /replace="Ser"
  VARIANT (169)..(169): /replace="Lys"
  VARIANT (315)..(315): /replace="Ser"
  VARIANT (413)..(413): /replace="Glu"
  VARIANT (472)..(472): /replace="Thr" or "Ser"
  VARIANT (534)..(534): /replace="Glu"
  VARIANT (542)..(542): /replace="Val"
  VARIANT (595)..(595): /replace="Val"
  SITE (1)..(738): /note="Variant residues given in the sequence have no preference with respect to those in the annotations for variant positions"
MAADGYLPDWLEDNLSEGIREWWDLKPGAPKPKANQQKQDDGRGLVLPGYKYLGPFNGLDKGEPVNAADAAALEHDKAYDQQLKAGDNPYLRYNHADAEFQERLQEDTSFGGNLGRAVFQAKKRVLEPLGLVEEGAKTAPGKKRPVEQSPQREPDSSTGIGKKGQQPARKRLNFGQTGDSESVPDPQPLGEPPAAPSGVGSNTMAAGGGAPMADNNEGADGVGSSSGNWHCDSTWLGDRVITTSTRTWALPTYNNHLYKQISNGTSGGSTNDNTYFGYSTPWGYFDFNRFHCHFSPRDWQRLINNNWGFRPKRLNFKLFNIQVKEVTQNEGTKTIANNLTSTIQVFTDSEYQLPYVLGSAHQGCLPPFPADVFMIPQYGYLTLNNGSQAVGRSSFYCLEYFPSQMLRTGNNFQFSYTFEDVPFHSSYAHSQSLDRLMNPLIDQYLYYLSRTQTTGGTAGTQTLQFSQAGPSNMANQAKNWLPGPCYRQQRVSTTTSQNNNSNFAWTGATKYHLNGRDSLVNPGVAMATHKDDEDRFFPSSGILIFGKQGAGKDNVDYSNVMLTSEEEIKTTNPVATEEYGVVADNLQQQNTAPQIGTVNSQGALPGMVWQNRDVYLQGPIWAKIPHTDGNFHPSPLMGGFGLKHPPPQILIKNTPVPADPPTTFNQAKLNSFITQYSTGQVSVEIEWELQKENSKRWNPEIQYTSNYYKSTNVDFAVNTEGVYSEPRPIGTRYLTRNL

SEQ ID NO: 919 - DNA, 2214 bp, Artificial Sequence
  source: /note="Description of Artificial Sequence: Synthetic polynucleotide"
  variation (472)..(474): /replace="agc"
  variation (505)..(507): /replace="aag"
  variation (943)..(945): /replace="agc"
  variation (1237)..(1239): /replace="gaa"
  variation (1414)..(1416): /replace="aac" or "agc"
  variation (1600)..(1602): /replace="gag"
  variation (1624)..(1626): /replace="gtc"
  variation (1783)..(1785): /replace="gta"
  misc_feature (1)..(2214): /note="Variant nucleotides given in the sequence have no preference with respect to those in the annotations for variant positions"
atggctgccgatggttatcttccagattggctcgaggacaacctctctgagggcattcgcgagtggtgggacctgaaacctggagccccgaaacccaaagccaaccagcaaaagcaggacgacggccggggtctggtgcttcctggctacaagtacctcggacccttcaacggactcgacaagggggagcccgtcaacgcggcggacgcagcggccctcgagcacgacaaggcctacgaccagcagctcaaagcgggtgacaatccgtacctgcggtataatcacgccgacgccgagtttcaggagcgtctgcaagaagatacgtcttttgggggcaacctcgggcgagcagtcttccaggccaagaagcgggttctcgaacctctcggtctggttgaggaaggcgctaagacggctcctggaaagaagagaccggtagagcagtcaccacagcgtgagcccgactcctccacgggcatcggcaagaaaggccagcagcccgccagaaagagactcaatttcggtcagactggcgactcagagtcagtccccgaccctcaacctctcggagaacctccagcagcgccctctggtgtgggatctaatacaatggctgcaggcggtggcgcaccaatggcagacaataacgaaggtgccgacggagtgggtagttcctcgggaaattggcattgcgattccacatggctgggcgacagagtcatcaccaccagcacccgaacctgggccctgcccacctacaacaaccacctctacaagcaaatctccaacgggacctcgggaggcagcaccaacgacaacacctactttggctacagcaccccctgggggtattttgactttaacagattccactgccacttctcaccacgtgactggcagcgactcatcaacaacaactggggattccggcccaagagactcaacttcaagctcttcaacatccaggtcaaagaggtcacgcagaatgaaggcaccaagaccatcgccaataacctcaccagcaccatccaggtgtttacggactcggaataccagctgccgtacgtcctcggctctgcccaccagggctgcctgcctccgttcccggcggacgtcttcatgattcctcagtacggctacctgactctcaacaacggtagtcaggccgtgggacgttcctccttctactgcctggagtacttcccctctcagatgctgagaacgggcaacaactttcaattcagctacactttcgaggacgtgcctttccacagcagctacgcgcacagccagagtttggacaggctgatgaatcctctcatcgaccagtacctgtactacctgtcaagaacccagactacgggaggcacagcgggaacccagacgttgcagttttctcaggccgggcctagcaccatggcgaatcaggccaaaaactggctgcctggaccctgctacagacagcagcgcgtctccacgacaacgtcgcaaaacaacaacagcaactttgcctggactggtgccaccaagtatcatctgaacggcagagactctctggtgaatccgggcgtcgccatggcaacccacaaggacgacgaggaccgcttcttcccatccagcggcatcctcatatttggcaagcagggagctggaaaagacaacgtggactatagcaacgtgatgctaaccagcgaggaagaaatcaagaccaccaaccccgtggccacagaagagtatggcgtggtggctgataacctacagcagcaaaacaccgctcctcaaatagggaccgtcaacagccagggagccttacctggcatggtctggcagaaccgggacgtgtacctgcagggtcctatttgggccaagattcctcacacagatggcaactttcacccgtctcctttaatgggcggctttggacttaaacatccgcctcctcagatcctcatcaaaaacactcctgttcctgcggatcctccaacaacgttcaaccaggccaagctgaattctttcatcacgcagtacagcaccggacaagtcagcgtggagatcgagtgggagctgcagaaggagaacagcaagcgctggaacccagagattcagtatacttccaactactacaaatctacaaatgtggactttgctgttaatactgagggtgtttactctgagcctcgccccattggcactcgttacctcacccgtaatctg

SEQ ID NO: 920 - protein, 738 aa, Artificial Sequence
  source: /note="Description of Artificial Sequence: Synthetic polypeptide"
  VARIANT (169)..(169): /replace="Lys"
  VARIANT (315)..(315): /replace="Ser"
  VARIANT (534)..(534): /replace="Glu"
  VARIANT (542)..(542): /replace="Val"
  SITE (1)..(738): /note="Variant residues given in the sequence have no preference with respect to those in the annotations for variant positions"
MAADGYLPDWLEDNLSEGIREWWDLKPGAPKPKANQQKQDDGRGLVLPGYKYLGPFNGLDKGEPVNAADAAALEHDKAYDQQLKAGDNPYLRYNHADAEFQERLQEDTSFGGNLGRAVFQAKKRVLEPLGLVEEGAKTAPGKKRPVEPSPQRSPDSSTGIGKKGQQPARKRLNFGQTGDSESVPDPQPIGEPPAAPSGVGSGTMAAGGGAPMADNNEGADGVGSSSGNWHCDSTWLGDRVITTSTRTWALPTYNNHLYKQISNGTSGGSTNDNTYFGYSTPWGYFDFNRFHCHFSPRDWQRLINNNWGFRPKRLNFKLFNIQVKEVTQNEGTKTIANNLTSTIQVFTDSEYQLPYVLGSAHQGCLPPFPADVFMIPQYGYLTLNNGSQAVGRSSFYCLEYFPSQMLRTGNNFEFSYTFEDVPFHSSYAHSQSLDRLMNPLIDQYLYYLSRTQSTGGTAGTQQLLFSQAGPSNMSAQAKNWLPGPCYRQQRVSTTLSQNNNSNFAWTGATKYHLNGRDSLVNPGVAMATHKDDEDRFFPSSGILMFGKQGAGKDNVDYSNVMLTSEEEIKTTNPVATEQYGVVADNLQQQNTAPIVGAVNSQGALPGMVWQNRDVYLQGPIWAKIPHTDGNFHPSPLMGGFGLKHPPPQILIKNTPVPADPPTTFNQAKLNSFITQYSTGQVSVEIEWELQKENSKRWNPEIQYTSNYYKSTNVDFAVNTEGVYSEPRPIGTRYLTRNL

SEQ ID NO: 921 - DNA, 2214 bp, Artificial Sequence
  source: /note="Description of Artificial Sequence: Synthetic polynucleotide"
  variation (505)..(507): /replace="aaa"
  variation (943)..(945): /replace="agc"
  variation (1600)..(1602): /replace="gag"
  variation (1624)..(1626): /replace="gtc"
  misc_feature (1)..(2214): /note="Variant nucleotides given in the sequence have no preference with respect to those in the annotations for variant positions"
atggctgccgatggttatcttccagattggctcgaggacaacctctctgagggcattcgcgagtggtgggacctgaaacctggagccccgaaacccaaagccaaccagcaaaagcaggacgacggccggggtctggtgcttcctggctacaagtacctcggacccttcaacggactcgacaagggggagcccgtcaacgcggcggacgcagcggccctcgagcacgacaaggcctacgaccagcagctcaaagcgggtgacaatccgtacctgcggtataatcacgccgacgccgagtttcaggagcgtctgcaagaagatacgtcttttgggggcaacctcgggcgagcagtcttccaggccaagaagcgggttctcgaacctctcggtctggttgaggaaggcgctaagacggctcctggaaagaagagaccggtagagccgtcaccacagcgttcccccgactcctccacgggcatcggcaagaaaggccagcagcccgccagaaagagactcaatttcggtcagactggcgactcagagtcagtccccgaccctcaacctatcggagaacctccagcagcgccctctggtgtgggatctggtacaatggctgcaggcggtggcgcaccaatggcagacaataacgaaggtgccgacggagtgggtagttcctcgggaaattggcattgcgattccacatggctgggcgacagagtcatcaccaccagcacccgaacctgggccctgcccacctacaacaaccacctctacaagcaaatctccaacgggacctcgggaggcagcaccaacgacaacacctactttggctacagcaccccctgggggtattttgactttaacagattccactgccacttctcaccacgtgactggcagcgactcatcaacaacaactggggattccggcccaagagactcaacttcaagctcttcaacatccaggtcaaagaggtcacgcagaatgaaggcaccaagaccatcgccaataacctcaccagcaccatccaggtgtttacggactcggaataccagctgccgtacgtcctcggctctgcccaccagggctgcctgcctccgttcccggcggacgtcttcatgattcctcagtacggctacctgactctcaacaacggtagtcaggccgtgggacgttcctccttctactgcctggagtacttcccctctcagatgctgagaacgggcaacaactttgagttcagctacactttcgaggacgtgcctttccacagcagctacgcgcacagccagagtttggacaggctgatgaatcctctcatcgaccagtacctgtactacctgtcaagaacccagtctacgggaggcacagcgggaacccagcagttgctgttttctcaggccgggcctagcaacatgtcggctcaggccaaaaactggctgcctggaccctgctacagacagcagcgcgtctccacgacactgtcgcaaaacaacaacagcaactttgcctggactggtgccaccaagtatcatctgaacggcagagactctctggtgaatccgggcgtcgccatggcaacccacaaggacgacgaggaccgcttcttcccatccagcggcatcctcatgtttggcaagcagggagctggaaaagacaacgtggactatagcaacgtgatgctaaccagcgaggaagaaatcaagaccaccaaccccgtggccacagaacagtatggcgtggtggctgataacctacagcagcaaaacaccgctcctattgtgggggccgtcaacagccagggagccttacctggcatggtctggcagaaccgggacgtgtacctgcagggtcctatttgggccaagattcctcacacagatggcaactttcacccgtctcctttaatgggcggctttggacttaaacatccgcctcctcagatcctcatcaaaaacactcctgttcctgcggatcctccaacaacgttcaaccaggccaagctgaattctttcatcacgcagtacagcaccggacaagtcagcgtggagatcgagtgggagctgcagaaggagaacagcaagcgctggaacccagagattcagtatacttccaactactacaaatctacaaatgtggactttgctgttaatactgagggtgtttactctgagcctcgccccattggcactcgttacctcacccgtaatctg

SEQ ID NO: 922 - protein, 738 aa, Artificial Sequence
  source: /note="Description of Artificial Sequence: Synthetic polypeptide"
  VARIANT (471)..(471): /replace="Asn"
  SITE (1)..(738): /note="Variant residues given in the sequence have no preference with respect to those in the annotations for variant positions"
MAADGYLPDWLEDNLSEGIREWWDLKPGAPKPKANQQKQDDGRGLVLPGYKYLGPFNGLDKGEPVNAADAAALEHDKAYDQQLKAGDNPYLRYNHADAEFQERLQEDTSFGGNLGRAVFQAKKRVLEPLGLVEEGAKTAPGKKRPVEPSPQRSPDSSTGIGKKGQQPAKKRLNFGQTGDSESVPDPQPIGEPPAGPSGLGSGTMAAGGGAPMADNNEGADGVGSSSGNWHCDSTWLGDRVITTSTRTWALPTYNNHLYKQISNGTSGGSTNDNTYFGYSTPWGYFDFNRFHCHFSPRDWQRLINNNWGFRPKRLNFKLFNIQVKEVTQNEGTKTIANNLTSTIQVFTDSEYQLPYVLGSAHQGCLPPFPADVFMIPQYGYLTLNNGSQAVGRSSFYCLEYFPSQMLRTGNNFEFSYTFEDVPFHSSYAHSQSLDRLMNPLIDQYLYYLSRTQSTGGTAGTQQLLFSQAGPSNMSAQAKNWLPGPCYRQQRVSTTLSQNNNSNFAWTGATKYHLNGRDSLVNPGVAMATHKDDEERFFPSSGVLMFGKQGAGKDNVDYSSVMLTSEEEIKTTNPVATEQYGVVADNLQQQNTAPIVGAVNSQGALPGMVWQNRDVYLQGPIWAKIPHTDGNFHPSPLMGGFGLKHPPPQILIKNTPVPADPPTTFSQAKLASFITQYSTGQVSVEIEWELQKENSKRWNPEIQYTSNYYKSTNVDFAVNTEGTYSEPRPIGTRYLTRNL

SEQ ID NO: 923 - DNA, 2214 bp, Artificial Sequence
  source: /note="Description of Artificial Sequence: Synthetic polynucleotide"
  variation (1411)..(1413): /replace="aat"
  misc_feature (1)..(2214): /note="Variant nucleotides given in the sequence have no preference with respect to those in the annotations for variant positions"
atggctgccgatggttatcttccagattggctcgaggacaacctctctgagggcattcgcgagtggtgggacttgaaacctggagccccgaaacccaaagccaaccagcaaaagcaggacgacggccggggtctggtgcttcctggctacaagtacctcggacccttcaacggactcgacaagggggagcccgtcaacgcggcggacgcagcggccctcgagcacgacaaggcctacgaccagcagctcaaagcgggtgacaatccgtacctgcggtataaccacgccgacgccgagtttcaggagcgtctgcaagaagatacgtcttttgggggcaacctcgggcgagcagtcttccaggccaagaagcgggttctcgaacctctcggtctggttgaggaaggcgctaagacggctcctggaaagaagagaccggtagagccatcaccccagcgttctccagactcctctacgggcatcggcaagaaaggccagcagcccgcgaaaaagagactcaactttgggcagactggcgactcagagtcagtgcccgaccctcaaccaatcggagaaccccccgcaggcccctctggtctgggatctggtacaatggctgcaggcggtggcgctccaatggcagacaataacgaaggcgccgacggagtgggtagttcctcaggaaattggcattgcgattccacatggctgggcgacagagtcatcaccaccagcacccgaacctgggccctccccacctacaacaaccacctctacaagcaaatctccaacgggacttcgggaggaagcaccaacgacaacacctacttcggctacagcaccccctgggggtattttgactttaacagattccactgccacttctcaccacgtgactggcagcgactcatcaacaacaactggggattccggcccaagagactcaacttcaagctcttcaacatccaggtcaaggaggtcacgcagaatgaaggcaccaagaccatcgccaataaccttaccagcacgattcaggtctttacggactcggaataccagctcccgtacgtcctcggctctgcgcaccagggctgcctgcctccgttcccggcggacgtcttcatgattcctcagtacgggtacctgactctgaacaatggcagtcaggccgtgggccgttcctccttctactgcctggagtactttccttctcaaatgctgagaacgggcaacaactttgagttcagctacacgtttgaggacgtgccttttcacagcagctacgcgcacagccaaagcctggaccggctgatgaaccccctcatcgaccagtacctgtactacctgtctcggactcagtccacgggaggtaccgcaggaactcagcagttgctattttctcaggccgggcctagtaacatgtcggctcaggccaaaaactggctacccgggccctgctaccggcagcaacgcgtctccacgacactgtcgcaaaataacaacagcaactttgcctggaccggtgccaccaagtatcatctgaatggcagagactctctggtaaatcccggtgtcgctatggcaacccacaaggacgacgaagagcgattttttccgtccagcggagtcttaatgtttgggaaacagggagctggaaaagacaacgtggactatagcagcgttatgctaaccagtgaggaagaaattaaaaccaccaacccagtggccacagaacagtacggcgtggtggccgataacctgcaacagcaaaacaccgctcctattgtaggggccgtcaacagtcaaggagccttacctggcatggtctggcagaaccgggacgtgtacctgcagggtcctatctgggccaagattcctcacacggacggaaactttcatccctcgccgctgatgggaggctttggactgaaacacccgcctcctcagatcctgattaagaatacacctgttcccgcggatcctccaactaccttcagtcaagctaagctggcgtcgttcatcacgcagtacagcaccggacaggtcagcgtggaaattgaatgggagctgcagaaagaaaacagcaaacgctggaacccagagattcaatacacttccaactactacaaatctacaaatgtggactttgctgttaacacagaaggcacttattctgagcctcgccccatcggcacccgttacctcacccgtaatctg

SEQ ID NO: 924 - protein, 737 aa, Artificial Sequence
  source: /note="Description of Artificial Sequence: Synthetic polypeptide"
  VARIANT (148)..(148): /replace="Gln"
  VARIANT (169)..(169): /replace="Arg"
  VARIANT (314)..(314): /replace="Asn"
  VARIANT (466)..(466): /replace="His"
  VARIANT (563)..(563): /replace="Ser"
  VARIANT (580)..(580): /replace="Ile"
  VARIANT (588)..(588): /replace="Ser"
  SITE (1)..(737): /note="Variant residues given in the sequence have no preference with respect to those in the annotations for variant positions"
MAADGYLPDWLEDNLSEGIREWWDLKPGAPKPKANQQKQDDGRGLVLPGYKYLGPFNGLDKGEPVNAADAAALEHDKAYDQQLKAGDNPYLRYNHADAEFQERLQEDTSFGGNLGRAVFQAKKRVLEPLGLVEEGAKTAPGKKRPVEPSPQRSPDSSTGIGKKGQQPAKKRLNFGQTGDSESVPDPQPLGEPPAAPSGVGSGTMAAGGGAPMADNNEGADGVGNASGNWHCDSTWLGDRVITTSTRTWALPTYNNHLYKQISSQSAGSTNDNTYFGYSTPWGYFDFNRFHCHFSPRDWQRLINNNWGFRPKKLRFKLFNIQVKEVTTNDGVTTIANNLTSTVQVFSDSEYQLPYVLGSAHQGCLPPFPADVFMIPQYGYLTLNNGSQSVGRSSFYCLEYFPSQMLRTGNNFEFSYTFEDVPFHSSYAHSQSLDRLMNPLIDQYLYYLARTQSTTGGTAGNRELQFYQAGPSTMAEQAKNWLPGPCYRQQRVSKTLDQNNNSNFAWTGATKYHLNGRNSLVNPGVAMATHKDDEDRFFPSSGVLIFGKTGAANKTTLENVLMTNEEEIKTTNPVATEEYGVVSSNLQSANTAPQTQTVNSQGALPGMVWQNRDVYLQGPIWAKIPHTDGNFHPSPLMGGFGLKHPPPQILIKNTPVPANPPEVFTPAKFASFITQYSTGQVSVEIEWELQKENSKRWNPEIQYTSNYDKSTNVDFAVDSEGVYSEPRPIGTRYLTRNL

SEQ ID NO: 925 - DNA, 2211 bp, Artificial Sequence
  source: /note="Description of Artificial Sequence: Synthetic polynucleotide"
  variation (442)..(444): /replace="cag"
  variation (505)..(507): /replace="aga"
  variation (940)..(942): /replace="aac"
  variation (1396)..(1398): /replace="cac"
  variation (1687)..(1689): /replace="agt"
  variation (1738)..(1740): /replace="ata"
  variation (1762)..(1764): /replace="tct"
  misc_feature (1)..(2211): /note="Variant nucleotides given in the sequence have no preference with respect to those in the annotations for variant positions"
atggctgccgatggttatcttccagattggctcgaggacaacctctctgagggcattcgcgagtggtgggacctgaaacctggagccccgaaacccaaagccaaccagcaaaagcaggacgacggccggggtctggtgcttcctggctacaagtacctcggacccttcaacggactcgacaagggggagcccgtcaacgcggcggacgcagcggccctcgagcacgacaaggcctacgaccagcagctcaaagcgggtgacaatccgtacctgcggtataaccacgccgacgccgagtttcaggagcgtctgcaagaagatacgtcatttgggggcaacctcgggcgagcagtcttccaggccaagaagcgggttctcgaacctctcggtctggttgaggaaggcgctaagacggctcctggaaagaagagaccggtagagccgtcacctcagcgttcccccgactcctccacgggcatcggcaagaaaggccagcagcccgccaaaaagagactcaatttcggtcagactggcgactcagagtcagtccccgaccctcaacctctcggagaacctccagcagcgccctctggtgtgggatctggtacaatggctgcaggcggtggcgcaccaatggcagacaataacgaaggtgccgacggagtgggtaatgcctcaggaaattggcattgcgattccacatggctgggcgacagagtcattaccaccagcacccgaacctgggccctgcccacctacaacaaccacctctacaagcaaatctccagtcaaagtgcaggtagtaccaacgacaacacctacttcggctacagcaccccctgggggtattttgactttaacagattccactgccacttctcaccacgtgactggcagcgactcatcaacaacaactggggattccggcccaagaagctgcggttcaagctcttcaacatccaggtcaaggaggtcacgacgaatgacggcgttacgaccatcgctaataaccttaccagcacggttcaggtattctcggactcggaataccagctgccgtacgtcctcggctctgcgcaccagggctgcctgcctccgttcccggcggacgtcttcatgattcctcagtacggctacctgactctcaacaatggcagtcagtctgtgggacgttcctccttctactgcctggagtacttcccctctcagatgctgagaacgggcaacaactttgagttcagctacaccttcgaggacgtgcctttccacagcagctacgcacacagccagagcctggaccggctgatgaatcccctcatcgaccagtacttgtactacctggccagaacacagagtaccacaggaggcacagctggcaatcgggaactgcagttttaccaggccgggccttcaactatggccgaacaagccaagaattggttacctggaccttgctaccggcaacaaagagtctccaaaacgctggatcaaaacaacaacagcaactttgcttggactggtgccaccaaatatcacctgaacggcagaaactcgttggttaatcccggcgtcgccatggcaactcacaaggacgacgaggaccgctttttcccatccagcggagtcctgatttttggaaaaactggagcagctaacaaaactacattggaaaatgtgttaatgacaaatgaagaagaaattaaaactactaatcctgtagccacggaagaatacggggtagtcagcagcaacttacaatcggctaatactgcaccccagacacaaactgtcaacagccagggagccttacctggcatggtctggcagaaccgggacgtgtacctgcagggtcccatctgggccaagattcctcacacggatggcaactttcacccgtctcctttgatgggcggctttggacttaaacatccgcctcctcagatcctgatcaagaacactcccgttcccgctaatcctccggaggtgtttactcctgccaagtttgcttcgttcatcacacagtacagcaccggacaagtcagcgtggaaatcgagtgggagctgcagaaggaaaacagcaagcgctggaacccggagattcagtacacctccaactatgataagtcgactaatgtggactttgccgttgacagcgagggtgtttactctgagcctcgccctattggcactcgttacctcacccgtaatctg

SEQ ID NO: 926 - protein, 735 aa, Artificial Sequence
  source: /note="Description of Artificial Sequence: Synthetic polypeptide"
  VARIANT (162)..(162): /replace="Thr"
  VARIANT (168)..(168): /replace="Arg"
  VARIANT (224)..(224): /replace="Ser"
  VARIANT (310)..(310): /replace="Lys"
  VARIANT (410)..(410): /replace="Gln"
  VARIANT (446)..(446): /replace="Asn"
  VARIANT (461)..(461): /replace="Leu"
  VARIANT (471)..(471): /replace="Ser"
  VARIANT (708)..(708): /replace="Thr"
  SITE (1)..(735): /note="Variant residues given in the sequence have no preference with respect to those in the annotations for variant positions"
MAADGYLPDWLEDNLSEGIREWWDLKPGAPKPKANQQKQDDGRGLVLPGYKYLGPFNGLDKGEPVNAADAAALEHDKAYDQQLKAGDNPYLRYNHADAEFQERLQEDTSFGGNLGRAVFQAKKRVLEPLGLVEEGAKTAPGKKRPVEQSPQEPDSSSGIGKSGQQPAKKRLNFGQTGDSESVPDPQPLGEPPAAPSGVGSNTMASGGGAPMADNNEGADGVGNASGNWHCDSTWLGDRVITTSTRTWALPTYNNHLYKQISSQSGASNDNHYFGYSTPWGYFDFNRFHCHFSPRDWQRLINNNWGFRPKRLNFKLFNIQVKEVTTNDGTTTIANNLTSTVQVFTDSEYQLPYVLGSAHQGCLPPFPADVFMIPQYGYLTLNNGSQAVGRSSFYCLEYFPSQMLRTGNNFTFSYTFEDVPFHSSYAHSQSLDRLMNPLIDQYLYYLSRTQTTSGTAQNRELQFSQAGPSSMANQAKNWLPGPCYRQQRVSKTANDNNNSNFAWTGATKYHLNGRDSLVNPGPAMASHKDDEDKFFPMSGVLIFGKQGAGASNVDLDNVMITDEEEIKTTNPVATEQYGTVATNLQSSNTAPATGTVNSQGALPGMVWQDRDVYLQGPIWAKIPHTDGHFHPSPLMGGFGLKHPPPQILIKNTPVPANPPTTFSPAKFASFITQYSTGQVSVEIEWELQKENSKRWNPEIQYTSNYNKSANVDFTVDTNGVYSEPRPIGTRYLTRNL

SEQ ID NO: 927 - DNA, 2205 bp, Artificial Sequence
  source: /note="Description of Artificial Sequence: Synthetic polynucleotide"
  variation (484)..(486): /replace="aca"
  variation (502)..(504): /replace="aga"
  variation (670)..(672): /replace="tcc"
  variation (928)..(930): /replace="aaa"
  variation (1228)..(1230): /replace="cag"
  variation (1336)..(1338): /replace="aac"
  variation (1381)..(1383): /replace="ctg"
  variation (1411)..(1413): /replace="tct"
  variation (2122)..(2124): /replace="acc"
  misc_feature (1)..(2205): /note="Variant nucleotides given in the sequence have no preference with respect to those in the annotations for variant positions"
atggctgccgatggttatcttccagattggctcgaggacaacctctctgagggcattcgcgagtggtgggacttgaaacctggagccccgaaacccaaagccaaccagcaaaagcaggacgacggccggggtctggtgcttcctggctacaagtacctcggacccttcaacggactcgacaagggggagcccgtcaacgcggcggatgcagcggccctcgagcacgacaaggcctacgaccagcagctcaaagcgggtgacaatccgtacctgcggtataaccacgccgacgccgagtttcaggagcgtctgcaagaagatacgtcttttgggggcaacctcgggcgagcagtcttccaggccaagaagagggttctcgaacctcttggtctggttgaggaaggtgctaagacggctcctggaaagaaacgtccggtagagcagtcgccacaagagccagactcctcctcgggcattggcaagtcaggccagcagcccgctaaaaagagactcaattttggtcagactggcgactcagagtcagtccccgacccacaacctctcggagaacctccagcagccccctctggtgtgggatctaatacaatggcttcaggcggtggcgcaccaatggcagacaataacgaaggcgccgacggagtgggtaatgcctcaggaaattggcattgcgattccacatggctgggcgacagagtcatcaccaccagcacccgaacatgggccttgcccacctataacaaccacctctacaagcaaatctccagtcaatcaggggccagcaacgacaaccactacttcggctacagcaccccctgggggtattttgatttcaacagattccactgccatttctcaccacgtgactggcagcgactcatcaacaacaattggggattccggcccaagagactcaacttcaagctcttcaacatccaagtcaaggaggtcacgacgaatgatggcaccacgaccatcgctaataaccttaccagcacggttcaagtcttcacggactcggagtaccagttgccgtacgtcctcggctctgcgcaccagggctgcctccctccgttcccggcggacgtgttcatgattccgcagtacggctacctaacgctcaacaatggcagccaggcagtgggacggtcatccttttactgcctggaatatttcccatcgcagatgctgagaacgggcaataactttaccttcagctacaccttcgaggacgtgcctttccacagcagctacgcgcacagccagagcctggaccggctgatgaatcctctcatcgaccagtacctgtattacctgagcagaactcagactacgtccggaactgcccaaaacagggagttgcagtttagccaggcgggtccatctagcatggctaatcaggccaaaaactggctacctggaccctgttaccggcagcagcgcgtttctaaaacagcaaatgacaacaacaacagcaactttgcctggactggtgctacaaaatatcaccttaatgggcgtgattctttagtcaaccctggccctgctatggcctcacacaaagacgacgaagacaagttctttcccatgagcggtgtcttgatttttggaaagcagggcgccggagcttcaaacgttgatttggacaatgtcatgatcacagacgaagaggaaatcaaaaccactaaccccgtggccaccgaacaatatgggactgtggcaaccaatctccagagcagcaacacagcccctgcgaccggaactgtgaattctcagggagccttacctggaatggtgtggcaagacagagacgtatacctgcagggtcctatttgggccaaaattcctcacacggatggacactttcacccgtctcctctcatgggcggctttggacttaagcacccgcctcctcagatcctcatcaaaaacacgcctgttcctgcgaatcctccgacaacgttttcgcctgcaaagtttgcttcattcatcacccagtattccacaggacaagtgagcgtggagattgaatgggagctgcagaaagaaaacagcaaacgctggaatcccgaaatacagtatacatctaactataataaatctgccaacgttgatttcactgtggacaccaatggagtttatagtgagcctcgccccattggcacccgttacctcacccgtaacctg

SEQ ID NO: 928 - protein, 735 aa, Artificial Sequence
  source: /note="Description of Artificial Sequence: Synthetic polypeptide"
  VARIANT (42)..(42): /replace="Ser"
  VARIANT (168)..(168): /replace="Lys"
  VARIANT (310)..(310): /replace="Arg"
  VARIANT (410)..(410): /replace="Gln"
  VARIANT (446)..(446): /replace="Arg"
  VARIANT (461)..(461): /replace="Leu"
  VARIANT (471)..(471): /replace="Ser"
  VARIANT (475)..(475): /replace="Arg"
  VARIANT (504)..(504): /replace="Ala"
  VARIANT (539)..(539): /replace="Asn"
  SITE (1)..(735): /note="Variant residues given in the sequence have no preference with respect to those in the annotations for variant positions"
MAADGYLPDWLEDNLSEGIREWWDLKPGAPQPKANQQHQDDGRGLVLPGYKYLGPFNGLDKGEPVNEADAAALEHDKAYDQQLKAGDNPYLKYNHADAEFQERLQEDTSFGGNLGRAVFQAKKRVLEPLGLVEEAAKTAPGKKRPVEQSPQEPDSSSGIGKSGQQPARKRLNFGQTGDSESVPDPQPLGEPPAAPSGVGSNTMASGGGAPMADNNEGADGVGNSSGNWHCDSTWLGDRVITTSTRTWALPTYNNHLYKQISSQSGASNDNHYFGYSTPWGYFDFNRFHCHFSPRDWQRLINNNWGFRPKKLNFKLFNIQVKEVTQNDGTTTIANNLTSTVQVFTDSEYQLPYVLGSAHQGCLPPFPADVFMIPQYGYLTLNNGSQAVGRSSFYCLEYFPSQMLRTGNNFTFSYTFEDVPFHSSYAHSQSLDRLMNPLIDQYLYYLSRTQTTSGTTQQSRLQFSQAGPSSMAQQAKNWLPGPCYRQQRVSKTANDNNNSNFAWTGATKYHLNGRDSLVNPGPAMASHKDDEEKFFPMHGVLIFGKQGTGASNVDLDNVMITDEEEIRTTNPVATEQYGTVATNLQSSNTAPATGTVNSQGALPGMVWQDRDVYLQGPIWAKIPHTDGHFHPSPLMGGFGLKHPPPQILIKNTPVPANPPTTFSPAKFASFITQYSTGQVSVEIEWELQKENSKRWNPEIQYTSNYNKSVNVDFTVDTNGVYSEPRPIGTRYLTRNL

(The sequence listing continues in the following parts.)

1. An AAV viral genome comprises:
a. a 5′ inverted terminal repeat (ITR) sequence region;
b. a promoter sequence region;
c. at least one antibody polynucleotide, wherein said at least one antibody polynucleotide comprises a polynucleotide sequence with at least 90% identity, or encodes an amino acid sequence with at least 90% identity, to a sequence selected from the group consisting of SEQ ID NO: 1740-1989, 2241-2243, and 2169-2170; and
d. a 3′ ITR sequence region.

2. The AAV viral genome of claim 1 comprising:
an exon sequence regions selected from the group consisting of SEQ ID NO: 2090-2094;
an intron sequence region selected from the group consisting of SEQ ID NO: 2095-2105, 2240 and 2256-2258;
a signal sequence region selected from the group consisting of SEQ ID NO: 1740, 1741, 1861, 2106-2117 and 2241;
a tag sequence region selected from the group consisting of SEQ ID NO: 2118-2121 and 2255; and/or
a filler sequence region selected from the group consisting of SEQ ID NO: 2125 and 2126.

3-6. (canceled)

7. The AAV viral genome of claim 1, comprising two antibody polynucleotides.

8. The AAV viral genome of claim 7, wherein the two antibody polynucleotides are separated by a linker sequence selected from the group consisting of SEQ ID NO: 1724-1739, 2244-2254 and 2259.

9. The AAV viral genome of claim 7 wherein a first antibody polynucleotide encodes an antibody heavy chain or a fragment thereof.

10. The AAV viral genome of claim 7 wherein a second polynucleotide encodes an antibody light chain or a fragment thereof.

11. The AAV viral genome of claim 1 comprising more than two antibody polynucleotides.

12. The AAV viral genome of claim 8, encoding from 5′ to 3′;
an antibody heavy chain, a linker sequence, and an antibody light chain; or
an antibody light chain, a linker sequence, and an antibody heavy chain.

13. (canceled)

14. An AAV particle comprising the AAV viral genome of claim 1.

15. The AAV particle of claim 14, wherein the sequence of the AAV viral genome is selected from the group consisting of SEQ ID NO: 1990-2075, 2137-2168, 2171-2237 and 2260-2321.

16. The AAV particle of claim 14, comprising an AAV serotype selected from the group consisting of VOY101, VOY201, AAVPHP.B (PHP.B), AAVPHP.A (PHP.A), AAVG2B-26, AAVG2B-13, AAVTH1.1-32, AAVTH1.1-35, AAVPHP.B2 (PHP.B2), AAVPHP.B3 (PHP.B3), AAVPHP.N/PHP.B-DGT, AAVPHP.B-EST, AAVPHP.B-GGT, AAVPHP.B-ATP, AAVPHP.B-ATT-T, AAVPHP.B-DGT-T, AAVPHP.B-GGT-T, AAVPHP.B-SGS, AAVPHP.B-AQP, AAVPHP.B-QQP, AAVPHP.B-SNP(3), AAVPHP.B-SNP, AAVPHP.B-QGT, AAVPHP.B-NQT, AAVPHP.B-EGS, AAVPHP.B-SGN, AAVPHP.B-EGT, AAVPHP.B-DST, AAVPHP.B-DST, AAVPHP.B-STP, AAVPHP.B-PQP, AAVPHP.B-SQP, AAVPHP.B-QLP, AAVPHP.B-TMP, AAVPHP.B-TTP, AAVPHP.S/G2A12, AAVG2A15/G2A3 (G2A3), AAVG2B4 (G2B4), AAVG2B5 (G2B5), PHP.S, AAV1, AAV2, AAV2 variant, AAV2/3 variant, AAV2G9, AAV3, AAV3a, AAV3b, AAV3-3, AAV4, AAV4-4, AAV5, AAV6, AAV6.1, AAV6.2, AAV6.1.2, AAV7, AAV7.2, AAV8, AAV9, AAV9K449R, AAV9.11, AAV9.13, AAV9.16, AAV9.24, AAV9.45, AAV9.47, AAV9.61, AAV9.68, AAV9.84, AAV9.9, AAV10, AAV11, AAV12 and variants thereof.

17. (canceled)

18. The AAV particle of claim 16, where the amino acid sequence of VOY101 comprises SEQ ID NO: 1.

19. The AAV particle of claim 14, comprising an AAV serotype of AAV2 or an AAV2 variant, AAV5 or an AAV5 variant, or AAV9 or an AAV9 variant.

20-23. (canceled)

24. A pharmaceutical composition comprising the AAV particle of claim 14.

25. A method of producing a functional antibody in a subject in need thereof, comprising administering to said subject the pharmaceutical composition of claim 24.

26. The method of claim 25, wherein the level or amount of the functional antibody in the target cell or tissue after administration to the subject is from about 0.001 ug/mL to 100 mg/mL.

27. The method of claim 25, wherein the functional antibody is encoded by the at least one antibody polynucleotide of the viral genome within said AAV particle.

28. (canceled)

29. A method for treating tauopathy in a subject in need, comprising administering to said subject a therapeutically effective amount of the pharmaceutical composition of claim 24.

30. The method of claim 29 comprising administering the AAV particle by a delivery route selected from the group consisting of intravenous intraparenchymal, intracerebroventricular, and intracisternal.

31-36. (canceled)

37. The methods of claim 29, wherein the tauopathy is selected from the group consisting of Alzheimer's disease (AD), frontotemporal dementia and parkinsonism linked to chromosome 17 (FTDP-17), Frontotemporal lobar degeneration (FTLD), Frontotemporal dementia, chronic traumatic encephalopathy (CTE), Progressive Supranuclear Palsy (PSP), Down's syndrome, Pick's disease, Corticobasal degeneration (CBD), Corticobasal syndrome, Amyotrophic lateral sclerosis (ALS), Prion diseases, Creutzfeldt-Jakob disease (CJD), Multiple system atrophy, Tangle-only dementia, and Progressive subcortical gliosis and other tau associated disease.

38-39. (canceled)

40. The AAV genome of claim 1, further comprising a polyadenylation (polyA) signal sequence region, and wherein:
the 5′ ITR sequence region is selected from the group consisting of SEQ ID NO: 2076 and 2077;
the promoter sequence region is selected from the group consisting of SEQ ID NO: 2080-2089 and 2238-2239;
the 3′ ITR sequence region is selected from the group consisting of SEQ ID NO: 2078 and 2079; and/or
the polyA signal sequence region is selected from the group consisting of SEQ ID NO: 2122-212.
